United States Patent Application Publication US 2011/0182862 A1 - sequence listing, part 6

SEQ ID NO: 7575 - DNA, 3054 bp, Muscodor strobelii
  misc_feature: SGI EST ID NO. CUFF.18868.0
  misc_feature: Variant of the nucleotide sequence at SEQ ID NO 7573
ggaagatctccagacactatcgctttacgaatctatccactcagtcctaggagacgcttgttgagttaattgaagatcaacagaacagctaggagccttcggaaatagatgctgtttcgaaacaggtcgaataacaaggtggcattcggaggctcaaggacgtggcaacttcaccagcctaggtactatctgattcctagagcgatcatggccttcagatagtaaatgttgtgggccgtagaggacaagcattcggtgtgcattctaggctctggcagagccatagagacgaggcaacgacaggtctgaggtgtggaatttacacgcacaccatttgatggcacacccccaggcattcgacatggggcgtgcctagaagaacagaaactaggcgtgagagtatcatttcttacgttaggtagtcaaaaccttgttggtagagtgtgactgctgtcttggctgcttgaagagcacggtggcagtcgcagcttagactaagaacatgactgcatttcttatcaccgtcgctagcccaacagaacaattacgtgagccgtgatactggaattctagatccaaattacacttagccggccgaggaaatcatataaaatcctgccaacctccatttttatatggtacataactcatgtagatacctaacgtgttggcaataccgtcccgattccggactgaagcggggaacgaagataggtttcggagatcgacaccgacaccccctatggcattttagcaagaaccggaagggcgtacggtaaccatagtataagcctcgtggtaattgctctattttcattgttagatgaaaacaatcagctttctctctctctttaagaatattgtatatttcacaacataattgcgtttcagttttccacgtcgcgtaaagccaagcaaccagaaccatggcgccatcagcagtgacagaagtcttgcatgaggcatcgattgcattgagtgaaaagaaacccgggatcaatagtgagcaaatggtactcgaaaagaaagagttgaccccccttgaagccatatctcacggcctggtaatgcctggaataccgacatttccgagctatcatgccgagagacgtcacatgcttggtgcgtatgaaaccgttccattctggtttctcaaccactctgtcctccgagttatcctggcttacatgtattatagtaagcaatccctgtcccaataaatctgacaacgcctgaggcgtggtgtttcagaattataccaacatacgtttcgaccttagatacatatggcggcgaccttccgccatttcgcccgaagcggattcacggaaggccagtcgggccacatctctgtccgggaccccgagttcccgtcactgatgtggatgaacccgctcgggcggcattttggtctcctctcagcgggtgacatgatatgcctcgatatacaaaccggccgtgtggctggtggaaatacatcacgacccgctaatgccgctggctacttgatacactcagctgtccacaaaaggcggccggatgatgttcacgcggtttgtcacgcccatggtatgtatagaacaatcccgttcctttttaacattcgttattttctcgctaattttaattatagtaagtatactccttgtttagattgggaaccccgatacgggccgggaaactctagaatatagcgatttaattccagaccgtgacgaataagaaaaagacctaacatgtctgaataccctagagtattgcgggaagagcttggagtacattcgcacgccccctggaaatgctgaaccaagacgtttgtaacttctacaacgcccacgctgtctacgcacaatatggaggcatcgtttttggcgcggaagagggtgaaaatattgctactgcactaggagaccacaacaagggtgtgatactcatgaatcacggacttctgagtgtaggctggactgttgatgaggctgggttcatgtttggactacttgaccgggcttgtcagatgcagttgcaagtcgaggccgcagcggccaatggtattcctaagcagatcattagtgatgaggaggctgcgtacaacttcaagatggcgagcgagaagaatgccctttatcgtgaagctcagcctgatctcgaatttgaattcgaaatggctggcggggagaatgttcttggtcgggggtttgaggcgttatcccacctcactccatgatcctgcctctatattttaatagagtagaatacgggagagtacggtgagactcgttcgaccatggggttccattgcatgtatattctcgcgtacaaaggtccgaaactgatgattcattatcatagaatttcctcgcccattttctggcgtcggtatcaaagtaggagtgactctgcttctctcgtatgttatttcgtatcttgcatatgccagagatgtccgatatctcgcagccgggggacatgagccggaatgcgtcaccagtgtaacctggtggggaaagttgccaggttagctggacaccagaagtacaatatctgcagttcgaggtatagatacgcagtgattatcgcgttgtattagttatgggaataaatcgtagggaattcacaccggcctttgtcgagtctcttactctgcgatcacaattttgaaaaggctctaccacgatcgtagccccgatcttgacagtaggatatgaactcaaatgagtatcttattttgcagcacaaaacgagctgatttatcccattccagagcaaggaagtcatgccaagaccagtggtaaaccgaaggagaaggagttacgtgtgatgtgctgctttccctcaagacatgggaaggttacctaaggtatacacattgcggaggttactaaatgaggcaatcatcgcgtatcttggttacatagcccgttgtaaatgtcgtcctatcttcgaatcagaagcgagagaatcgtgccattcgcaagccgcgaacaagattttgtccaattgtagccccatcaattggcatgggtgctactcagggtctcaacggacatgacggga

SEQ ID NO: 7576 - DNA, 2157 bp, Muscodor strobelii
  misc_feature: SGI cDNA ID NO. 562292
  misc_feature: Encodes the peptide sequence at SEQ ID NO 7577
atgaggtacacatacgtcagcctcgatgcagatgcggaggagattagattgatcaagctatatcccggtgcattcgacgacgagatccaattcaacatctttcaccacccacttaagccaccaagccgggcaaccaaagaccgcagactaccaattccagaaatacagaagactttgcgagacggctggcaagtaaagaagaacctcgaaggacgatatcttttcatcagacttggcaactcgggcacgcctaactcatgggatcaccctgaccccagcatagatcgcgcgctctatacacttccggaggaagaaccagcttgctacgagccagagtacgatgcgttatcgtatacatggggcacaccaggaaatccgacacaagcgcatgttctcgatggagatggaaaggctcaaagtgttatgcaaattgggcagaatctcgagagtgctctaagacatctccgctacctggattgcgcccgaacgctatgggttgatgcgatctgtatcaatcagaatgatatctccgagcgaaacaagcaggtcaagcgtatgagtaacatttactctctggcctcccgcgtcgtgatctggctgggacccgagtccgaatcccaatccagtacacatgcgctgtcgactttgactcattttggtaaccaggtcgagttcacattggacgagtgcatcggcgatgcccccggctcggtcgagccgaggtggtgggattccaagttcgagctcccgtatgatgatcgcacatgggccgctctgcatcaactgttacacagggaatggttcagtcgagtttgggtgcttcaagaagcaatgctcgcgaacacgtcggctgttctccattgcggtagcgcaagtgcaccctggccgactgtgaaaaaagctataattgttttagctgagaaagttgggctcccgattgatctcttctacttaatgggttcctatcgtatggcactcgtgatgccagcgccgctgggattcatgccaactatgctttgggccagcttccatgactgctctgatccgagggataagatatacggcgtattgagtctgcttgacccaaagatgtccagggcgattgtgcccaactatgaggagagtaacactccattgcaggtgtatcgcagtgcgctgctctcgcattttagtgtgagccaacgggtcagtctgctgcgacattgtcagattgacataagtctgccgggctggccatcgtgggttcctaactggtcgattgcatcaacgaactttttcggctttaggaaggggcactcccgaccgacttctgcatattcatcggctcgatttcagtatgaggcaccggatactttatcagtccgaggcatccagtgtgctcgtgtcgagtcagccaagcgaattccttctggagacatttccactgttatctcaacccttcgctcctggactccttcagaaccagacagggcatacccaagcggaggttcgtattctgacgcctttcttgaggtcatttccaaaggtcgcgtcagggatagatacccaaatattcctgtattcccatctcttgacgaacttcgaagcggacacgaagacatgttagccggaaaacgttcatcatcgcaaatttcatttgatctgcatcaggaactctctagagagggctcttcactactagaattttcaggtggatatctcggtgttgcgcaggtaaatacccgagaaggagatattgtgtgtgttatactaggctgtgactatccgctgctcctgcgcccgaatgcttcagcttcttcgccctctggctcctacatggtaatagggcaatgctttgttcacggcctgatggacggtgaaagcatactcggccctttgccacagaactacaagatggacatgcgccagggaaaggacggaaaagagataccatgctttacaaacaccgtcacgcagaaagtttcaattcatgaccctaggctcccagctcttccgacagaatgggagaaagttgataaggagagagaaagggacgattcttactttgtgaggtactatcggaataaagtgacacaagagttgatcagctatgatccccgcattgaatctgtgctggaggttaggaagataccggtgcaggatttccggcttgtgtga

SEQ ID NO: 7577 - protein, 718 aa, Muscodor strobelii
  misc_feature: SGI Peptide ID NO. 562292
  misc_feature (113)..(276): Pfam Id: PF06985 Pfam Desc: Heterokaryon incompatibility protein (HET)
  misc_feature (113)..(215): Pfam Id: PF06985 Pfam Desc: Heterokaryon incompatibility protein (HET)
  misc_feature (3)..(718): NCBI GI: 154311024 Blast Desc: BC1G_06630 [Botryotinia fuckeliana B05.10] gi|150851034|gb|EDN26227.1| BC1G_06630 [Botryotinia fuckeliana B05.10]
  misc_feature (3)..(718): NCBI GI: 256719970 Blast Desc: NECHADRAFT_98482 [Nectria haematococca mpVI 77-13-4]
  misc_feature (3)..(718): NCBI GI: 256727220 Blast Desc: NECHADRAFT_32743 [Nectria haematococca mpVI 77-13-4]
  misc_feature (3)..(718): NCBI GI: 169603560 Blast Desc: SNOG_04789 [Phaeosphaeria nodorum SN15] gi|111066060|gb|EAT87180.1| SNOG_04789 [Phaeosphaeria nodorum SN15]
  misc_feature (2)..(701): NCBI GI: 46139411 Blast Desc: FG11220.1 [Gibberella zeae PH-1]
  misc_feature (3)..(718): NCBI GI: 115492481 Blast Desc: [Aspergillus terreus NIH2624] gi|114197728|gb|EAU39428.1| [Aspergillus terreus NIH2624]
  misc_feature (169)..(718): NCBI GI: 145609067 Blast Desc: MGG_09107 [Magnaporthe grisea 70-15] gi|145016510|gb|EDK00940.1| MGG_09107 [Magnaporthe grisea 70-15]
  misc_feature (111)..(633): NCBI GI: 256730222 Blast Desc: NECHADRAFT_82497 [Nectria haematococca mpVI 77-13-4]
  misc_feature (3)..(718): NCBI GI: 39974569 Blast Desc: MGG_00569 [Magnaporthe grisea 70-15] gi|145018530|gb|EDK02809.1| MGG_00569 [Magnaporthe grisea 70-15]
  misc_feature (3)..(468): NCBI GI: 261357884 Blast Desc: conserved [Verticillium albo-atrum VaMs.102]
MRYTYVSLDADAEEIRLIKLYPGAFDDEIQFNIFHHPLKPPSRATKDRRLPIPEIQKTLRDGWQVKKNLEGRYLFIRLGNSGTPNSWDHPDPSIDRALYTLPEEEPACYEPEYDALSYTWGTPGNPTQAHVLDGDGKAQSVMQIGQNLESALRHLRYLDCARTLWVDAICINQNDISERNKQVKRMSNIYSLASRVVIWLGPESESQSSTHALSTLTHFGNQVEFTLDECIGDAPGSVEPRWWDSKFELPYDDRTWAALHQLLHREWFSRVWVLQEAMLANTSAVLHCGSASAPWPTVKKAIIVLAEKVGLPIDLFYLMGSYRMALVMPAPLGFMPTMLWASFHDCSDPRDKIYGVLSLLDPKMSRAIVPNYEESNTPLQVYRSALLSHFSVSQRVSLLRHCQIDISLPGWPSWVPNWSIASTNFFGFRKGHSRPTSAYSSARFQYEAPDTLSVRGIQCARVESAKRIPSGDISTVISTLRSWTPSEPDRAYPSGGSYSDAFLEVISKGRVRDRYPNIPVFPSLDELRSGHEDMLAGKRSSSQISFDLHQELSREGSSLLEFSGGYLGVAQVNTREGDIVCVILGCDYPLLLRPNASASSPSGSYMVIGQCFVHGLMDGESILGPLPQNYKMDMRQGKDGKEIPCFTNTVTQKVSIHDPRLPALPTEWEKVDKERERDDSYFVRYYRNKVTQELISYDPRIESVLEVRKIPVQDFRLV

SEQ ID NO: 7578 - DNA, 3339 bp, Muscodor strobelii
  misc_feature: SGI cDNA ID NO. 562293
  misc_feature: Encodes the peptide sequence at SEQ ID NO 7579
atgtttgggattgtgcagggcgtcggcgtagcagcaccatttgcgattccttcggcatcacagccaggagcagcgcaatttgcaccggtgagaagccaatcgacggtgcacgcaaagagcaagcggaagacgagttttcgcgacgacacgcacccgcggctagtggcgttgagatacgagcagacgcaggcgttggaggagccaatcccgctgccgccccctcggtcgcccctgcgtcaactgccctcctcctcatcctctgcgcgcacccgatctggctctcagactcagggtcaccctcaccctcacggtcaggctcacgctcgtgctcactctcacgctcattccttcaattccacctctacatccacctccaactctaagtccagttcccattcccactcgcattccgaatccagctccagctctactcactcccgggctcgaccttcgtcgtgcattccttccccctcttctggtgcagttgctgcctttgctgctactgctagtgctggtggtgctgtcccgcctccacggccagagcgacccgccgagcagcatcccgccctgcgcaccatctcatctcccagacagccggattcggaacattcctggcgagacccaagtctcgcaccgccttcatccacgcgcacgcacgcatactcttatgcagacacgacagatgacgaagaggacccatttgcgtacgaaaacatcgacaacatcgacaacaccgacaacaccgacattgcatccggggtgcaaccgctccaattgaggaccagatcgccgtgctcgtccatctactcgctgtacgaccggacagacgacatcatccctgggcagccagacgaggcagaggcacgagtcagcgaggcagagagcagacccagcgaaaccttctcgtctccggccttgtccctcagcgccagcggcactgcatcgcccgcatcctctgcgtctcctgcaacgccgccgccgcaattcaccaagcggttcggccgaagtctgagcctgcgctccgggcaatcgaagaagtcagcatcgatgaagaagctgcggaagaagtcgctgagagaggcagacgcggatggcagggatggtggtgatgcgggcgggaacaataccaataacggcaccaatgatcacatacccccgcccttgcctgattcgtggagattcgcgccaaacccgattcacccaagtaatatcagcggctcccgtcctccccccttaagcgacgccgtctcgcccgtcatctccaccgacatcccctgcgagagcttcttcgaggaggatgacctgaccaagctctccttctccatccgcggcagcctcatcttcggcggcaggcgtccgtggaagtccgccaccagccatcccaagatgcccgaccgcgaccgcgacgccatcgccgagcagcccgagcgccccgacctccccgccaacgcacgcgtcttccccctcgtcccgaccgcgcccaggaacaatggacccaggcccgtgcgaccgccgcgccaagacgatatgggcgtcgccgacatcatccagccgcccaccaacgtcaccctcaacgccaatcccaatccccccgcgggcatcgacaaggacgttaccataaaggatatcccgtccactcccacatccacgggcggcggaggcaagctgccccccagcatccgagtcatctctgccgaggccgagaaggaatctcaaaaggtgagatctctctatgcattcggggagggtcttcacccaggagacggcgaccggccctcatcttttggtgagctgctcgagccgactcccgaagtcccgtcagacgtggatgagaatgacgcggccgccgccgacgctcaacatggactccctactcaaacgtcggcttctacgtcctcgcaagcgccacccgatagctggtcgcggcgcaaccaccagctcgccggcggcatcgaggactgggaaggcgtcgacggtgaagatgtcgaccgctacggcttcatcgtgccccatcgcctgggctcgccgacggccgccaccaatgattcttcttcggtgaccttttcgccgcgcaagcgtagaaacgtcttgacgaggaaggacggcgcatcgcattctctgggcgttaagcacggccctgcgaagaaggcgtccgcccgctctctcaatacacaaacctccgaaatatcttctgtatcgcgccgctctgtccgctccaccatccgccaggctaccaataaactgccgcacaaccgcgacaggaggctagtcgatgaagccggcgatattttggcagtgcagcccggtctctctcacattcgcgaagacgagacagccgagaaggtggcactcgagctcaagcgaaaggagactgagcgctccgacaagtggcgcaagatggcccaggtcgtgaagtcgggctccgacgggcagggaactgtattcaacttcgataccaagcatcccaagctcatatcacgaacttggaaaggcatccctgactgctggcgatccgccgcctggtacgcatttctggccaccagcgccaaagccgattcggcaaccttcaagacggacgccgagctgaaacaagacttcgcacgtcttgtggacgagccatcgccggatgacacacagatcgatcttgatgtacccagaacgatcaaccagcacatcatgttccgaaggagatatcgaggcggacagcggctcttgttccgtgtgctgcattgcctgtcgctctatttccctgacacgggttatgtgcaaggcatggccccattggcggcgactctgctgtcttactacgatgaggaaatctgcttcgttatgctcgttcggctttggcagtaccgcggtctcaaccgaatctatcaatccggtttcgtagagctgatagatgctctgaacgattttgaacaacattggctgcatggtaaggatgtgtcagaaaggctcaaagagctttgcatcggacccacggcttatgccactcggtggtacctgacactcttcaacttatccataccctttcccgtgcagcttcgcgtatgggatgtcttcatgcttctgggttcatctccacctgaacgaccagagagccaagccacagatcacaaaggctcaaaagactatatttcttccgcgggactggagattctgcatgcaacgagccttgccataatcgacactttacaaccagcactcgcggatgccgactttgaaaacgcgatgaaatctttgacttcgtgggtccctatcaaggacgagcagaagtttttagaagtcgttcagatcgaatggaagaaacatcagagcagacagaagaagaaggcttag

SEQ ID NO: 7579 - protein, 1112 aa, Muscodor strobelii
  misc_feature: SGI Peptide ID NO. 562293
  misc_feature (828)..(1049): Pfam Id: PF00566 Pfam Desc: TBC domain
  misc_feature (879)..(950): Pfam Id: PF00566 Pfam Desc: TBC domain
  misc_feature (177)..(1109): NCBI GI: 39977631 Blast Desc: MGG_06700 [Magnaporthe grisea 70-15] gi|145013785|gb|EDJ98426.1| MGG_06700 [Magnaporthe grisea 70-15]
  misc_feature (413)..(1109): NCBI GI: 256732544 Blast Desc: NECHADRAFT_99970 [Nectria haematococca mpVI 77-13-4]
  misc_feature (558)..(1109): NCBI GI: 46123233 Blast Desc: FG05994.1 [Gibberella zeae PH-1]
  misc_feature (530)..(1110): NCBI GI: 28881099 Blast Desc: conserved [Neurospora crassa]
  misc_feature (558)..(1109): NCBI GI: 156053708 Blast Desc: SS1G_05701 [Sclerotinia sclerotiorum 1980] gi|154703482|gb|EDO03221.1| SS1G_05701 [Sclerotinia sclerotiorum 1980]
  misc_feature (641)..(1105): NCBI GI: 171689508 Blast Desc: protein product [Podospora anserina] gi|170944716|emb|CAP70827.1| protein product [Podospora anserina]
  misc_feature (559)..(1108): NCBI GI: 119186731 Blast Desc: CIMG_03413 [Coccidioides immitis RS]
  misc_feature (559)..(1108): NCBI GI: 240108458 Blast Desc: TBC domain containing protein [Coccidioides posadasii C735 delta SOWgp]
  misc_feature (420)..(1109): NCBI GI: 261354464 Blast Desc: conserved [Verticillium albo-atrum VaMs.102]
  misc_feature (561)..(1109): NCBI GI: 212526038 Blast Desc: TBC domain protein, [Penicillium marneffei ATCC 18224] gi|210072574|gb|EEA26661.1| TBC domain protein, [Penicillium marneffei ATCC 18224]
MFGIVQGVGVAAPFAIPSASQPGAAQFAPVRSQSTVHAKSKRKTSFRDDTHPRLVALRYEQTQALEEPIPLPPPRSPLRQLPSSSSSARTRSGSQTQGHPHPHGQAHARAHSHAHSFNSTSTSTSNSKSSSHSHSHSESSSSSTHSRARPSSCIPSPSSGAVAAFAATASAGGAVPPPRPERPAEQHPALRTISSPRQPDSEHSWRDPSLAPPSSTRTHAYSYADTTDDEEDPFAYENIDNIDNTDNTDIASGVQPLQLRTRSPCSSIYSLYDRTDDIIPGQPDEAEARVSEAESRPSETFSSPALSLSASGTASPASSASPATPPPQFTKRFGRSLSLRSGQSKKSASMKKLRKKSLREADADGRDGGDAGGNNTNNGTNDHIPPPLPDSWRFAPNPIHPSNISGSRPPPLSDAVSPVISTDIPCESFFEEDDLTKLSFSIRGSLIFGGRRPWKSATSHPKMPDRDRDAIAEQPERPDLPANARVFPLVPTAPRNNGPRPVRPPRQDDMGVADIIQPPTNVTLNANPNPPAGIDKDVTIKDIPSTPTSTGGGGKLPPSIRVISAEAEKESQKVRSLYAFGEGLHPGDGDRPSSFGELLEPTPEVPSDVDENDAAAADAQHGLPTQTSASTSSQAPPDSWSRRNHQLAGGIEDWEGVDGEDVDRYGFIVPHRLGSPTAATNDSSSVTFSPRKRRNVLTRKDGASHSLGVKHGPAKKASARSLNTQTSEISSVSRRSVRSTIRQATNKLPHNRDRRLVDEAGDILAVQPGLSHIREDETAEKVALELKRKETERSDKWRKMAQVVKSGSDGQGTVFNFDTKHPKLISRTWKGIPDCWRSAAWYAFLATSAKADSATFKTDAELKQDFARLVDEPSPDDTQIDLDVPRTINQHIMFRRRYRGGQRLLFRVLHCLSLYFPDTGYVQGMAPLAATLLSYYDEEICFVMLVRLWQYRGLNRIYQSGFVELIDALNDFEQHWLHGKDVSERLKELCIGPTAYATRWYLTLFNLSIPFPVQLRVWDVFMLLGSSPPERPESQATDHKGSKDYISSAGLEILHATSLAIIDTLQPALADADFENAMKSLTSWVPIKDEQKFLEVVQIEWKKHQSRQKKKA

SEQ ID NO: 7580 - DNA, 4672 bp, Muscodor strobelii
  misc_feature: SGI EST ID NO. CUFF.18969.1
  misc_feature: Variant of the nucleotide sequence at SEQ ID NO 7578
cgcgataccattttattttcggtttctagattgaactccagaagcgtcagtgacaaaatagaaacaagtcgtttcgtcgtccccgccgccaagcatctcatattatagccagctacagagtcaggttagtgatacggtatatgccatctcagctttagccccagaagcgtgttggaacggccacgaagaactgtttaggtttggacacgttcacattccacggaattcagcagccggttgacacacgaacgcaattggtattatctttggtggcagggctgcccaattgttccgaatcgagttcatgtgattaattgcgagtcattctattgtgccctatgtcagaaatcagggagatctctacgtggtgattttggcgctggcgtgctttcatcgaggcgagtaagacgctgttttaggacgctccatcattaaggccccaccagaggcgaattgatgtgatagaaaaggacggttcggcagcacaaccagcagcagtgccttgacggcacattcattttcgcctggcttggacattcagagtttcagtgttatcttggatacttgaatagactagcctggagctggcggccccgtttacttggggttagaaaacaagacgttggtagtgagaccggcgaagcaagtacagcatcggggcccgttcgaaaatagacccggaagaggatcgtggttcagttacacggcatctctgggtttacattactgtacattccgcagcttccaaggcagaagggtttgcttggggcttcagcacatcggtgccggtgcagcaacgacagcggagaattataggacagatacttggagacacgacaggatgtttgggattgtgcagggcgtcggcgtagcagcaccatttgcgattccttcggcatcacagccaggagcagcgcaatttgcaccggtgagaagccaatcgacggtgcacgcaaagagcaagcggaagacgagttttcgcgacgacacgcacccgcggctagtggcgttgagatacgagcagacgcaggcgttggaggagccaatcccgctgccgccccctcggtcgcccctgcgtcaactgccctcctcctcatcctctgcgcgcacccgatctggctctcagactcagggtcaccctcaccctcacggtcaggctcacgctcgtgctcactctcacgctcattccttcaattccacctctacatccacctccaactctaagtccagttcccattcccactcgcattccgaatccagctccagctctactcactcccgggctcgaccttcgtcgtgcattccttccccctcttctggtgcagttgctgcctttgctgctactgctagtgctggtggtgctgtcccgcctccacggccagagcgacccgccgagcagcatcccgccctgcgcaccatctcatctcccagacagccggattcggaacattcctggcgagacccaagtctcgcaccgccttcatccacgcgcacgcacgcatactcttatgcagacacgacagatgacgaagaggacccatttgcgtacgaaaacatcgacaacatcgacaacaccgacaacaccgacattgcatccggggtgcaaccgctccaattgaggaccagatcgccgtgctcgtccatctactcgctgtacgaccggacagacgacatcatccctgggcagccagacgaggcagaggcacgagtcagcgaggcagagagcagacccagcgaaaccttctcgtctccggccttgtccctcagcgccagcggcactgcatcgcccgcatcctctgcgtctcctgcaacgccgccgccgcaattcaccaagcggttcggccgaagtctgagcctgcgctccgggcaatcgaagaagtcagcatcgatgaagaagctgcggaagaagtcgctgagagaggcagacgcggatggcagggatggtggtgatgcgggcgggaacaataccaataacggcaccaatgatcacatacccccgcccttgcctgattcgtggagattcgcgccaaacccgattcacccaagtaatatcagcggctcccgtcctccccccttaagcgacgccgtctcgcccgtcatctccaccgacatcccctgcgagagcttcttcgaggaggatgacctgaccaagctctccttctccatccgcggcagcctcatcttcggcggcaggcgtccgtggaagtccgccaccagccatcccaagatgcccgaccgcgaccgcgacgccatcgccgagcagcccgagcgccccgacctccccgccaacgcacgcgtcttccccctcgtcccgaccgcgcccaggaacaatggacccaggcccgtgcgaccgccgcgccaagacgatatgggcgtcgccgacatcatccagccgcccaccaacgtcaccctcaacgccaatcccaatccccccgcgggcatcgacaaggacgttaccataaaggatatcccgtccactcccacatccacgggcggcggaggcaagctgccccccagcatccgagtcatctctgccgaggccgagaaggaatctcaaaaggtgagatctctctatgcattcggggagggtcttcacccaggagacggcgaccggccctcatcttttggtgagctgctcgagccgactcccgaagtcccgtcagacgtggatgagaatgacgcgtatggtttccttaactctccaccatcccttcccttaaatcatgctgacttgcatccccctcgcgtacagggccgccgccgacgctcaacatggactccctactcaaacgtcggcttctacgtcctcgcaagcgccacccgatagctggtcgcggcgcaaccaccagctcgccggcggcatcgaggactgggaaggcgtcgacggtgaagatgtcgaccgctacggcttcatcgtgccccatcgcctgggctcgccgacggccgccaccaatgattcttcttcggtgaccttttcgccgcgcaagcgtagaaacgtcttgacgaggaaggacggcgcatcgcattctctgggcgttaagcacggccctgcgaagaaggcgtccgcccgctctctcaatacacaaacctccgaaatatcttctgtatcgcgccgctctgtccgctccaccatccgccaggctaccaataaactgccgcacaaccgcgacaggaggctagtcgatgaagccggcgatattttggcagtgcagcccggtctctctcacattcgcgaagacgagacagccgagaaggtggcactcgagctcaagcgaaaggagactgagcgctccgacaagtggcgcaagatggcccaggtcgtgaagtcgggctccgacgggcagggaactgtattcaacttcgataccaagcatcccaagctcatatcacgaacttggaaaggcatccctgactgctggcgatccgccgcctggtacgcatttctggccaccagcgccaaagccgattcggcaaccttcaagacggacgccgagctgaaacaagacttcgcacgtcttgtggacgagccatcgccggatgacacacagatcgatcttgatgtacccagaacgatcaaccagcacatcatgttccgaaggagatatcgaggcggacagcggctcttgttccgtgtgctgcattgcctgtcgctctatttccctgacacgggttatgtgcaaggcatggccccattggcggcgactctgctgtcttactacgatgaggaaatctgcttcgttatgctcgttcggctttggcagtaccgcggtctcaaccgaatctatcaatccggtttcgtagagctgatagatgctctgaacgattttgaacaacattggctgcatggtaaggatgtgtcagaaaggctcaaagagctttgcatcggacccacggcttatgccactcggtggtacctgacactcttcaacttatccataccctttcccgtgcagcttcgcgtatgggatgtcttcatgcttctgggttcatctccacctgaacgaccagagagccaagccacagatcacaaaggctcaaaagactatatttcttccgcgggactggagattctgcatgcaacgagccttgccataatcgacactttacaaccagcactcgcggatgccgactttgaaaacgcgatgaaatctttgacttcgtgggtccctatcaaggacgagcagaagtttttagaagtcgttcagatcgaatggaagaaacatcagagcagacagaagaagaaggcttaggaagcacctcaccaagctctcgcatgtcactcaatttctgactgtgactcggacatgagagttcgtcacccatgttgttcccttcccccacagtgatcacagaataaccgtcactacggacggaaacgtcggagcgtctcgctccttgaatctgtagttttctaccagacggcatcgtcctggccgcgacaatggcctttctcattgatgattattgctatgtttctctgcactataccctttacgcatcgataacggttgttgccttcttcgaagggctttgggaggacttggagtcgagcattgaatggctcgatgtggagttcattccctttgtctagaatatcgtccacaagatagccgtgagacataaacccatagtttaatgatattattgataatccattactcttatcaatcgg

SEQ ID NO: 7581 - DNA, 2436 bp, Muscodor strobelii
  misc_feature: SGI cDNA ID NO. 562294
  misc_feature: Encodes the peptide sequence at SEQ ID NO 7582
atggatttcgactctgacggcgggggcttcggcgacgacgagctgcccaagaagccccggaccctgcccgccgacctgcccaagtccctcaacgaccgcagggccgtgcaggccgagttcgtgcccgagacggagatgtacgatggatggcaagggcagtcgcagttcttgaccacgcccattgtcgcgaagcccctgcagttcagcaacctaaccctcgacgatcctgactatgaccgagatctgagccgcggcattgccgacagcgacacgcggctgatggagatgttgcaggcccaagcccagcaccacggcggccagaccttcgaagacgtcgacaccatcgcagacgacgagaaactgacagagcaggagaagaagaccatgctccagaaagtgttgaacatgtctgcaagcaacggcgatctggagcaggtcaccaagatcctgaccggcaaggccaaggcctttgtggacgtgaatgcgcaggacgaagatggcaccccaccgctggtctacgccagttgctttggacacgagagcgtcgtgcaagccctggtcgatgccggcgtggacgtagacaaacaggaccggaatcactggagcgcattgatgtgggctatgacgaatcgacacaagggcatagccaagacactgcttgataatggagcgtctgcagaggcgaagacttcatcgggtagaaccgcatttgacttcgtgcccccggacagcgagatgtcatattacttgcacgacaatggctacatcattggaagtgccggcgtaaccgacgacttctacaacccaggcctctctcaagacagattcgaagaggagatggcagagaacgagatccgtcgacgcatgatgatggacagcgcgagggatctggaggtggacattggcaatatgggcatcgatgaccaacccgagtccccggaagaattcgaagaagagcagcaagagtttgactggaatcattgtctacatgaccaaatgtttgtgtttcaagaaagtgaacttgacaggatacttgacatcatcattaccaacatgcgtccacagcggtcgccatcacagaagcctgttcctgcaaacatgatctttctgagcgcacggtatgcacactaccacgcaagtcacgacctgctggcgaaattgcttgtcacggcccaggacaagattaatgatgttgtagagcaacatcaatgggatatgacgatactagcattttggatgtcgaatgccacattgttgtcccattacttgaaaaaggatgctggcctactcgaagccactacggagtttcaggctcaactcgccgaacttatcaacgagatattcatcctcattgtcagagacgcagagcggcggatggacaaagtcctcgactcagccatgctagatcatgagactattcccggtcttgaagatgtcacatttcaacacgagtggaagctgttcaagaggaagaaggaagtcaaggccgagcccctcgataagcgcttccgtcctccgtctccgaagcagcgcgccaaacccgcacctcgaaacgtgacatcactcctctcgtcaacattatttgtcctcgatctttacgatatccattctgtcatcacatctcaaataatatcgcagctattatactggcttggtgctgaactattcaaccgaatcatgaacaatcgaaaatacctagctaggacgaaggcgatgcaaataagaatgaacgtctccgttttagaggactgggctaggtccaataatcgcaagcccgaacattacgaacatggagagacccaggcgacaggcgagacgactgtggaaatcgcgcgcagacaccttgcacccgttgtccaacttctccagtggctacagtgcttctcctctcttgatccagacgatctagaagctctggtagggactctgcagcaactcaagcgcttgagtcctcatcagcttatatatgctgcaaagaattatcggttagaagttggtgaaaaaggactccccaagagtgcattaaagtatcttgaagcagttcaaaaagaagctgctatccggagagatcgcaggagaacagcgtcgccgatgccccccagcagctcgccgtctacaccagtaaagaataattccaatggccatgacacagatgccgctagtagtgtacaaaatacacctcacgcagagatcgacgatgatgacgatttgcccgaaggcataaatttagatccttccgtcatgctgcccttctcgcttccgtcagtaacagacatgcttgtatcatacggagcaggtttcggaggtgtcaaccgagaacgggaaaggaaatatattcccactattccgcctgagtttttggagaaacttgaggttagcggaaactcaagcaggccgatgtttggagagaaagattgggaaaacgaagaagtatga

SEQ ID NO: 7582 - protein, 811 aa, Muscodor strobelii
  misc_feature: SGI Peptide ID NO. 562294
  misc_feature (166)..(198): Pfam Id: PF00023 Pfam Desc: Ankyrin repeat
  misc_feature (199)..(231): Pfam Id: PF00023 Pfam Desc: Ankyrin repeat
  misc_feature (542)..(667): Pfam Id: PF01843 Pfam Desc: DIL domain
  misc_feature (2)..(811): NCBI GI: 154303251 Blast Desc: BC1G_09374 [Botryotinia fuckeliana B05.10] gi|150854937|gb|EDN30129.1| BC1G_09374 [Botryotinia fuckeliana B05.10]
  misc_feature (1)..(811): NCBI GI: 46123231 Blast Desc: FG05993.1 [Gibberella zeae PH-1]
  misc_feature (2)..(811): NCBI GI: 156053706 Blast Desc: SS1G_05700 [Sclerotinia sclerotiorum 1980] gi|154703481|gb|EDO03220.1| SS1G_05700 [Sclerotinia sclerotiorum 1980]
  misc_feature (22)..(811): NCBI GI: 85080162 Blast Desc: NCU01817 [Neurospora crassa OR74A] gi|28881100|emb|CAD70498.1| conserved [Neurospora crassa] gi|28917561|gb|EAA27259.1| NCU01817 [Neurospora crassa OR74A]
  misc_feature (50)..(810): NCBI GI: 171689506 Blast Desc: protein product [Podospora anserina] gi|170944715|emb|CAP70826.1| protein product [Podospora anserina]
  misc_feature (11)..(808): NCBI GI: 189192134 Blast Desc: DIL and Ankyrin domain containing protein [Pyrenophora tritici-repentis Pt-1C-BFP] gi|187974012|gb|EDU41511.1| DIL and Ankyrin domain containing protein [Pyrenophora tritici-repentis
  misc_feature (9)..(810): NCBI GI: 169600683 Blast Desc: SNOG_03185 [Phaeosphaeria nodorum SN15] gi|111068796|gb|EAT89916.1| SNOG_03185 [Phaeosphaeria nodorum SN15]
  misc_feature (12)..(793): NCBI GI: 226281132 Blast Desc: DIL and Ankyrin domain-containing protein [Paracoccidioides brasiliensis Pb01]
  misc_feature (4)..(791): NCBI GI: 239607247 Blast Desc: DIL and Ankyrin domain-containing protein [Ajellomyces dermatitidis ER-3]
  misc_feature (4)..(791): NCBI GI: 261200795 Blast Desc: DIL and Ankyrin domain-containing protein [Ajellomyces dermatitidis SLH14081] gi|239593870|gb|EEQ76451.1| DIL and Ankyrin domain-containing protein [Ajellomyces dermatitidis
MDFDSDGGGFGDDELPKKPRTLPADLPKSLNDRRAVQAEFVPETEMYDGWQGQSQFLTTPIVAKPLQFSNLTLDDPDYDRDLSRGIADSDTRLMEMLQAQAQHHGGQTFEDVDTIADDEKLTEQEKKTMLQKVLNMSASNGDLEQVTKILTGKAKAFVDVNAQDEDGTPPLVYASCFGHESVVQALVDAGVDVDKQDRNHWSALMWAMTNRHKGIAKTLLDNGASAEAKTSSGRTAFDFVPPDSEMSYYLHDNGYIIGSAGVTDDFYNPGLSQDRFEEEMAENEIRRRMMMDSARDLEVDIGNMGIDDQPESPEEFEEEQQEFDWNHCLHDQMFVFQESELDRILDIIITNMRPQRSPSQKPVPANMIFLSARYAHYHASHDLLAKLLVTAQDKINDVVEQHQWDMTILAFWMSNATLLSHYLKKDAGLLEATTEFQAQLAELINEIFILIVRDAERRMDKVLDSAMLDHETIPGLEDVTFQHEWKLFKRKKEVKAEPLDKRFRPPSPKQRAKPAPRNVTSLLSSTLFVLDLYDIHSVITSQIISQLLYWLGAELFNRIMNNRKYLARTKAMQIRMNVSVLEDWARSNNRKPEHYEHGETQATGETTVEIARRHLAPVVQLLQWLQCFSSLDPDDLEALVGTLQQLKRLSPHQLIYAAKNYRLEVGEKGLPKSALKYLEAVQKEAAIRRDRRRTASPMPPSSSPSTPVKNNSNGHDTDAASSVQNTPHAEIDDDDDLPEGINLDPSVMLPFSLPSVTDMLVSYGAGFGGVNRERERKYIPTIPPEFLEKLEVSGNSSRPMFGEKDWENEEV

SEQ ID NO: 7583 - DNA, 4735 bp, Muscodor strobelii
  misc_feature: SGI EST ID NO. CUFF.18933.1
  misc_feature: Variant of the nucleotide sequence at SEQ ID NO 7581
cgccgctctagacccctcgttgaaacaccacagcccgccatacgtagctcacgtagctgacctgggcgctggagtcaacccacttacacccgcatttccagctcgaaaccaggcgttggtctaacattcaggcgcgcccctaacagtcccgcgcatacatcgttgaaagccaaagctacagcggccatctacctagagcactggggaccgcgttggccaacaaaaacagcatgccgacgtttccctcggataccattgccgctactaccttcggctcttgagcaagaatctggtctatggtgcagcagccggcacacgacgatggatttcgactctgacggcgggggcttcggcgacgacgagctgcccaagaagccccggaccctgcccgccgacctgcccaagtccctcaacgaccgcagggccgtgcaggccgagttcgtgcccgagacggagatgtacgatggatggcaagggcagtcgcagttcttgaccacgcccattgtcgcgaagcccctgcagttcagcaacctaaccctcgacgatcctgactatgaccgagatctgagccgcggcattgccgacagcgacacgcggctgatggagatgttgcaggcccaagcccagcaccacggcggccagaccttcgaagacgtcgacaccatcgcagacgacgagaaactgacagagcaggagaagaagaccatgctccagaaagtgttgaacatgtctgcaagcaacggcgatctggagcaggtcaccaagatcctgaccggcaaggccaaggcctttgtggacgtgaatgcgcaggacgaagatggcaccccaccgctggtctacgccagttgctttggacacgagagcgtcgtgcaagccctggtcgatgccggcgtggacgtagacaaacaggaccggaatcactggagcgcattgatgtgggctatgacgaatcgacacaagggcatagccaagacactgcttgataatggagcgtctgcagaggcgaagacttcatcgggtagaaccgcatttgacttcgtgcccccggacagcgagatgtcatattacttgcacgacaatggctacatcattggaagtgccggcgtaaccgacgacttctacaacccaggcctctctcaagacagattcgaagaggagatggcagagaacgagatccgtcgacgcatgatgatggacagcgcgagggatctggaggtggacattggcaatatgggcatcgatgaccaacccgagtccccggaagaattcgaagaagagcagcaagagtttgactggaatcattgtctacatgaccaaatgtttgtgtttcaagaaagtgaacttgacaggatacttgacatcatcattaccaacatgcgtccacagcggtcgccatcacagaagcctgttcctgcaaacatgatctttctgagcgcacggtatgcacactaccacgcaagtcacgacctgctggcgaaattgcttgtcacggcccaggacaagattaatgatgttgtagagcaacatcaatgggatatgacgatactagcattttggatgtcgaatgccacattgttgtcccattacttgaaaaaggatgctggcctactcgaagccactacggagtttcaggctcaactcgccgaacttatcaacgagatattcatcctcattgtcagagacgcagagcggcggatggacaaagtcctcgactcagccatgctagatcatgagactattcccggtcttgaagatgtcacatttcaacacgagtggaagctgttcaagaggaagaaggaagtcaaggccgagcccctcgataagcgcttccgtcctccgtctccgaagcagcgcgccaaacccgcacctcgaaacgtgacatcactcctctcgtcaacattatttgtcctcgatctttacgatatccattctgtcatcacatctcaaataatatcgcagctattatactggcttggtgctgaactattcaaccgaatcatgaacaatcgaaaatacctagctaggacgaaggcgatgcaaataagaatgaacgtctccgttttagaggactgggctaggtccaataatcgcaagcccgaacattacgaacatggagagacccaggcgacaggcgagacgactgtggaaatcgcgcgcagacaccttgcacccgttgtccaacttctccagtggctacagtgcttctcctctcttgatccagacgatctagaagctctggtagggactctgcagcaactcaagcgcttgagtcctcatcagcttatatatgctgcaaagaattatcggttagaagttggtgaaaaaggactccccaagagtgcattaaagtatcttgaagcagttcaaaaagaagctgctatccggagagatcgcaggagaacagcgtcgccgatgccccccagcagctcgccgtctacaccagtaaagaataattccaatggccatgacacagatgccgctagtagtgtacaaaatacacctcacgcagagatcgacgatgatgacgatttgcccgaaggcataaatttagatccttccgtcatgctgcccttctcgcttccgtcagtaacagacatgcttgtatcatacggagcaggtttcggaggtgtcaaccgagaacgggaaaggaaatatattcccactattccgcctgagtttttggagaaacttgaggttagcggaaactcaagcaggccgatgtttggagagaaagattgggaaaacgaagaagtatgagctacatcaacaaacacaacaatacactatggccaccattatcattacaatgtacaaataatgactagtctacactttcatctgtatcaatggccagttagctcgtcatcataccagtattgagaaccagcgaaatggaggcagcacgtgcgttgcctgcgttatacatatttccacgccgaagggtgctcggtccgaatgcgttcaacattcgaataggttgcaaactgggttagggaaggcataacagcgtactttgacggcattaggtatagatcaattccgctatgtcgattgtaaaaacaacttaaatcactcgagcccagatcctcgttacctggaaacgtcggacagtcgggtcacaacaatcatttttatcccgtgcgaccgaatatcgtgacattcacgtggtcacaacattatcataaagcttggcaggcttgatatgagcatccgacagtaattggtattgtagaataagtttgtcgaaactgtcaccactgacattgctaaataagtactatgagtgcccaatactacgctacaaaaaccacgtttctaaagcccgcctaaccacttgattttgtagctagactaggtgcctcaggcgttaaaatcattccgtcaagttgagctgtggcgaaacgcaacgtacttcttggtatgatctccgggcatatatgcgatgttaaacatatatgcggtgcagcgtaacgcagctgggcaaaacattgcctaaaataatatcttggaaattaaaacagagcgtgcacatcttcatgtcagacatttgcgtagactaggactgccggcgggttcgggatttgttggataaaatcccacggtgggttccggaactactcgcccgcaccttttctagattctagtgcctacgagatctgatcgattcattgaaattttgccacttttcagagcagaatattaaacactactagtattcaatgccttgacacattcattcgcctagttaccccgccgccgagaaatccggcagacaagttgcgatctttcgggcgcattcgatatcatcgtgagatgagaggttacatgactaaagatagtgtattagtgtggtagcctggtcatcgggacaattgtcgacttcaaagctcgacagtgtttcatcccgctttctagactttccccaaccccgccatcgtccttttcctgctaccttccgatcccgacttagctatcacggtagatcccttgcctgtccgtcctgtcatgaggctaataattggcggggttgtcgaaagcacttctcttctatcttagagcattaccggattaggcaagtagacagaacccttacctccgttttgcctccaattgcgttgtgaccgagacccctccggagaaacagacggagggctgcagcgctggaagaacgctatgagaggtgctagtaggggagtagaagtaggcaagaggtgggtaacgtaaagaggttatagatgcagtgttttaggttgttggttggtcaagggctattactacgtgcatgcgtcgtgactagcttagtcactgactatttgtggctttgtctacaaccacacctgtttttctacgaaacgttgcggacaggcggagaattctagacgtgcttctcggtcgttgcacgacgctgctcggtggtttcgccttgggacaccgcttcgaatgagacgaagaatgtggtgtagagaggtcgtcgaacaatccacgaatctttgcgtcgctagagaggggaagatcaattcctccacggatgagcgcagataactggacacattaccataacagaaagattggctgtgcaaatcatgaagaacagtaaaagaaaaatagtggtgttggatggggactcttcatgtacatatcgtccgtggactagtgttattggctcctgtggtctgccgaatttgtgtgcaccaggaagtcgggatccgaaatttacctgtccaaagcaaaggag

SEQ ID NO: 7584 - DNA, 2442 bp, Muscodor strobelii
  misc_feature: SGI cDNA ID NO. 562295
  misc_feature: Encodes the peptide sequence at SEQ ID NO 7585
atggatttcgactctgacggcgggggcttcggcgacgacgagctgcccaagaagccccggaccctgcccgccgacctgcccaagtccctcaacgaccgcagggccgtgcaggccgagttcgtgcccgagacggagatgtacgatggatggcaagggcagtcgcagttcttgaccacgcccattgtcgcgaagcccctgcagttcagcaacctaaccctcgacgatcctgactatgaccgagatctgagccgcggcattgccgacagcgacacgcggctgatggagatgttgcaggcccaagcccagcaccacggcggccagaccttcgaagacgtcgacaccatcgcagacgacgagaaactgacagagcaggagaagaagaccatgctccagaaagtgttgaacatgtctgcaagcaacggcgatctggagcaggtcaccaagatcctgaccggcaaggccaaggcctttgtggacgtgaatgcgcaggacgaagatggcaccccaccgctggtctacgccagttgctttggacacgagagcgtcgtgcaagccctggtcgatgccggcgtggacgtagacaaacaggaccggaatcactggagcgcattgatgtgggctatgacgaatcgacacaagggcatagccaagacactgcttgataatggagcgtctgcagaggcgaagacttcatcgggtagaaccgcatttgacttcgtgcccccggacagcgagatgtcatattacttgcacgacaatggctacatcattggaagtgccggcgtaaccgacgacttctacaacccaggcctctctcaagacagattcgaagaggagatggcagagaacgagatccgtcgacgcatgatgatggacagcgcgagggatctggaggtggacattggcaatatgggcatcgatgaccaacccgaggcaagttccccggaagaattcgaagaagagcagcaagagtttgactggaatcattgtctacatgaccaaatgtttgtgtttcaagaaagtgaacttgacaggatacttgacatcatcattaccaacatgcgtccacagcggtcgccatcacagaagcctgttcctgcaaacatgatctttctgagcgcacggtatgcacactaccacgcaagtcacgacctgctggcgaaattgcttgtcacggcccaggacaagattaatgatgttgtagagcaacatcaatgggatatgacgatactagcattttggatgtcgaatgccacattgttgtcccattacttgaaaaaggatgctggcctactcgaagccactacggagtttcaggctcaactcgccgaacttatcaacgagatattcatcctcattgtcagagacgcagagcggcggatggacaaagtcctcgactcagccatgctagatcatgagactattcccggtcttgaagatgtcacatttcaacacgagtggaagctgttcaagaggaagaaggaagtcaaggccgagcccctcgataagcgcttccgtcctccgtctccgaagcagcgcgccaaacccgcacctcgaaacgtgacatcactcctctcgtcaacattatttgtcctcgatctttacgatatccattctgtcatcacatctcaaataatatcgcagctattatactggcttggtgctgaactattcaaccgaatcatgaacaatcgaaaatacctagctaggacgaaggcgatgcaaataagaatgaacgtctccgttttagaggactgggctaggtccaataatcgcaagcccgaacattacgaacatggagagacccaggcgacaggcgagacgactgtggaaatcgcgcgcagacaccttgcacccgttgtccaacttctccagtggctacagtgcttctcctctcttgatccagacgatctagaagctctggtagggactctgcagcaactcaagcgcttgagtcctcatcagcttatatatgctgcaaagaattatcggttagaagttggtgaaaaaggactccccaagagtgcattaaagtatcttgaagcagttcaaaaagaagctgctatccggagagatcgcaggagaacagcgtcgccgatgccccccagcagctcgccgtctacaccagtaaagaataattccaatggccatgacacagatgccgctagtagtgtacaaaatacacctcacgcagagatcgacgatgatgacgatttgcccgaaggcataaatttagatccttccgtcatgctgcccttctcgcttccgtcagtaacagacatgcttgtatcatacggagcaggtttcggaggtgtcaaccgagaacgggaaaggaaatatattcccactattccgcctgagtttttggagaaacttgaggttagcggaaactcaagcaggccgatgtttggagagaaagattgggaaaacgaagaagtatga

SEQ ID NO: 7585 - protein, 813 aa, Muscodor strobelii
  misc_feature: SGI Peptide ID NO. 562295
  misc_feature (166)..(198): Pfam Id: PF00023 Pfam Desc: Ankyrin repeat
  misc_feature (199)..(231): Pfam Id: PF00023 Pfam Desc: Ankyrin repeat
  misc_feature (544)..(669): Pfam Id: PF01843 Pfam Desc: DIL domain
  misc_feature (2)..(813): NCBI GI: 154303251 Blast Desc: BC1G_09374 [Botryotinia fuckeliana B05.10] gi|150854937|gb|EDN30129.1| BC1G_09374 [Botryotinia fuckeliana B05.10]
  misc_feature (1)..(813): NCBI GI: 46123231 Blast Desc: FG05993.1 [Gibberella zeae PH-1]
  misc_feature (2)..(813): NCBI GI: 156053706 Blast Desc: SS1G_05700 [Sclerotinia sclerotiorum 1980] gi|154703481|gb|EDO03220.1| SS1G_05700 [Sclerotinia sclerotiorum 1980]
  misc_feature (22)..(813): NCBI GI: 85080162 Blast Desc: NCU01817 [Neurospora crassa OR74A] gi|28881100|emb|CAD70498.1| conserved [Neurospora crassa] gi|28917561|gb|EAA27259.1| NCU01817 [Neurospora crassa OR74A]
  misc_feature (50)..(812): NCBI GI: 171689506 Blast Desc: protein product [Podospora anserina] gi|170944715|emb|CAP70826.1| protein product [Podospora anserina]
  misc_feature (11)..(810): NCBI GI: 189192134 Blast Desc: DIL and Ankyrin domain containing protein [Pyrenophora tritici-repentis Pt-1C-BFP] gi|187974012|gb|EDU41511.1| DIL and Ankyrin domain containing protein [Pyrenophora tritici-repentis
  misc_feature (9)..(812): NCBI GI: 169600683 Blast Desc: SNOG_03185 [Phaeosphaeria nodorum SN15] gi|111068796|gb|EAT89916.1| SNOG_03185 [Phaeosphaeria nodorum SN15]
  misc_feature (12)..(795): NCBI GI: 226281132 Blast Desc: DIL and Ankyrin domain-containing protein [Paracoccidioides brasiliensis Pb01]
  misc_feature (4)..(793): NCBI GI: 239607247 Blast Desc: DIL and Ankyrin domain-containing protein [Ajellomyces dermatitidis ER-3]
  misc_feature (4)..(793): NCBI GI: 261200795 Blast Desc: DIL and Ankyrin domain-containing protein [Ajellomyces dermatitidis SLH14081] gi|239593870|gb|EEQ76451.1| DIL and Ankyrin domain-containing protein [Ajellomyces dermatitidis
MDFDSDGGGFGDDELPKKPRTLPADLPKSLNDRRAVQAEFVPETEMYDGWQGQSQFLTTPIVAKPLQFSNLTLDDPDYDRDLSRGIADSDTRLMEMLQAQAQHHGGQTFEDVDTIADDEKLTEQEKKTMLQKVLNMSASNGDLEQVTKILTGKAKAFVDVNAQDEDGTPPLVYASCFGHESVVQALVDAGVDVDKQDRNHWSALMWAMTNRHKGIAKTLLDNGASAEAKTSSGRTAFDFVPPDSEMSYYLHDNGYIIGSAGVTDDFYNPGLSQDRFEEEMAENEIRRRMMMDSARDLEVDIGNMGIDDQPEASSPEEFEEEQQEFDWNHCLHDQMFVFQESELDRILDIIITNMRPQRSPSQKPVPANMIFLSARYAHYHASHDLLAKLLVTAQDKINDVVEQHQWDMTILAFWMSNATLLSHYLKKDAGLLEATTEFQAQLAELINEIFILIVRDAERRMDKVLDSAMLDHETIPGLEDVTFQHEWKLFKRKKEVKAEPLDKRFRPPSPKQRAKPAPRNVTSLLSSTLFVLDLYDIHSVITSQIISQLLYWLGAELFNRIMNNRKYLARTKAMQIRMNVSVLEDWARSNNRKPEHYEHGETQATGETTVEIARRHLAPVVQLLQWLQCFSSLDPDDLEALVGTLQQLKRLSPHQLIYAAKNYRLEVGEKGLPKSALKYLEAVQKEAAIRRDRRRTASPMPPSSSPSTPVKNNSNGHDTDAASSVQNTPHAEIDDDDDLPEGINLDPSVMLPFSLPSVTDMLVSYGAGFGGVNRERERKYIPTIPPEFLEKLEVSGNSSRPMFGEKDWENEEV

SEQ ID NO: 7586 - DNA, 4735 bp, Muscodor strobelii; identical to SEQ ID NO: 7583
  misc_feature: SGI EST ID NO. CUFF.18933.1
  misc_feature: Variant of the nucleotide sequence at SEQ ID NO 7584

SEQ ID NO: 7587 - DNA, 1065 bp, Muscodor strobelii
  misc_feature: SGI cDNA ID NO. 562296
  misc_feature: Reduced expression when VOC is produced
  misc_feature: Encodes the peptide sequence at SEQ ID NO 7588
atggaggatcttggttatcagttggagcctgttcaggcatcctcggttgccactaaggacattgatggggtgttcagatctagctgcattgacctgatttccggtacactgggtggtaagatcttgggcttctccgacgaagctttcgccgccgccgccaacctattgacaccaacacctcccattagccagccggggaaattcgtagaatctggcgcatggtacgatggctgggaaacgcggagacataactcagcgcccttcgactgggtcgtcattcgattgggcgtagcctcgggtactgtggaaggtgtcgaagtcgacacagccttcttctccgggaaccatgctcctttcatatccgtcgagggctgcttcagttcaaacgatgatgaggtgcttgcgtggagaggggagaagggcgggtgggaacccatattgggcatccaggagtgcgggccgtctcagcgattcgggtggaagctagagaaacctgcgtcaacacagtatactcacgttcgcctcaacatgtatcctgatggtggcattgctcggttccgactgtttgggcacgccgtgcccgtctttccccaggaccaagaggcaatcttcgatttagcggcagcgcagaatggcggagtagctatctcgtgcagtgatcaacatttcggaaccaaggacaatttgatcctcccagggcgaggcaaagatatgggcgatggttgggaaacgaagcgatcgagaggcaaaggacatgtggactggactatcatacgtcttggaactccggcgctcatccagagcttcgtcgttgacacggccttcttcagacacaatttccctcaagcagcgaggctagatggcatcgaatggaaagaatcaggcgagccaggcgcagatgcacccggatggaccgagttactggccgcaagcaagtgtggacctgaccacgagcaccctttcgattgcttgatcaaggacaagcctttcacacacgtcaaactgactatcatcccggacggaggtgtcaagcggctccgtgttttggccaagagagcagtgtga

SEQ ID NO: 7588 - protein, 354 aa, Muscodor strobelii
  misc_feature: SGI Peptide ID NO. 562296
  misc_feature (38)..(190): Pfam Id: PF03561 Pfam Desc: Allantoicase repeat
  misc_feature (212)..(350): Pfam Id: PF03561 Pfam Desc: Allantoicase repeat
  misc_feature (1)..(354): NCBI GI: 85080159 Blast Desc: allantoicase [Neurospora crassa OR74A] gi|30581020|sp|P18407.2|ALLC_NEUCR RecName: Full=Allantoicase gi|28881101|emb|CAD70499.1| allantoicase [Neurospora crassa]
  misc_feature (1)..(354): NCBI GI: 168749 Blast Desc: allantoicase [Neurospora crassa]
  misc_feature (2)..(354): NCBI GI: 171689504 Blast Desc: protein product [Podospora anserina] gi|170944714|emb|CAP70825.1| protein product [Podospora anserina]
  misc_feature (1)..(354): NCBI GI: 116199487 Blast Desc: allantoicase [Chaetomium globosum CBS 148.51] gi|88179178|gb|EAQ86646.1| allantoicase [Chaetomium globosum CBS 148.51]
  misc_feature (6)..(354): NCBI GI: 154303253 Blast Desc: allantoicase [Botryotinia fuckeliana B05.10] gi|150854938|gb|EDN30130.1| allantoicase [Botryotinia fuckeliana B05.10]
  misc_feature (2)..(354): NCBI GI: 145606042 Blast Desc: MGG_11871 [Magnaporthe grisea 70-15] gi|145013780|gb|EDJ98421.1| MGG_11871 [Magnaporthe grisea 70-15]
  misc_feature (6)..(354): NCBI GI: 156053704 Blast Desc: allantoicase [Sclerotinia sclerotiorum 1980] gi|154703480|gb|EDO03219.1| allantoicase [Sclerotinia sclerotiorum 1980]
  misc_feature (2)..(353): NCBI GI: 256732543 Blast Desc: [Nectria haematococca mpVI 77-13-4]
  misc_feature (2)..(343): NCBI GI: 46123231 Blast Desc: FG05993.1 [Gibberella zeae PH-1]
  misc_feature (13)..(352): NCBI GI: 169600685 Blast Desc: SNOG_03186 [Phaeosphaeria nodorum SN15] gi|111068797|gb|EAT89917.1| SNOG_03186 [Phaeosphaeria nodorum SN15]
  misc_feature (1)..(354): SWISSPROT Homolog: EC 3.5.3.4 Allantoicase
  misc_feature: Useful for introducing or modulating the production of volatile compounds
MEDLGYQLEPVQASSVATKDIDGVFRSSCIDLISGTLGGKILGFSDEAFAAAANLLTPTPPISQPGKFVESGAWYDGWETRRHNSAPFDWVVIRLGVASGTVEGVEVDTAFFSGNHAPFISVEGCFSSNDDEVLAWRGEKGGWEPILGIQECGPSQRFGWKLEKPASTQYTHVRLNMYPDGGIARFRLFGHAVPVFPQDQEAIFDLAAAQNGGVAISCSDQHFGTKDNLILPGRGKDMGDGWETKRSRGKGHVDWTIIRLGTPALIQSFVVDTAFFRHNFPQAARLDGIEWKESGEPGADAPGWTELLAASKCGPDHEHPFDCLIKDKPFTHVKLTIIPDGGVKRLRVLAKRAV

SEQ ID NO: 7589 - DNA, 1828 bp, Muscodor strobelii
  misc_feature: SGI EST ID NO. CUFF.18899.1
  misc_feature: Variant of the nucleotide sequence at SEQ ID NO 7587
caggccacaacatgtatcatctcactcggtcagcatgagaaggaggcatcaagcgagctgaaagggaagacatcagtcagccagcacttatttttaacatcccctgtcttgaagatacatgcatgtatgccattctcatgtgtagagcgcttattggccgaattgagagctagaacgatgcatcaattagacaccttacttgcctcgaacactggttagcatttcataacgcgatcttgtttattatgttgtcaatcagagcatcattttataagttgggagaatggaattaacaactcgcaagccctcgggcaaggccgtcttccggctggcggggttgtcatgtcttccagggccgatatcgaaacctacctactccgatgggcggcgtaattgtgttggaagatggtgatacgagatcatcgaacttgcacaagaagtgcaactagtcctcagtattcactctccatctcgagaccgcatcacacgcaccgcaaatcaccgagctgaatacgatggaggatcttggttatcagttggagcctgttcaggcatcctcggttgccactaaggacattgatggggtgttcagatctagctgcattgacctgatttccggtacactgggtggtaagatcttgggcttctccgacgaagctttcgccgccgccgccaacctattgacaccaacacctcccattagccagccggggaaattcgtagaatctggcgcatggtacgatggctgggaaacgcggagacataactcagcgcccttcgactgggtcgtcattcgattgggcgtagcctcgggtactgtggaaggtgtcgaagtcgacacagccttcttctccgggaaccatgctcctttcatatccgtcgagggctgcttcagttcaaacgatgatgaggtgcttgcgtggagaggggagaagggcgggtgggaacccatattgggcatccaggagtgcgggccgtctcagcgattcgggtggaagctagagaaacctgcgtcaacacagtatactcacgttcgcctcaacatgtatcctgatggtggcattgctcggttccgactgtttgggcacgccgtgcccgtctttccccaggaccaagaggcaatcttcgatttagcggcagcgcagaatggcggagtagctatctcgtgcagtgatcaacatttcggaaccaaggacaatttgatcctcccagggcgaggcaaagatatgggcgatggttgggaaacgaagcgatcgagaggcaaaggacatgtggactggactatcatacgtcttggaactccggcgctcatccagagcttcgtcgttgacacggccttcttcagacacaatttccctcaagcagcgaggctagatggcatcgaatggaaagaatcaggcgagccaggcgcagatgcacccggatggaccgagttactggccgcaagcaagtgtggacctgaccacgagcaccctttcgattgcttgatcaaggacaagcctttcacacacgtcaaactgactatcatcccggacggaggtgtcaagcggctccgtgttttggccaagagagcagtgtgaagaggggtttttgtttgtatgctaaaaggaattttgtatctgcaacatgcaaccgaagagacctgggacgtcttcttgactctcaggatttctatcaaacatcaacgctattgacaaagggcgactctgtattacacgcatcgtgagaaagacttagcacaatcatcgttggctgttggctgctaatcatgacatgaattgatcaaagaaaatagtatttgatactaggagttattattacatatacc

SEQ ID NO: 7590 - DNA, 738 bp, Muscodor strobelii
  misc_feature: SGI cDNA ID NO. 562297
  misc_feature: Encodes the peptide sequence at SEQ ID NO 7591
atggcttccgcgacgggaataccccaacataccccgattgatccgcataccgacggacaagacgatatggaaccgctcttgggacggccgggagatgcatcgcaaagcagcaatgcttcgatcttcaaaaacctcgtgctcggcactggtgtactagcagaagctgcagccattctgctgcttgcttccgtatgggcctccgtttttttacagcctttgatcctattctctgtacacccactcgctcaatcattgggagtgcttgtgctccttcagtctatcttagtgctgcaaccgacacacaccggggctcagaagcaggtcggccagaaaatccatgccggtctcaaccttctagcattcgccacatttgtggttggcgtggtggttattgaatacaacaaattcgcgaacaacggagcacactttcactctgtccatggatacctgggagtcatcacctctatttggattctagtccagtacatcgttggttttaccatgtttggtataccatctttatatggcggcgaggccaatgccaagaagatttggaagtaccatcgcattagtggctacgtccttttgcttctcttgatggccacagtcacaagtgctgtcaaaaccgactacaacgtgaatgttctaggtctaaagctatgggcaatgcttgtcatcttcgctcttatgattgtcggcgtatacccgcgtatcaagaagcaaaagctcgggttttaa

SEQ ID NO: 7591 - protein, 245 aa, Muscodor strobelii
  misc_feature: SGI Peptide ID NO. 562297
  misc_feature (1)..(245): NCBI GI: 46123229 Blast Desc: FG05992.1 [Gibberella zeae PH-1]
  misc_feature (1)..(245): NCBI GI: 154303255 Blast Desc: BC1G_09376 [Botryotinia fuckeliana B05.10] gi|150854939|gb|EDN30131.1| BC1G_09376 [Botryotinia fuckeliana B05.10]
  misc_feature (1)..(245): NCBI GI: 154303257 Blast Desc: BC1G_09377 [Botryotinia fuckeliana B05.10] gi|150854940|gb|EDN30132.1| BC1G_09377 [Botryotinia fuckeliana B05.10]
  misc_feature (1)..(245): NCBI GI: 156053702 Blast Desc: SS1G_05698 [Sclerotinia sclerotiorum 1980] gi|154703479|gb|EDO03218.1| SS1G_05698 [Sclerotinia sclerotiorum 1980]
  misc_feature (7)..(245): NCBI GI: 261354461 Blast Desc: conserved [Verticillium albo-atrum VaMs.102]
  misc_feature (1)..(243): NCBI GI: 119186763 Blast Desc: CIMG_03429 [Coccidioides immitis RS]
  misc_feature (22)..(245): NCBI GI: 116199485 Blast Desc: CHGG_07898 [Chaetomium globosum CBS 148.51] gi|88179177|gb|EAQ86645.1| CHGG_07898 [Chaetomium globosum CBS 148.51]
  misc_feature (1)..(243): NCBI GI: 225560359 Blast Desc: conserved [Ajellomyces capsulatus G186AR]
  misc_feature (1)..(243): NCBI GI: 239607277 Blast Desc: cytochrome b561 [Ajellomyces dermatitidis ER-3]
  misc_feature (1)..(244): NCBI GI: 85080155 Blast Desc: NCU01815 [Neurospora crassa OR74A] gi|28881102|emb|CAD70500.1| related to CYTOCHROME B561 [Neurospora crassa] gi|28917559|gb|EAA27257.1| [Neurospora crassa
MASATGIPQHTPIDPHTDGQDDMEPLLGRPGDASQSSNASIFKNLVLGTGVLAEAAAILLLASVWASVFLQPLILFSVHPLAQSLGVLVLLQSILVLQPTHTGAQKQVGQKIHAGLNLLAFATFVVGVVVIEYNKFANNGAHFHSVHGYLGVITSIWILVQYIVGFTMFGIPSLYGGEANAKKIWKYHRISGYVLLLLLMATVTSAVKTDYNVNVLGLKLWAMLVIFALMIVGVYPRIKKQKLGF

SEQ ID NO: 7592 - DNA, 1359 bp, Muscodor strobelii
  misc_feature: SGI EST ID NO. CUFF.18877.0
  misc_feature: Variant of the nucleotide sequence at SEQ ID NO 7590
cgcatgtcaccccgcagttcttttcccaattgcgccttctgaggggcttattatgaattccgtcgtcctgataggcagacagatgctcttccccaaaaacaccatttcatcttcgtcatcgaccgcgactgcgtgagacaccgtttatgagcaagtacacgccatcgcccgccgaagctcacctagtgcatagtctatctaactctcttgctcgtccattgcacaataaccacggttatcttcaacaattgtgaagtgcgtatctgcgctcttgttatatatcccggtgtaagacacagctttgctttttcgctacaatggcttccgcgacgggaataccccaacataccccgattgatccgcataccgacggacaagacgatatggaaccgctcttgggacggccgggagatgcatcgcaaagcagcaatgcttcgatcttcaaaaacctcgtgctcggcactggtgtactagcagaagctgcagccattctgctgcttgcttccgtatgggcctccgtttttttacagcctttgatcctattctctgtacacccactcgctcaatcattgggagtgcttgtgctccttcagtctatcttagtgctgcaaccgacacacaccggggctcagaagcaggtcggccagaaaatccatgccggtctcaaccttctagcattcgccacatttgtggttggcgtggtggttattgaatacaacaaattcgcgaacaacggagcacactttcactctgtccatggatacctgggagtcatcacctctatttggattctagtccagtacatcgttggttttaccatgtttggtataccatctttatatggcggcgaggccaatgccaagaagatttggaagtaccatcgcattagtggctacgtccttttgcttctcttgatggccacagtcacaagtgctgtcaaaaccgactacaacgtgaatgttctaggtctaaagctatgggcaatgcttgtcatcttcgctcttatgattgtcggcgtatacccgcgtatcaagaagcaaaagctcgggttttaataataaagtacacatcacattacagagtggaaatcaaggcgcaaagggaagataattggggcgacgacagaaacaattcggcgatgttaggaactagggtgtttaggatcgtggtagaggcgatcaacttaagtcgatcatggtttcagtgtgaacattactcctagtgctctttttaggcgtgattatatatgatagcaggcgtcggcggtcgctctttttcggattcaatgacgaaacattgcaactgaaagtaaccttccaaatgtatttgtattttgaaagtgactgatcgaacattcgg

SEQ ID NO: 7593 - DNA, 2394 bp, Muscodor strobelii
  misc_feature: SGI cDNA ID NO. 562298
  misc_feature: Encodes the peptide sequence at SEQ ID NO 7594
atggccgaggaaacgcaggcgggacgggcaacggctcagggtcaggatgagagaatgccactcctccgcaacggaggcgatggcaatgatgattctgggagagacgcgcccgctgaagaggaggacttcgtccaagtccaaaatcaagtcaaatcctggcgtcgtcgtcgctggatatcgctaattgccagtgctcttctcattgtcgcttttgtggtcatccttatactctctggagtattctcacggaagaaaaaggatcccgcgatgaattcatctctgtgtaccacgcctacgtgtatccacgctgcctcagagattctgtacaatctttcaccggattaccagacgcttgatccatgcacgaacttcgatacgctcgtttgcgatggattcaagtcccgtttcgacatacctgaggaccgctcatcctactcgaccgcttccattatgtccgacaacggtcatttgacactgaaacatattctggaatcgccatacccgaaagactcccaacactctacgttttcgcctttaaacttagatagactcgtcgcatcaaccgacgaagacaactttcgcgcgatgcaagatgcctacaattcctgtatgaatgaaacatctctccgcaagattggtgtggcgccgctcgtagagctggtgaataaggttgccgagatcttccccgtgagtgagaatgcctatagcgacgacgaaactctccagccggatgagtatgatacactaagcaatacgatcattcttcttgaacgactttctgtaacctcgtttgagggcctggctgcaggcgctgacgacaaagaccccgatactgtgattgttcaagctttccctgcgggtttgactttaccatcgcctgagtattatcaagaaaacgacacagtcaagcaatatcaggcaacgcttgaagcggtctttggatcattcttaccaactactgcatccaagaaatctgccaccaagcttgcgcaggcagttattgagctggaaaagaagattgcgagcgtaacgcccccacaagaagaccagcaagatgtgacaaaatactataatattgcaaaggttgctgatgctggcaagattggacctgctttgcgaatcgataaggtgatagaagctcttgtgccttcggattacaaagcagagacgatgctcttaacttttcctgatttcttgagtaatgtctccacgattgtctcacagacgccaaagtcaaccctgcagagctatatgatttggcagctaatcaactcctattcgtcttacgtggagggccccgaggttgagcccataaatcagtttaacaaccttctagcaggcaaagatccctcaactaaggcagaacgttggaagacttgccttaattacatcgattcaacagtaccttggattctcagtcgattcttcatcgaagccgccttctcggaagacgcaaagaagtacggcgatcaaattataatggacattaagcagcagttcatctctggcctaaccggactgtcgtggatggatgactcggtgaaaaagttggcagcgaacaaagtcaacaatattattcaaaagattggttatccaactaagtcgcccgatatcatgaatccggaagcactgcaatcctactacagtggcttaacaattacagattctttcttcaataactccctctcgagcaacaaactctcaagcaataagacatgggatgcccttggaaagccagtagatcgtgctgaatggggtatgtcggcggacatcgtaaatgcttattacaatcctagcggcaatgaaattgtcttcccagcaggaataatgcaatttccagtcttctcggttgaactcccaagctacgtatcttatggcgccttcgcatcagtagctggacatgagctgtcacatgcctttgatagctccggtcgtcactacgacgagaatggaaactacacagattggtgggaccagaagacggtggaggggttcgaagaacgcgccaaatgcttcgttagccaatacggaaacttcaccgttgagggcaagaatggcgaaccactccacgttaacggtaggctaacactgggtgaaaacatcgcggacgcaggtggtgtctctgctgcctttgcgtcatggcagaaacaccgagcggcgaccccagaccagagtcttccaggactggaacacttcacacacgaacagctctttttcgtcttctatgccaattggtggtgcggaaaggttcgaaaagagcaagcaattagttacatttatacggacccccactcacccgcgttcgcgcgaatcctggggactacggcaaactccagggcattccgggagagctttgattgtcctgttaaggagccaacctgtgagctctggtga

SEQ ID NO: 7594 - protein, 797 aa, Muscodor strobelii
  misc_feature: SGI Peptide ID NO. 562298
  misc_feature (593)..(796): Pfam Id: PF01431 Pfam Desc: Peptidase family M13
  misc_feature (121)..(532): Pfam Id: PF05649 Pfam Desc: Peptidase family M13
  misc_feature (593)..(788): Pfam Id: PF01431 Pfam Desc: Peptidase family M13
  misc_feature (194)..(532): Pfam Id: PF05649 Pfam Desc: Peptidase family M13
  misc_feature (121)..(164): Pfam Id: PF05649 Pfam Desc: Peptidase family M13
  misc_feature (47)..(797): NCBI GI: 171677690 Blast Desc: protein product [Podospora anserina] gi|170936913|emb|CAP61572.1| protein product [Podospora anserina]
  misc_feature (17)..(797): NCBI GI: 156053700 Blast Desc: SS1G_05697 [Sclerotinia sclerotiorum 1980] gi|154703478|gb|EDO03217.1| SS1G_05697 [Sclerotinia sclerotiorum 1980]
  misc_feature (92)..(797): NCBI GI: 189190306 Blast Desc: endothelin-converting enzyme 1 [Pyrenophora tritici-repentis Pt-1C-BFP] gi|187973098|gb|EDU40597.1| endothelin-converting enzyme 1 [Pyrenophora tritici-repentis
  misc_feature (55)..(797): NCBI GI: 261357888 Blast Desc: endothelin-converting enzyme [Verticillium albo-atrum VaMs.102]
  misc_feature (6)..(797): NCBI GI: 39977517 Blast Desc: MGG_06643 [Magnaporthe grisea 70-15] gi|145013844|gb|EDJ98485.1| MGG_06643 [Magnaporthe grisea 70-15]
  misc_feature (57)..(797): NCBI GI: 212526054 Blast Desc: endothelin-converting enzyme [Penicillium marneffei ATCC 18224] gi|210072582|gb|EEA26669.1| endothelin-converting enzyme [Penicillium marneffei ATCC 18224]
  misc_feature (62)..(797): NCBI GI: 242779910 Blast Desc: endothelin-converting enzyme [Talaromyces stipitatus ATCC 10500] gi|218719632|gb|EED19051.1| endothelin-converting enzyme [Talaromyces stipitatus ATCC 10500]
  misc_feature (94)..(797): NCBI GI: 119491265 Blast Desc: peptidase family M13 protein [Neosartorya fischeri NRRL 181] gi|119411381|gb|EAW21324.1| peptidase family M13 protein [Neosartorya fischeri NRRL 181]
  misc_feature (9)..(760): NCBI GI: 154303259 Blast Desc: BC1G_09378 [Botryotinia fuckeliana B05.10] gi|150854941|gb|EDN30133.1| BC1G_09378 [Botryotinia fuckeliana B05.10]
  misc_feature (38)..(797): NCBI GI: 121705948 Blast Desc: peptidase family M13 protein [Aspergillus clavatus NRRL 1] gi|119399383|gb|EAW09811.1| peptidase family M13 protein [Aspergillus clavatus NRRL 1]
  misc_feature (93)..(797): SWISSPROT Homolog: EC 3.4.24.71 Endothelin-converting enzyme 1
MAEETQAGRATAQGQDERMPLLRNGGDGNDDSGRDAPAEEEDFVQVQNQVKSWRRRRWISLIASALLIVAFVVILILSGVFSRKKKDPAMNSSLCTTPTCIHAASEILYNLSPDYQTLDPCTNFDTLVCDGFKSRFDIPEDRSSYSTASIMSDNGHLTLKHILESPYPKDSQHSTFSPLNLDRLVASTDEDNFRAMQDAYNSCMNETSLRKIGVAPLVELVNKVAEIFPVSENAYSDDETLQPDEYDTLSNTIILLERLSVTSFEGLAAGADDKDPDTVIVQAFPAGLTLPSPEYYQENDTVKQYQATLEAVFGSFLPTTASKKSATKLAQAVIELEKKIASVTPPQEDQQDVTKYYNIAKVADAGKIGPALRIDKVIEALVPSDYKAETMLLTFPDFLSNVSTIVSQTPKSTLQSYMIWQLINSYSSYVEGPEVEPINQFNNLLAGKDPSTKAERWKTCLNYIDSTVPWILSRFFIEAAFSEDAKKYGDQIIMDIKQQFISGLTGLSWMDDSVKKLAANKVNNIIQKIGYPTKSPDIMNPEALQSYYSGLTITDSFFNNSLSSNKLSSNKTWDALGKPVDRAEWGMSADIVNAYYNPSGNEIVFPAGIMQFPVFSVELPSYVSYGAFASVAGHELSHAFDSSGRHYDENGNYTDWWDQKTVEGFEERAKCFVSQYGNFTVEGKNGEPLHVNGRLTLGENIADAGGVSAAFASWQKHRAATPDQSLPGLEHFTHEQLFFVFYANWWCGKVRKEQAISYIYTDPHSPAFARILGTTANSRAFRESFDCPVKEPTCELW

SEQ ID NO: 7595 - DNA, 3031 bp, Muscodor strobelii
  misc_feature: SGI EST ID NO. CUFF.18880.0
  misc_feature: Variant of the nucleotide sequence at SEQ ID NO 7593
caaggatgtagagcttgagcttggacctggagtcatctgacacgcattgagccgtgactctcaatctcaacctctctccgtagctgtcaatatcgaaacaatctattcacatagcaaacttgaatatctacgtcagagaagccttggcgtttctctaccaggacttcgccccgcgagagcgtcagcagcgagcttggaaggttcgatctccgttgcgtacacgaaccaccaataatacttcatatggccgaggaaacgcaggcgggacgggcaacggctcagggtcaggatgagagaatgccactcctccgcaacggaggcgatggcaatgatgattctgggagagacgcgcccgctgaagaggaggacttcgtccaagtccaaaatcaagtcaaatcctggcgtcgtcgtcgctggatatcgctaattgccagtgctcttctcattgtcgcttttgtggtcatccttatactctctggagtattctcacggaagaaaaaggatcccgcgatgaattcatctctgtgtaccacgcctacgtgtatccacgctgcctcagagattctgtacaatctttcaccggattaccagacgcttgatccatgcacgaacttcgatacgctcgtttgcgatggattcaagtcccgtttcgacatacctgaggaccgctcatcctactcgaccgcttccattatgtccgacaacggtcatttgacactgaaacatattctggaatcgccatacccgaaagactcccaacactctacgttttcgcctttaaacttagatagactcgtcgcatcaaccgacgaagacaactttcgcgcgatgcaagatgcctacaattcctgtatgaatgaaacatctctccgcaagattggtgtggcgccgctcgtagagctggtgaataaggttgccgagatcttccccgtgagtgagaatgcctatagcgacgacgaaactctccagccggatgagtatgatacactaagcaatacgatcattcttcttgaacgactttctgtaacctcgtttgagggcctggctgcaggcgctgacgacaaagaccccgatactgtgattgttcaagctttccctgcgggtttgactttaccatcgcctgagtattatcaagaaaacgacacagtcaagcaatatcaggcaacgcttgaagcggtctttggatcattcttaccaactactgcatccaagaaatctgccaccaagcttgcgcaggcagttattgagctggaaaagaagattgcgagcgtaacgcccccacaagaagaccagcaagatgtgacaaaatactataatattgcaaaggttgctgatgctggcaagattggacctgctttgcgaatcgataaggtgatagaagctcttgtgccttcggattacaaagcagagacgatgctcttaacttttcctgatttcttgagtaatgtctccacgattgtctcacagacgccaaagtcaaccctgcagagctatatgatttggcagctaatcaactcctattcgtcttacgtggagggccccgaggttgagcccataaatcagtttaacaaccttctagcaggcaaagatccctcaactaaggcagaacgttggaagacttgccttaattacatcgattcaacagtaccttggattctcagtcgattcttcatcgaagccgccttctcggaagacgcaaagaagtacggcgatcaaattataatggacattaagcagcagttcatctctggcctaaccggactgtcgtggatggatgactcggtgaaaaagttggcagcgaacaaagtcaacaatattattcaaaagattggttatccaactaagtcgcccgatatcatgaatccggaagcactgcaatcctactacagtggcttaacaattacagattctttcttcaataactccctctcgagcaacaaactctcaagcaataagacatgggatgcccttggaaagccagtagatcgtgctgaatggggtatgtcggcggacatcgtaaatgcttattacaatcctagcggcaatgaaattgtcttcccagcaggaataatgcaatttccagtcttctcggttgaactcccaagctacgtatcttatggcgccttcgcatcagtagctggacatgagctgtcacatgcctttgatagctccggtcgtcactacgacgagaatggaaactacacagattggtgggaccagaagacggtggaggggttcgaagaacgcgccaaatgcttcgttagccaatacggaaacttcaccgttgagggcaagaatggcgaaccactccacgttaacggtaggctaacactgggtgaaaacatcgcggacgcaggtggtgtctctgctgcctttgcgtcatggcagaaacaccgagcggcgaccccagaccagagtcttccaggactggaacacttcacacacgaacagctctttttcgtcttctatgccaattggtggtgcggaaaggttcgaaaagagcaagcaattagttacatttatacggacccccactcacccgcgttcgcgcgaatcctggggactacggcaaactccagggcattccgggagagctttgattgtcctgttaaggagccaacctgtgagctctggtgagaaattcaggtagagctgcatgtttttgattctgtagattgtaaacatggactagggaccttggacttgtattattagcatggtggcatagtaacatagtaacaaaagcatttacttggaaatcaacgttggagtgtatctcgtcctatctacctcctccaccttagtcctctatattaactgaacatgtccatagcaacctcaccagtctcgatcaacatctcaattccaaagtccggacctgatcttaacgctagcacacaagagccagacaaaagtccctacatgtgactctataggcgttcaagcaacagatcagggttcgacgccgagaataacttctcgccatcctcaacattgatgacaggagtcttgcctagtatctgaccctccc

SEQ ID NO: 7596 - DNA, 1479 bp, Muscodor strobelii
  misc_feature: SGI cDNA ID NO. 562299
  misc_feature: Encodes the peptide sequence at SEQ ID NO 7597
atgaatgctctatccggctggatttgccacgggctttttatattcaccctcgtccacgaagccacagcagatgcccctcttgtatttgatgctgaaggttataacaatgggagttatggagctgatccccatcaactctaccactctacggacctggtctctcctctacttcaaatcaacacatgggagccaaacaagactgacaacgcatctttcatctttttgaccatctccgatcctactcgtaaagacggccactctgggccagtcatttatcgagccaaagatctcagcctagtgtacagccagcctcaatggaactatgtaacaaacgcacaagtcgggtacttcaatgacagtgactatctcatcttccttgagcagaccagcgtgaacggcaagccgtcaacaaactgtcttctgtatgactcttcgtacgagttggcatacaacgtatcctcgcatagtcccgatggttcattcttcggcgtgcatgagtgttttctcacggcacatggctccgccaccattgtacttaccgagactatccctttcgacctgtctagagttggcggagatcacgacggaaagatactggacaatattatccaggaaattgatattcagacaggcgaactgttgtttgaatggcgagcgtctaaatttttcgacatcatggagacgttccaagagcttcagcacggattcaaagggtctttcgactatatgcacatgaatagtgtggagaagactggcggaggcgacttcttggtttcgtgtcgtcatctccatagtatcaccttagtgaacgggtcaacaggtgacattgtatggactctgggtggcaaaaagaaccaattcaaagatatttcagacggtcacgcgaccgacttccactggcaacaccacgcgcgcttcacaaactccgaaatgacgcgtctaagtatgttcgacaatcataacatcacgaccacagtcggatgcacagttaactgctcacgagctcgacacgttgagctagactacgagcacatgacggcaagcctcgtacaggaattctaccaccctgagagcctcgttagtgggtttgaaggtagctactattcgctacccggcggtaatgtccttgttggctggggtgccaatccaactttcactgagcacacgccggaaggagaatgtgtcatggacgttcaggttgatatgtggcgagtagaacacgggtatccgatcaactatagggctttcaaaatgggatggaaagctttcccaaagtgggacccaagcatagcagccgtggaaagtgcatcggacggtatatattcagtatacttgagctggaacggagctaccgaagtcgtatcttggcaactgcttcacggcgaagtagccgacaacgtcactctgccaatcgtcaaagttcctcgtataggctttgagaccgagatgaagcatatcaaattggagaacccatggtaa

SEQ ID NO: 7597 - protein, 492 aa, Muscodor strobelii
  misc_feature: SGI Peptide ID NO. 562299
  misc_feature (19)..(484): NCBI GI: 154297697 Blast Desc: BC1G_12260 [Botryotinia fuckeliana B05.10] gi|150858389|gb|EDN33581.1| BC1G_12260 [Botryotinia fuckeliana B05.10]
  misc_feature (22)..(491): NCBI GI: 256728970 Blast Desc: NECHADRAFT_93399 [Nectria haematococca mpVI 77-13-4]
  misc_feature (8)..(483): NCBI GI: 46138467 Blast Desc: FG10748.1 [Gibberella zeae PH-1]
  misc_feature (7)..(484): NCBI GI: 67538590 Blast Desc: AN5465.2 [Aspergillus nidulans FGSC A4] gi|40743435|gb|EAA62625.1| AN5465.2 [Aspergillus nidulans FGSC A4] gi|259485087|tpe|CBF81860.1| TPA: conserved [Aspergillus FGSC
  misc_feature (7)..(483): NCBI GI: 145237878 Blast Desc: An07g05030 [Aspergillus niger] gi|134076063|emb|CAK39422.1| protein product [Aspergillus niger]
  misc_feature (29)..(484): NCBI GI: 119473829 Blast Desc: NFIA_002430 [Neosartorya fischeri NRRL 181] gi|119406943|gb|EAW16893.1| conserved [Neosartorya fischeri NRRL 181]
  misc_feature (29)..(483): NCBI GI: 121712289 Blast Desc: conserved [Aspergillus clavatus NRRL 1] gi|119401908|gb|EAW12330.1| conserved [Aspergillus clavatus NRRL 1]
  misc_feature (34)..(484): NCBI GI: 70985929 Blast Desc: conserved [Aspergillus fumigatus Af293] gi|66846098|gb|EAL86431.1| conserved [Aspergillus fumigatus Af293]
  misc_feature (34)..(484): NCBI GI: 159128396 Blast Desc: conserved [Aspergillus fumigatus A1163]
  misc_feature (34)..(484): NCBI GI: 115437028 Blast Desc: conserved [Aspergillus terreus NIH2624] gi|114188522|gb|EAU30222.1| conserved [Aspergillus terreus NIH2624]
MNALSGWICHGLFIFTLVHEATADAPLVFDAEGYNNGSYGADPHQLYHSTDLVSPLLQINTWEPNKTDNASFIFLTISDPTRKDGHSGPVIYRAKDLSLVYSQPQWNYVTNAQVGYFNDSDYLIFLEQTSVNGKPSTNCLLYDSSYELAYNVSSHSPDGSFFGVHECFLTAHGSATIVLTETIPFDLSRVGGDHDGKILDNIIQEIDIQTGELLFEWRASKFFDIMETFQELQHGFKGSFDYMHMNSVEKTGGGDFLVSCRHLHSITLVNGSTGDIVWTLGGKKNQFKDISDGHATDFHWQHHARFTNSEMTRLSMFDNHNITTTVGCTVNCSRARHVELDYEHMTASLVQEFYHPESLVSGFEGSYYSLPGGNVLVGWGANPTFTEHTPEGECVMDVQVDMWRVEHGYPINYRAFKMGWKAFPKWDPSIAAVESASDGIYSVYLSWNGATEVVSWQLLHGEVADNVTLPIVKVPRIGFETEMKHIKLENPW

SEQ ID NO: 7598 - DNA, 805 bp, Muscodor strobelii
  misc_feature: SGI EST ID NO. CUFF.18884.0
  misc_feature: Variant of the nucleotide sequence at SEQ ID NO 7596
ggggcataacccgaaatcatctcaagagcgaattgcgagctcattcagagttctacctctccctcgcaacgttagctctgcttctgactaacggattcctaactctgtgtgtatcagatctccatagtatcaccttagtgaacgggtcaacaggtgacattgtatggactctgggtggcaaaaagaaccaattcaaagatatttcagacggtcacgcgaccgacttccactggcaacaccacgcgcgcttcacaaactccgaaatgacgcgtctaagtatgttcgacaatcataacatcacgaccacagtcggatgcacagttaactgctcacgagctcgacacgttgagctagactacgagcacatgacggcaagcctcgtacaggaattctaccaccctgagagcctcgttagtgggtttgaaggtagctactattcgctacccggcggtaatgtccttgttggctggggtgccaatccaactttcactgagcacacgccggaaggagaatgtgtcatggacgttcaggttgatatgtggcgagtagaacacgggtatccgatcaactatagggctttcaaaatgggatggaaagctttcccaaagtgggacccaagcatagcagccgtggaaagtgcatcggacggtatatattcagtatacttgagctggaacggagctaccgaagtcgtatcttggcaactgcttcacggcgaagtagccgacaacgtcactctgccaatcgtcaaagttcctcgtataggctttgagaccgagatgaagcatatcaaattggagaaccc

SEQ ID NO: 7599 - DNA, 276 bp, Muscodor strobelii
  misc_feature: SGI cDNA ID NO. 562300
  misc_feature: Reduced expression when VOC is produced
  misc_feature: Encodes the peptide sequence at SEQ ID NO 7600
atgcgcggccggggccttggcgctggcagcaccgacggctctccttctccccctatgaggaagaagccttcgcccaacgaagatgcgtctcgaccggagagcataacgcccgccatgcgtgcccagcgaacgggcaagaacgtcagcattgcggacgatgctcctgatgccgctgcctcggccctgaccctcaaggagtaccgcgccaggctcgcccgcgacatggcccgccgagagcgttccgctgccggctcctcctccccaggacctgggtga

SEQ ID NO: 7600 - protein, 91 aa, Muscodor strobelii
  misc_feature: SGI Peptide ID NO. 562300
  misc_feature: Useful for introducing or modulating the production of volatile compounds
MRGRGLGAGSTDGSPSPPMRKKPSPNEDASRPESITPAMRAQRTGKNVSIADDAPDAAASALTLKEYRARLARDMARRERSAAGSSSPGPG

SEQ ID NO: 7601 - DNA, 7168 bp, Muscodor strobelii
  misc_feature: SGI EST ID NO. CUFF.19090.1
  misc_feature: Variant of the nucleotide sequence at SEQ ID NO 7599
cagaacccactgtacagcactgtctgacgtagctcggacaggggagtcgccccattttgcggaaatctacaggacggtagaggaaatgtcgcccacgcaggcgcagtgtcgctggccccatagccaactgagggaagtacgtctttcccatctcgacgttcgacggcaacgacttcagcatgtcacttcctaaggccgcacacaaggacattgcatgcacttaggtagcctcacacctgccctgctcgacggcggcacaccacagcgccgggcgcaacctagaggtacctacatcgcaattgccattccgtcacctacagcgcaggtggcagaccccgacatccgcacactcgcccggccccctgctcgtctgataccctcaccaccacacacgcgagtaatactgcctgctcagactgcacacgacagccacgtttctctgctgctctaacttgcacataccggcctggcggatgccgaacacacgagcgacttgtcacgtccgtccccggcgagtgaagttggggcctcgctgatgcggcatgtcaacttcgaacccgaaaaacgccagtccaccacccgcagccccaagctcgccgcttcgcaatcttgcccacccgtcgcaccgtcctcctcttcctcccgctcacgagagcctttccgactctgtgggcaacaggccgcgaatgcgcggccggggccttggcgctggcagcaccgacggctctccttctccccctatgaggaagaagccttcgcccaacgaagatgcgtctcgaccggagagcataacgcccgccatgcgtgcccagcgaacgggcaagaacgtcagcattgcggacgatgctcctgatgccgctgcctcggccctgaccctcaaggagtaccgcgccaggctcgcccgcgacatggcccgccgagagcgttccgctgccggctcctcctccccaggacctgggtgacctgcggatctctcccatccgcgaggactcgcccatgtccccgatctcctcgcccgaccttttgactgcatctaccgaatccaataagactgttcggggcggcatgactcctggtcttaccgcaaggacgccctcctacccctttcctcgcatggccacgccgggctaccagccctctcacctccagaatgctgtccatttcggtgccagtgctgatactggagatttcagctccccgggggccaggctgctgggccgtgttctccacgaccagctacgatcagacccctccactccagcctccgccatgaccttcctcccccaagatgcctcgccctactccgagaaccccatgtacccaaccccgaatctctacgagctgtcgttactgctctcggctgaaccaggcttagacgagtggtggaacacggttgtgcagatcatgaaagagtccttccacgccgagagaattactttgtcgatccccgcagatgctaccgatattgacaacgtgccatggggtcagaaagccacctataatgcccagacggaggatgatttgagcatgggttacttggcccggggcagcagtttggctgcaaacagcacagaagaccggctggatatctcgtctaccggggaacctctgctgagaagcgagtccccacgacgcccgagcatacagagccgccactcatttactacctacgaagagagaaaggagtcaagaaagattcattccagcgacggcgcaacgtcagcgcctaaacgtcctgggttcacgtctagaagcaggagccattatcccggcactgagcgtggagattctagtgcagctcaaccacccttgaatcaaaaagcactcgagcagcatgatgctgtagaagagcagcagccagtaccaagctgggaggcatccttggagcccgataaggaagtgaagggccgaatactcccagttcttcaagcgctcgacttggaagccgatcctctcatcgaccacaatggaattgcgagggtcattgaacgagggaaggtcattgctttgactcgtacttacccctatcttgacactgacgagtatgagccacaatcacacgccaggaccactagaccgtcttcacaggaatttaaaaacgcgttgaatgtgaaacagaataaggtcgaatccacaacgaacctgtcgtcgcttctcgctaatgccggcgcacctttgacgaggagcagaagcaagaggtcacgtttatcagaccaaagtaaaatcccgaagctgttgtctgtcatcgacgatgttcctcctcggccaccgactccaaggtatgaagagtttgaacaggcgcctccttcaccatgggcgcaatcgcctgcaccatctccagccgttcgtccagatccctcagagaaccccttttttaccgacgccatggttgatgaggactctttcaatcctggtcccagcccacatgattatacatccatgcagatacccgagaccatcggtgtcgacaattcttggactgtactccatattccgctaaaccacgttttgttttcacggaacacttcaagattcaggttagacccaacagcgctagagcaaagaagttctgcacattcaaaatctagagcttcgccgctgccttctacggaagacacatcgcggaaaattagaccgcctccgattgcaatattgtcaattcttagcccagtcattccgtacccctctaatttgcgatattctcttgagcacctagctccccacttggctacttcgttttccctttgccgccattactcaaatctcgagaccgaagtcatgggcctttctcgtaaaagaccactcaacgctggttttgggggtctcgatgctgatgggaggcctgtggtggctccgagtgcgctccttcaccttgccctttctccatctgaagaagcctctcagcgatcgatggctggaagcatcacgagcccaagcgactattcgacgcagtcccgaagcattactgcttctcctgccggaacacccatctgggagcctggttcgtttgggttagtagtagagcgtcgaccgggcggaacgagtccggcctccaccggaggcgacagctacttcaatcccaagctgaagagcggtgtacatgctgagacgcctttaagtgcatcaagctatcgactgtctcgaagtgctaaagatatcgcagcccatagacagcaccggcgctccaccagctttcgccagcaagctcaagatacaggaaattttaaagagcccgagccttctgatggcgctcctgtacattttcctagtgtggatgatgacgcctcggcgacgaggcaacggcacgcatcaagagactcgatggagacaccaaccaagagggacgaacagtttgcggcacaagatggttatgaacattcgaagaagctggctagtgtcagcggacaagcattgggcaccagtcccaagcacacaaaactgcactcgtacggcggtgacttcgcctctacgttccagtctttgccacccagtacgcctttgctgacacgcccaactacgcaacaaggccccccagtgcgttcaaatacaagcgcaacgtctgccccacaagttagcatgttaccaccgacagaccgcctgaaaggccttatgctcgatcttttgccagttcaagtcttcgttgcatggccgatgaccggtgaaatagtctgggtcaactcacgatatttgacatacaggggacagacgctcgctgacttagttgccgatccatgggcaagttttcatagcgaggaccgtgaagactacatccgttcatggacacattcgcttcgaacaggtgaacaatttgttcacacagtccgactgcgtcgtttcgatggagcttaccgctggcatcaagctcgtgctgttgcctcgcgtgacaaacgaggggttattgtgcagttcatcggctcgtatatggatatccatgaccagaagattgcagaattgatggcattgcgtcaagccgagatcgaggcttcagaggcgaagcaccgactactggctaatctgatccctcagatcatctttactgccaccgagagcgacggaattacatttgcgaacgagcagtggctgtcgtatacgggacagagcgaagaaggacctctcgggttaggattcatggacttcatccatcctgacgatctagcgagagttcgtctgccaacggatcgcagcgctaaggggctgggtttgtcctctggcggttcggccctaattcccgagcagaaatcaatgccgggtagtatagaaagccgtttcgttcaacttcctcctcatgcgcgagatgtagctgctcagaagcactctggtacttctcggccaatttttagcatccccaatgccgacctgagcgaacttgctcggcaaggtatcatcaaagtcactacagatagcaatggccgattgtcatacacgactgaggcacggttacggtctaaaactggcgaatacagatggcatctgattagatgtgtagaaatcgacgacgcgggatttggcagcggctcaagctcctacttcggctccgcgaccgatatcaacgatcacaagctactagaggccaaattgaaggaggccatggaatctaaagggcgatttctcagcaatatgtctcatgagatacgaacacctctcattggtatatctggcatggttagcttccttcaggacactacgctgagcgaagagcaacgagatttcacaaacacgatccagaccagtgctaatagtcttctaatgattatcaatgacattcttgacctatcgaaagttgacgccggaatgatgaagctcaaattcgagtggtttcacacccggtctctcatcgaagatgtcaacgaacttgtctcgaccatggctatagccaaaagacttgagctcaactacgtggtcgaagaaaatgtcccttcatgggtcaaaggagacaaagttcgaataagacaagttcttctcaacgtaattggcaatgccattaaattcacaaacgaaggtgaagttttcagccggtgtcgggtctacacagaatccaccggtgtgattggacaaaaccagatcatgttagagtactcagtaattgacactggtcgaggtttcaccaagaaagaggccgagctcattttcaaacctttcagtcagattgacggtagcagtacccgacagcacgggggaagcggtctcggtctcgtaatatcgagacagctcgttgagctccatggtggccagatggaaggcaccgcagtaccagggaagggttcaactttcactttcactgctaagtttgggctgccaagtcccgccgaccatccggacgttaccaacactcctccaatgatggcaaccatccgagccgatcctgacgagaagacgctgaacactatgaagcccttagtacttcaaagaaccctggaccagccattgactgctagtcccagctcggacgctgacataatctctcccgcgcccacatcgtctgccagctctgatccgtccgtacgatctctccatacccagaatacaaccaggtcgtcagtgtcgtcaatccatgctggtctgactcatttcagcgaagccgcgaaagcaagtggccaggatttatcgcaaatgaggctagagatgccgactggaaagctcagcccacaagccgtacctgtccctgaccgtcttggttctcccgagcggatggcgcaattccgtccgccaatgtattccattctcatcatttgcccaccaaaatatagtagagaagcaatttcaaaacacatcgagacaacgcttcccaaagacgtcccgcaccaaataacagcgttggcgagcgtctccgaggcagctcatctgattggcggacatgaatccgtaacattcacccatgttgttttgaacctatcgtctgcggaagagatcatcagtgtcacagatcagatcgctgcttcgatgggaggtaaatcggtagctctgatcatgtctgactcagtccagagacaagccgtcctcaaacttgcttcagatgcaaggcatcaacaacttctcgcagaaaagcgtatcatatttgttcacaaacctgtcaagccttcccggttcgccgtgatctttgatccagctcgagagcgtgatctcagtaccgatctcaaccggtcgagtgcggcgcagatggttgaatctcaaaaacaaaactatctcaatgttgaaaagcggataggcaacaaaggcttcaaagtgcttctcgttgaagacaatccggtcaaccagaaggttctggcacgatatctcaagaaagttggaatcgaggccgaaattgcggctgatggtgtagaggcaaccgatacggtatttggacatccggcaaaatattattcactaatattgtgtgatctccacatgcccagaaaagatggctaccagacatgtagagacattcggcaatgggagcagagcaacaagtacaaccctatccctataattgcactttctgccaatgtcatgtcggacgtgcaagagaaatgcacggcggcaggtttcgatgattatgttacgaaacctgtagacttcgtcgatcttagtacggcgatgtctaagtatttttgaagtcaagctgtcagtgagttacagcacataagtggagctgatgattttgcatctgtggcgttctgaagcgatagccttccaactgaccttctggtggtcggtttaagctggtggtctgtacgtgtatgttatttttcctttcacctgtatcaatgttagagcacaaaggctcggatggtcaaatcatggaagactcagggccatgtcaaatcatcatcaacagttgtacagacaggcggtatcctatcagtcttcctctgtccgccttgtcaaatagacgggcccaaaatattatgcggcgttatcgtttgaattttttagcattgcgacggtagctataaaatttggtagtgtatcagcaagcagatctacagtttgtagaagattgcactccttacttgttgatatatatttggagagcaagcgaggcgaattaaatatggacaacattattattgaagactcttcgcaagcagtgagcagagcctatacgtcttgatactccgaacgagatttggaaaggcattggttagtgttttaactagtgcaggatagacatttgctaatgagccatgga

SEQ ID NO: 7602 - DNA, 5595 bp, Muscodor strobelii
  misc_feature: SGI cDNA ID NO. 562301
  misc_feature: Reduced expression when VOC is produced
  misc_feature: Encodes the peptide sequence at SEQ ID NO 7603
atgtccccgatctcctcgcccgaccttttgactgcatctaccgaatccaataagactgttcggggcggcatgactcctggtcttaccgcaaggacgccctcctacccctttcctcgcatggccacgccgggctaccagccctctcacctccagaatgctgtccatttcggtgccagtgctgatactggagatttcagctccccgggggccaggctgctgggccgtgttctccacgaccagctacgatcagacccctccactccagcctccgccatgaccttcctcccccaagatgcctcgccctactccgagaaccccatgtacccaaccccgaatctctacgagctgtcgttactgctctcggctgaaccaggcttagacgagtggtggaacacggttgtgcagatcatgaaagagtccttccacgccgagagaattactttgtcgatccccgcagatgctaccgatattgacaacgtgccatggggtcagaaagccacctataatgcccagacggaggatgatttgagcatgggttacttggcccggggcagcagtttggctgcaaacagcacagaagaccggctggatatctcgtctaccggggaacctctgctgagaagcgagtccccacgacgcccgagcatacagagccgccactcatttactacctacgaagagagaaaggagtcaagaaagattcattccagcgacggcgcaacgtcagcgcctaaacgtcctgggttcacgtctagaagcaggagccattatcccggcactgagcgtggagattctagtgcagctcaaccacccttgaatcaaaaagcactcgagcagcatgatgctgtagaagagcagcagccagtaccaagctgggaggcatccttggagcccgataaggaagtgaagggccgaatactcccagttcttcaagcgctcgacttggaagccgatcctctcatcgaccacaatggaattgcgagggtcattgaacgagggaaggtcattgctttgactcgtacttacccctatcttgacactgacgagtatgagccacaatcacacgccaggaccactagaccgtcttcacaggaatttaaaaacgcgttgaatgtgaaacagaataaggtcgaatccacaacgaacctgtcgtcgcttctcgctaatgccggcgcacctttgacgaggagcagaagcaagaggtcacgtttatcagaccaaagtaaaatcccgaagctgttgtctgtcatcgacgatgttcctcctcggccaccgactccaaggtatgaagagtttgaacaggcgcctccttcaccatgggcgcaatcgcctgcaccatctccagccgttcgtccagatccctcagagaaccccttttttaccgacgccatggttgatgaggactctttcaatcctggtcccagcccacatgattatacatccatgcagatacccgagaccatcggtgtcgacaattcttggactgtactccatattccgctaaaccacgttttgttttcacggaacacttcaagattcaggttagacccaacagcgctagagcaaagaagttctgcacattcaaaatctagagcttcgccgctgccttctacggaagacacatcgcggaaaattagaccgcctccgattgcaatattgtcaattcttagcccagtcattccgtacccctctaatttgcgatattctcttgagcacctagctccccacttggctacttcgttttccctttgccgccattactcaaatctcgagaccgaagtcatgggcctttctcgtaaaagaccactcaacgctggttttgggggtctcgatgctgatgggaggcctgtggtggctccgagtgcgctccttcaccttgccctttctccatctgaagaagcctctcagcgatcgatggctggaagcatcacgagcccaagcgactattcgacgcagtcccgaagcattactgcttctcctgccggaacacccatctgggagcctggttcgtttgggttagtagtagagcgtcgaccgggcggaacgagtccggcctccaccggaggcgacagctacttcaatcccaagctgaagagcggtgtacatgctgagacgcctttaagtgcatcaagctatcgactgtctcgaagtgctaaagatatcgcagcccatagacagcaccggcgctccaccagctttcgccagcaagctcaagatacaggaaattttaaagagcccgagccttctgatggcgctcctgtacattttcctagtgtggatgatgacgcctcggcgacgaggcaacggcacgcatcaagagactcgatggagacaccaaccaagagggacgaacagtttgcggcacaagatggttatgaacattcgaagaagctggctagtgtcagcggacaagcattgggcaccagtcccaagcacacaaaactgcactcgtacggcggtgacttcgcctctacgttccagtctttgccacccagtacgcctttgctgacacgcccaactacgcaacaaggccccccagtgcgttcaaatacaagcgcaacgtctgccccacaagttagcatgttaccaccgacagaccgcctgaaaggccttatgctcgatcttttgccagttcaagtcttcgttgcatggccgatgaccggtgaaatagtctgggtcaactcacgatatttgacatacaggggacagacgctcgctgacttagttgccgatccatgggcaagttttcatagcgaggaccgtgaagactacatccgttcatggacacattcgcttcgaacaggtgaacaatttgttcacacagtccgactgcgtcgtttcgatggagcttaccgctggcatcaagctcgtgctgttgcctcgcgtgacaaacgaggggttattgtgcagttcatcggctcgtatatggatatccatgaccagaagattgcagaattgatggcattgcgtcaagccgagatcgaggcttcagaggcgaagcaccgactactggctaatctgatccctcagatcatctttactgccaccgagagcgacggaattacatttgcgaacgagcagtggctgtcgtatacgggacagagcgaagaaggacctctcgggttaggattcatggacttcatccatcctgacgatctagcgagagttcgtctgccaacggatcgcagcgctaaggggctgggtttgtcctctggcggttcggccctaattcccgagcagaaatcaatgccgggtagtatagaaagccgtttcgttcaacttcctcctcatgcgcgagatgtagctgctcagaagcactctggtacttctcggccaatttttagcatccccaatgccgacctgagcgaacttgctcggcaaggtatcatcaaagtcactacagatagcaatggccgattgtcatacacgactgaggcacggttacggtctaaaactggcgaatacagatggcatctgattagatgtgtagaaatcgacgacgcgggatttggcagcggctcaagctcctacttcggctccgcgaccgatatcaacgatcacaagctactagaggccaaattgaaggaggccatggaatctaaagggcgatttctcagcaatatgtctcatgagatacgaacacctctcattggtatatctggcatggttagcttccttcaggacactacgctgagcgaagagcaacgagatttcacaaacacgatccagaccagtgctaatagtcttctaatgattatcaatgacattcttgacctatcgaaagttgacgccggaatgatgaagctcaaattcgagtggtttcacacccggtctctcatcgaagatgtcaacgaacttgtctcgaccatggctatagccaaaagacttgagctcaactacgtggtcgaagaaaatgtcccttcatgggtcaaaggagacaaagttcgaataagacaagttcttctcaacgtaattggcaatgccattaaattcacaaacgaaggtgaagttttcagccggtgtcgggtctacacagaatccaccggtgtgattggacaaaaccagatcatgttagagtactcagtaattgacactggtcgaggtttcaccaagaaagaggccgagctcattttcaaacctttcagtcagattgacggtagcagtacccgacagcacgggggaagcggtctcggtctcgtaatatcgagacagctcgttgagctccatggtggccagatggaaggcaccgcagtaccagggaagggttcaactttcactttcactgctaagtttgggctgccaagtcccgccgaccatccggacgttaccaacactcctccaatgatggcaaccatccgagccgatcctgacgagaagacgctgaacactatgaagcccttagtacttcaaagaaccctggaccagccattgactgctagtcccagctcggacgctgacataatctctcccgcgcccacatcgtctgccagctctgatccgtccgtacgatctctccatacccagaatacaaccaggtcgtcagtgtcgtcaatccatgctggtctgactcatttcagcgaagccgcgaaagcaagtggccaggatttatcgcaaatgaggctagagatgccgactggaaagctcagcccacaagccgtacctgtccctgaccgtcttggttctcccgagcggatggcgcaattccgtccgccaatgtattccattctcatcatttgcccaccaaaatatagtagagaagcaatttcaaaacacatcgagacaacgcttcccaaagacgtcccgcaccaaataacagcgttggcgagcgtctccgaggcagctcatctgattggcggacatgaatccgtaacattcacccatgttgttttgaacctatcgtctgcggaagagatcatcagtgtcacagatcagatcgctgcttcgatgggaggtaaatcggtagctctgatcatgtctgactcagtccagagacaagccgtcctcaaacttgcttcagatgcaaggcatcaacaacttctcgcagaaaagcgtatcatatttgttcacaaacctgtcaagccttcccggttcgccgtgatctttgatccagctcgagagcgtgatctcagtaccgatctcaaccggtcgagtgcggcgcagatggttgaatctcaaaaacaaaactatctcaatgttgaaaagcggataggcaacaaaggcttcaaagtgcttctcgttgaagacaatccggtcaaccagaaggttctggcacgatatctcaagaaagttggaatcgaggccgaaattgcggctgatggtgtagaggcaaccgatacggtatttggacatccggcaaaatattattcactaatattgtgtgatctccacatgcccagaaaagatggctaccagacatgtagagacattcggcaatgggagcagagcaacaagtacaaccctatccctataattgcactttctgccaatgtcatgtcggacgtgcaagagaaatgcacggcggcaggtttcgatgattatgttacgaaacctgtagacttcgtcgatcttagtacggcgatgtctaagtatttttga

SEQ ID NO: 7603 - protein, 1864 aa, Muscodor strobelii
  misc_feature: SGI Peptide ID NO. 562301
  misc_feature (1312)..(1432): Pfam Id: PF02518 Pfam Desc: Histidine kinase-, DNA gyrase B-, and HSP90-like ATPase
  misc_feature (1200)..(1265): Pfam Id: PF00512 Pfam Desc: His Kinase A (phosphoacceptor) domain
  misc_feature (890)..(981): Pfam Id: PF08447 Pfam Desc: PAS fold
  misc_feature (1741)..(1861): Pfam Id: PF00072 Pfam Desc: Response regulator receiver domain
  misc_feature (1021)..(1057): Pfam Id: PF08447 Pfam Desc: PAS fold
  misc_feature (862)..(1860): NCBI GI: 240278710 Blast Desc: histidine kinase [Ajellomyces capsulatus H143]
  misc_feature (862)..(1860): NCBI GI: 225560355 Blast Desc: histidine kinase [Ajellomyces capsulatus G186AR]
  misc_feature (863)..(1860): NCBI GI: 119491243 Blast Desc: sensor histidine kinase/response regulator, [Neosartorya fischeri NRRL 181] gi|119411370|gb|EAW21313.1| sensor histidine kinase/response regulator, [Neosartorya fischeri
  misc_feature (863)..(1860): NCBI GI: 70999298 Blast Desc: sensor histidine kinase/response regulator [Aspergillus fumigatus Af293] gi|66852005|gb|EAL92330.1| sensor histidine kinase/response regulator, [Aspergillus fumigatus
  misc_feature (863)..(1860): NCBI GI: 159127383 Blast Desc: sensor histidine kinase/response regulator, [Aspergillus fumigatus A1163]
  misc_feature (823)..(1860): NCBI GI: 115391627 Blast Desc: ATEG_04140 [Aspergillus terreus NIH2624] gi|114194242|gb|EAU35942.1| ATEG_04140 [Aspergillus terreus NIH2624]
  misc_feature (808)..(1860): NCBI GI: 240108450 Blast Desc: Histidine Kinase A (phosphoacceptor) domain containing protein [Coccidioides posadasii C735 delta SOWgp]
  misc_feature (849)..(1860): NCBI GI: 212527500 Blast Desc: sensor histidine kinase/response regulator, [Penicillium marneffei ATCC 18224] gi|210073305|gb|EEA27392.1| sensor histidine kinase/response regulator, [Penicillium ATCC
  misc_feature (863)..(1860): NCBI GI: 258563456 Blast Desc: UREG_07246 [Uncinocarpus reesii 1704] gi|237907980|gb|EEP82381.1| UREG_07246 [Uncinocarpus reesii 1704]
  misc_feature (808)..(1860): NCBI GI: 119186759 Blast Desc: CIMG_03427 [Coccidioides immitis RS]
  misc_feature: Useful for introducing or modulating the production of volatile compounds
MSPISSPDLLTASTESNKTVRGGMTPGLTARTPSYPFPRMATPGYQPSHLQNAVHFGASADTGDFSSPGARLLGRVLHDQLRSDPSTPASAMTFLPQDASPYSENPMYPTPNLYELSLLLSAEPGLDEWWNTVVQIMKESFHAERITLSIPADATDIDNVPWGQKATYNAQTEDDLSMGYLARGSSLAANSTEDRLDISSTGEPLLRSESPRRPSIQSRHSFTTYEERKESRKIHSSDGATSAPKRPGFTSRSRSHYPGTERGDSSAAQPPLNQKALEQHDAVEEQQPVPSWEASLEPDKEVKGRILPVLQALDLEADPLIDHNGIARVIERGKVIALTRTYPYLDTDEYEPQSHARTTRPSSQEFKNALNVKQNKVESTTNLSSLLANAGAPLTRSRSKRSRLSDQSKIPKLLSVIDDVPPRPPTPRYEEFEQAPPSPWAQSPAPSPAVRPDPSENPFFTDAMVDEDSFNPGPSPHDYTSMQIPETIGVDNSWTVLHIPLNHVLFSRNTSRFRLDPTALEQRSSAHSKSRASPLPSTEDTSRKIRPPPIAILSILSPVIPYPSNLRYSLEHLAPHLATSFSLCRHYSNLETEVMGLSRKRPLNAGFGGLDADGRPVVAPSALLHLALSPSEEASQRSMAGSITSPSDYSTQSRSITASPAGTPIWEPGSFGLVVERRPGGTSPASTGGDSYFNPKLKSGVHAETPLSASSYRLSRSAKDIAAHRQHRRSTSFRQQAQDTGNFKEPEPSDGAPVHFPSVDDDASATRQRHASRDSMETPTKRDEQFAAQDGYEHSKKLASVSGQALGTSPKHTKLHSYGGDFASTFQSLPPSTPLLTRPTTQQGPPVRSNTSATSAPQVSMLPPTDRLKGLMLDLLPVQVFVAWPMTGEIVWVNSRYLTYRGQTLADLVADPWASFHSEDREDYIRSWTHSLRTGEQFVHTVRLRRFDGAYRWHQARAVASRDKRGVIVQFIGSYMDIHDQKIAELMALRQAEIEASEAKHRLLANLIPQIIFTATESDGITFANEQWLSYTGQSEEGPLGLGFMDFIHPDDLARVRLPTDRSAKGLGLSSGGSALIPEQKSMPGSIESRFVQLPPHARDVAAQKHSGTSRPIFSIPNADLSELARQGIIKVTTDSNGRLSYTTEARLRSKTGEYRWHLIRCVEIDDAGFGSGSSSYFGSATDINDHKLLEAKLKEAMESKGRFLSNMSHEIRTPLIGISGMVSFLQDTTLSEEQRDFTNTIQTSANSLLMIINDILDLSKVDAGMMKLKFEWFHTRSLIEDVNELVSTMAIAKRLELNYVVEENVPSWVKGDKVRIRQVLLNVIGNAIKFTNEGEVFSRCRVYTESTGVIGQNQIMLEYSVIDTGRGFTKKEAELIFKPFSQIDGSSTRQHGGSGLGLVISRQLVELHGGQMEGTAVPGKGSTFTFTAKFGLPSPADHPDVTNTPPMMATIRADPDEKTLNTMKPLVLQRTLDQPLTASPSSDADIISPAPTSSASSDPSVRSLHTQNTTRSSVSSIHAGLTHFSEAAKASGQDLSQMRLEMPTGKLSPQAVPVPDRLGSPERMAQFRPPMYSILIICPPKYSREAISKHIETTLPKDVPHQITALASVSEAAHLIGGHESVTFTHVVLNLSSAEEIISVTDQIAASMGGKSVALIMSDSVQRQAVLKLASDARHQQLLAEKRIIFVHKPVKPSRFAVIFDPARERDLSTDLNRSSAAQMVESQKQNYLNVEKRIGNKGFKVLLVEDNPVNQKVLARYLKKVGIEAEIAADGVEATDTVFGHPAKYYSLILCDLHMPRKDGYQTCRDIRQWEQSNKYNPIPIIALSANVMSDVQEKCTAAGFDDYVTKPVDFVDLSTAMSKYF

SEQ ID NO: 7604 - DNA, 7168 bp, Muscodor strobelii; identical to SEQ ID NO: 7601
  misc_feature: SGI EST ID NO. CUFF.19090.1
  misc_feature: Variant of the nucleotide sequence at SEQ ID NO 7602

SEQ ID NO: 7605 - DNA, 1038 bp, Muscodor strobelii
  misc_feature: SGI cDNA ID NO. 562302
  misc_feature: Encodes the peptide sequence at SEQ ID NO 7606
atgacgttccacattcaagtacacagcggtggcttagtagctcacaacgagaagccatcatcgttacttcgactgccccgtcctctgctcaggaagaagccctcgtcacatgccatcaatactgcctcgcatcctcaatccatcacctccttccccgttcgcgtccacaaagaggattatagcatcaaccaaagtgctctagccgcccgcaaaaatttccaaaactttgcaagcaagaccgaatttcgatcacatagcgctgggccatatggcaacttcttttccacttgctggccgaatggaaaggcagaccgtataaaactggcaaccgagatcatcgaaacactttggctgtacgatgatgtgatggaggacgtcgatcatgccggcgctctggagacacatgccagcgtacgagataccttaacaggcgttgagaagacgagcaagaaagacaccatggctgctttattcaaggactttagcagtaggctatatcaaatggacaaacagggtgccccacgggtactggcgtctctcaaatcatatcttgagacgtacgacagccagaagacacctttcaacactattcagaaatacacggagtatcgcatactcaacgtcggattcggcattatggaaagcttcatgcagtggtcaatgggtatccatctcaacgaggctgagactgacgaagccatgaaattcttcatgtctgctggtcgagtaatggggttgacaaatgatctctactcgtggaatgtggagagaaccgagtccatcgaatctgctgacagacattggaatgcggtgccagtggtcatgaagcagtatgatctaaaggaagaggacgccaccgtctttctcagggggcttatcggacatcacgagcaggttactcgtcagctgggccaagaagtcatcagaagattcggctactcacaaacaatgacaagatatgtcgaggcagtcggccttatgcttggaggaaactgcctgtggtcagcgacctgcccccgctacaacaccacatcataa

SEQ ID NO: 7606 - protein, 345 aa, Muscodor strobelii
  misc_feature: SGI Peptide ID NO. 562302
  misc_feature (60)..(343): NCBI GI: 238583987 Blast Desc: MPER_10303 [Moniliophthora perniciosa FA553] gi|215453803|gb|EEB91347.1| MPER_10303 [Moniliophthora perniciosa FA553]
  misc_feature (37)..(342): NCBI GI: 154301129 Blast Desc: [Botryotinia fuckeliana B05.10] gi|150856285|gb|EDN31477.1| [Botryotinia fuckeliana B05.10]
  misc_feature (51)..(342): NCBI GI: 119499417 Blast Desc: geranylgeranyl pyrophosphate synthase [Neosartorya fischeri NRRL 181] gi|119414630|gb|EAW24569.1| geranylgeranyl pyrophosphate synthase [Neosartorya fischeri NRRL 181]
  misc_feature (157)..(330): NCBI GI: 145243160 Blast Desc: An11g01140 [Aspergillus niger] gi|134078792|emb|CAK45851.1| protein product [Aspergillus niger]
  misc_feature (51)..(342): NCBI GI: 238841665 Blast Desc: fusicoccadiene synthase [Microsporum canis CBS 113480]
  misc_feature (47)..(342): NCBI GI: 145609303 Blast Desc: MGG_13405 [Magnaporthe grisea 70-15] gi|145016690|gb|EDK01120.1| MGG_13405 [Magnaporthe grisea 70-15]
  misc_feature (91)..(342): NCBI GI: 119490120 Blast Desc: polyprenyl synthetase, [Neosartorya fischeri NRRL 181] gi|119411135|gb|EAW21078.1| polyprenyl synthetase, [Neosartorya fischeri NRRL 181]
  misc_feature (88)..(342): NCBI GI: 240106734 Blast Desc: polyprenyl synthetase, [Coccidioides posadasii C735 delta SOWgp]
  misc_feature (88)..(342): NCBI GI: 119174214 Blast Desc: CIMG_09089 [Coccidioides immitis RS]
  misc_feature (47)..(342): NCBI GI: 145616288 Blast Desc: MGG_03432 [Magnaporthe grisea 70-15] gi|145010025|gb|EDJ94681.1| MGG_03432 [Magnaporthe grisea 70-15]
  misc_feature (96)..(342): SWISSPROT Homolog: EC 4.2.3.9 Aristolochene synthase
MTFHIQVHSGGLVAHNEKPSSLLRLPRPLLRKKPSSHAINTASHPQSITSFPVRVHKEDYSINQSALAARKNFQNFASKTEFRSHSAGPYGNFFSTCWPNGKADRIKLATEIIETLWLYDDVMEDVDHAGALETHASVRDTLTGVEKTSKKDTMAALFKDFSSRLYQMDKQGAPRVLASLKSYLETYDSQKTPFNTIQKYTEYRILNVGFGIMESFMQWSMGIHLNEAETDEAMKFFMSAGRVMGLTNDLYSWNVERTESIESADRHWNAVPVVMKQYDLKEEDATVFLRGLIGHHEQVTRQLGQEVIRRFGYSQTMTRYVEAVGLMLGGNCLWSATCPRYNTTS

SEQ ID NO: 7607 - DNA, 3219 bp, Muscodor strobelii
  misc_feature: SGI EST ID NO. CUFF.19183.0
  misc_feature: Variant of the nucleotide sequence at SEQ ID NO 7605
ccgacatccccgagatcctttctttagacgtatcttttctggaacgactgtagcaaacattgtattgaggctcactatcctgtcattctgtcaccacctcctctcgcgtagccaagttcttcaagacccatggagcaccggctagccaaatgccatatcaagtcggacacagctgaagtattcactggaggcgaaaccgaacatcgtattggtaaatgaatcgcggagccaggggtgataccagtgcgagtggcgaagctcttcaaggggtacccaattcacaagatagcaccaagccagcagggctgcatgtgacccaagtccttgatagaccatgagatctgccaggaccctgacctctggtactaacctaccatctcactgggacttccataacggccgaacgggatccaaacccatgtctttgggcgatggcgggtcctcgaaccacgttgaaccgcctcaagttctcttgaggacatggcgtaccaggatgttgtataatatcctgtcaaacgttccatgccattggttccgccaacgttccggaccttgccatgagccatgccatgaacgatagatcagaagtgggggagatttttcttccagaatgatgtgggttcgacagagcagtgtttcattaccagaccaagaagccgggtgaaaagccgtgctgggtgatgtcagcctggattcatctcttgggtccctgtccttaccatggataataggtgatgaatataaatcactcctcccacactcgttctctcgttgaacttccccatcattaagccattgctgacaaaaccctgagccttaaccgaagacagcaatatctcctcatcttaagtatactccttcacaagtaacgatgacgttccacattcaagtacacagcggtggcttagtagctcacaacgagaagccatcatcgttacttcgactgccccgtcctctgctcaggaagaagccctcgtcacatgccatcaatactgcctcgcatcctcaatccatcacctccttccccgttcgcgtccacaaagaggattatagcatcaaccaaagtgctctagccgcccgcaaaaatttccaaaactttgcaagcaagaccgaatttcgatcacatagcgctgggccatatggcaacttcttttccacttgctggccgaatggaaaggcagaccgtataaaactggcaaccgagatcatcgaaacactttggctgtacgatgatgtgatggaggacgtcgatcatgccggcgctctggagacacatgccagcgtacgagataccttaacaggcgttgagaagacgagcaagaaagacaccatggctgctttattcaaggactttagcagtaggctatatcaaatggacaaacagggtgccccacgggtactggcgtctctcaaatcatatcttgagacgtacgacagccagaagacacctttcaacactattcagaaatacacggagtatcgcatactcaacgtcggattcggcattatggaaagcttcatgcagtggtcaatgggtatccatctcaacgaggctgagactgacgaagccatgaaattcttcatgtctgctggtcgagtaatggggttgacaaatgatctctactcgtggaatgtggagagaaccgagtccatcgaatctgctgacagacattggaatgcggtgccagtggtcatgaagcagtatgatctaaaggaagaggacgccaccgtctttctcagggggcttatcggacatcacgagcaggttactcgtcagctgggccaagaagtcatcagaagattcggctactcacaaacaatgacaagatatgtcgaggcagtcggccttatgcttggaggaaactgcctgtggtcagcgacctgcccccgctacaacaccacatcataacacatcacccaatctttcttagagttattggtcggcggcttggttgattttttgggattaggtctggtagcgtacaggttttgggctagaatagttcgctcacgcgactcatcatatgtacaactggcattgtttatacataatagtaaatacatttttctttgttcagaaggtggtttcgggcccttcaatcccttcgtaccgtggagttcgacttatctcgcaacggtatttcgacataaaaaatttcggagtaagtgttatcgttttcattccattttcgttgtaatccaacaagttttgtttcgctttcatcaatactgacatcttaaacatcggagaacttcacttcgtattgtacggttttgtggacccggccagatggtataatgagttcctggctatccgcatcgttgaattcctgcaatttcatattattccccatctcggctctaacttctgacgcctttgtccctgactggccgtagccaccgtggctattgtattgttttcctgttgtttgaccgaacggtacgaatttcagcaatggccggagagcggcaagagatgctgtgaacatggtcaagcccaattcaacaacagagctgtcataagttagcaaccttcatctgcactttggctgtgttgtcctgcttactatacgaaagtggtcaggtatgcattttcagcctccacaccaactgcggaggtcaagtgagacacatccacgagatacttaagtcggataattgtcactatcgaactgacgacacccagacctaggagaacgatcaccgatatcttgacccttgtgctgagttgcacgcctcgaagaagaaagacgggaattgacgcgtataaaaagctcgaggagatgtccatggcggagattgagtagccagtgttcgccaaaacgtaggccggcaaacacgtaccctcgccaaccccccaggcaagagacagaggtgtgcactgtaacgcaactgtgatagtggaaacggttgtccagactgtaaggatgccgatcgagacgccgatgagaatccggattggcttgcttgtgactgcaattcggaacaggactaatgcgacactaactttcgcgacgaatagtacgaccacgtaggcaatggtggatgccacgaagaacttcatatcactatgttagccaccactcgatagccataactgccagacctgctcaccttcacaccagttgttacatcatacgctgggttcatctgatctttatcaccatagcctgcttctaaggatgttaaagtgaggccggctagcgtcacatatcctgc

SEQ ID NO: 7608 - DNA, 1017 bp, Muscodor strobelii
  misc_feature: SGI cDNA ID NO. 562303
  misc_feature: Encodes the peptide sequence at SEQ ID NO 7609
atgccgtgggcacgcgacagccttccacccgctatttacacatttattgtgcttaatggtgtcgctgtggctcttagaatctatgtacggacttgcataagcaagtcgtttggttacgatgacatagctatggtggtagcttttgcaggatatgtgacgctagccggcctcactttaacatccttagaagcaggctatggtgataaagatcagatgaacccagcgtatgatgtaacaactggtgtgaagttcttcgtggcatccaccattgcctacgtggtcgtactattcgtcgcgaaagttagtgtcgcattagtcctgttccgaattgcagtcacaagcaagccaatccggattctcatcggcgtctcgatcggcatccttacagtctggacaaccgtttccactatcacagttgcgttacagtgcacacctctgtctcttgcctggggggttggcgagggtacgtgtttgccggcctacgttttggcgaacactggctactcaatctccgccatggacatctcctcgagctttttatacgcgtcaattcccgtctttcttcttcgaggcgtgcaactcagcacaagggtcaagatatcggtgatcgttctcctaggtctgggtgtcgtcagttcgatagtgacaattatccgacttaagtatctcgtggatgtgtctcacttgacctccgcagttggtgtggaggctgaaaatgcatacctgaccactttcgtatactctgttgttgaattgggcttgaccatgttcacagcatctcttgccgctctccggccattgctgaaattcgtaccgttcggtcaaacaacaggaaaacaatacaatagccacggtggctacggccagtcagggacaaaggcgtcagaagttagagccgagatggggaataatatgaaattgcaggaattcaacgatgcggatagccaggaactcattataccatctggccgggtccacaaaaccgtacaatacgaagtgaagttctccgatgtttaa

SEQ ID NO: 7609 - protein, 338 aa, Muscodor strobelii
  misc_feature: SGI Peptide ID NO. 562303
  misc_feature (5)..(322): NCBI GI: 46117316 Blast Desc: FG04500.1 [Gibberella zeae PH-1]
  misc_feature (5)..(326): NCBI GI: 46126829 Blast Desc: FG07792.1 [Gibberella zeae PH-1]
  misc_feature (5)..(320): NCBI GI: 256733374 Blast Desc: [Nectria haematococca mpVI 77-13-4]
  misc_feature (15)..(302): NCBI GI: 256730940 Blast Desc: NECHADRAFT_48436 [Nectria haematococca mpVI 77-13-4]
  misc_feature (14)..(302): NCBI GI: 46125517 Blast Desc: FG07136.1 [Gibberella zeae PH-1]
  misc_feature (13)..(297): NCBI GI: 46139657 Blast Desc: FG11343.1 [Gibberella zeae PH-1]
  misc_feature (6)..(324): NCBI GI: 255946237 Blast Desc: Pc20g14080 [Penicillium chrysogenum Wisconsin 54-1255] gi|211588621|emb|CAP86737.1| Pc20g14080 [Penicillium chrysogenum Wisconsin 54-1255]
  misc_feature (15)..(320): NCBI GI: 189194021 Blast Desc: conserved [Pyrenophora tritici-repentis Pt-1C-BFP] gi|187978913|gb|EDU45539.1| conserved [Pyrenophora tritici-repentis Pt-1C-BFP]
  misc_feature (10)..(332): NCBI GI: 256733780 Blast Desc: NECHADRAFT_36347 [Nectria haematococca mpVI 77-13-4]
  misc_feature (15)..(328): NCBI GI: 156048871 Blast Desc: SS1G_08142 [Sclerotinia sclerotiorum 1980] gi|154692541|gb|EDN92279.1| SS1G_08142 [Sclerotinia sclerotiorum 1980]
MPWARDSLPPAIYTFIVLNGVAVALRIYVRTCISKSFGYDDIAMVVAFAGYVTLAGLTLTSLEAGYGDKDQMNPAYDVTTGVKFFVASTIAYVVVLFVAKVSVALVLFRIAVTSKPIRILIGVSIGILTVWTTVSTITVALQCTPLSLAWGVGEGTCLPAYVLANTGYSISAMDISSSFLYASIPVFLLRGVQLSTRVKISVIVLLGLGVVSSIVTIIRLKYLVDVSHLTSAVGVEAENAYLTTFVYSVVELGLTMFTASLAALRPLLKFVPFGQTTGKQYNSHGGYGQSGTKASEVRAEMGNNMKLQEFNDADSQELIIPSGRVHKTVQYEVKFSDV

SEQ ID NO: 7610 - DNA, 3784 bp, Muscodor strobelii
  misc_feature: SGI EST ID NO. CUFF.19184.2
  misc_feature: Variant of the nucleotide sequence at SEQ ID NO 7608
cccttatgaaaagtgaatagtccagcttctcgaaacgagttctcgtcgtctcttgtatctggtgctgctgggatgattgtttgatctgccattgaaccaattccatttctggcttcccgcccgtcccgttttggatatcaggagactgcagaactgcatctattaagtagacgattgccgaatctttgtctcccttacttctcatcatcccgatcgcctgtgctgagggggcgccacacatatccattcgtttcacaccgtcggttactttttcgttgcccataattcaatcttcgtgccgcatcaaggtgtccgtgccgtcgattgtactcccgtcacaccgttataccagtcaaacgaggaaccatgccgtgggcacgcgacagccttccacccgctatttacacatttattgtgcttaatggtgtcgctgtggctcttagaatctatgtacggacttgcataagcaagtcgtttggttacgatgacatagctatggtggtagcttttgtaggatatgtgacgctagccggcctcactttaacatccttagaagcaggctatggtgataaagatcagatgaacccagcgtatgatgtaacaactggtgtgaagttcttcgtggcatccaccattgcctacgtggtcgtactattcgtcgcgaaagttagtgtcgcattagtcctgttccgaattgcagtcacaagcaagccaatccggattctcatcggcgtctcgatcggcatccttacagtctggacaaccgtttccactatcacagttgcgttacagtgcacacctctgtctcttgcctggggggttggcgagggtacgtgtttgccggcctacgttttggcgaacactggctactcaatctccgccatggacatctcctcgagctttttatacgcgtcaattcccgtctttcttcttcgaggcgtgcaactcagcacaagggtcaagatatcggtgatcgttctcctaggtctgggtgtcgtcagttcgatagtgacaattatccgacttaagtatctcgtggatgtgtctcacttgacctccgcagttggtgtggaggctgaaaatgcatacctgaccactttcgtatactctgttgttgaattgggcttgaccatgttcacagcatctcttgccgctctccggccattgctgaaattcgtaccgttcggtcaaacaacaggaaaacaatacaatagccacggtggctacggccagtcagggacaaaggcgtcagaagttagagccgagatggggaataatatgaaattgcaggaattcaacgatgcggatagccaggaactcattataccatctggccgggtccacaaaaccgtacaatacgaagtgaagttctccgatgtttaagatgtcagtattgatgaaagcgaaacaaaacttgttggattacaacgaaaatggaatgaaaacgataacacttactccgaaattttttatgtcgaaataccgttgcgagataagtcgaactccacggtacgaagggattgaagggcccgaaaccaccttctgaacaaagaaaaatgtatttactattatgtataaacaatgccagttgtacatatgatgagtcgcgtgagcgaactattctagcccaaaacctgtacgctaccagacctaatcccaaaaaatcaaccaagccgccgaccaataactctaagaaagattgggtgatgtgttatgatgtggtgttgtagcgggggcaggtcgctgaccacaggcagtttcctccaagcataaggccgactgcctcgacatatcttgtcattgtttgtgagtagccgaatcttctgatgacttcttggcccagctgacgagtaacctgctcgtgatgtccgataagccccctgagaaagacggtggcgtcctcttcctttagatcatactgcttcatgaccactggcaccgcattccaatgtctgtcagcagattcgatggactcggttctctccacattccacgagtagagatcatttgtcaaccccattactcgaccagcagacatgaagaatttcatggcttcgtcagtctcagcctcgttgagatggatacccattgaccactgcatgaagctttccataatgctgttgcacaattagtatggtgttgagtgcgagaagaacaaaaagagatacgaacccgaatccgacgttgagtatgcgatactccgtgtatttctgaatagtgttgaaaggtgtcttctggctgtcgtacgtctcaagatatgatttgagagacgccagtacccgtggggcaccctgtttgtccatttgatatagcctactgctaaagtccttgaataaagcagccatggtgtctttcttgctcgtcttctcaacgcctgttaaggtatctcgtacgctggcatgtgtctccagagcgccggcatgatcgacgtcctccatcacatctgcatcccaggagtcagttcattgtccgagttccgacactctgaaggaagtctacttaccatcgtacagccaaagtgtttcgatgatctcggttgccagttttatacggtctgcctttccattcggccagcaagtggaaaagaagttgccatatggcccagcgctatgtgatcgaaattcggtcttgcttgcaaagttttggaaatttttgcgggcggctagagcactttggttgatgctataatcctctttgtggacgcgaacggggaaggaggtgatggattgaggatgcgaggcagtattgatggcatgtgacgagggcttcttcctgagcagaggacggggcagtcgaagtaacgatgatggcttctcgttgtgagctactaagccaccgctgtgtacttgaatgtggaacgtcatcgttacttgtgaaggagtatacttaagatgaggagatattgctgtcttcggttaaggctcagggttttgtcagcaatggcttaatgatggggaagttcaacgagagaacgagtgtgggaggagtgatttatattcatcacctattatccatggtaaggacagggacccaagagatgaatccaggctgacatcacccagcacggcttttcacccggcttcttggtctggtaatgaaacactgctctgtcgaacccacatcattctggaagaaaaatctcccccacttctgatctatcgttcatggcatggctcatggcaaggtccggaacgttggcggaaccaatggcatggaacgtttgacaggatattatacaacatcctggtacgccatgtcctcaagagaacttgaggcggttcaacgtggttcgaggacccgccatcgcccaaagacatgggtttggatcccgttcggccgttatggaagtcccagtgagatggtaggttagtaccagaggtcagggtcctggcagatctcatggtctatcaaggacttgggtcacatgcagccctgctggcttggtgctatcttgtgaattgggtaccccttgaagctgcctaatgttaacacagtgacagcacgctcagacaatctgaatatacagcttcgccactcgcactggtatcacccctggctccgcgattcatttaccaatacgatgttcggtttcgcctccagtgaatacttcagctgtgtccgacttgatatggcatttggctagccggtgctccatgggtcttgaagaacttggctacgcgagaggaggtggtgacagaatgacaggatagtgagcctcaatacaatgtttgctacagtcgttccagaaaagatacgtctaaagaaaggatctcggggatgtcgg

SEQ ID NO: 7611 - DNA, 1128 bp, Muscodor strobelii
  misc_feature: SGI cDNA ID NO. 562304
  misc_feature: Elevated expression when VOC is produced
  misc_feature: Encodes the peptide sequence at SEQ ID NO 7612
atgggcgaaactattgttgaggcacctatgaataccggtgtgagcacaccatcactggccaagctcggtgctgcccccgtggagggcgttcaactcccttccgtccccgaagatctcacagccgaatggctttctagtgtgttaaagctcaatgtcaaatcagtagagaagacaaacgaactggccggcacagcgacaaaggtgtatgtgacggcacagacggaccatggagagaagaagttttgtatcaagggcggcttcaatccggctttcattcaacagatgccatggatcgtcatgatctatcagcgtgaggtcgaattcttcaaccgaatcgcgccgtcgttagatcacatggagctgcccaagtcatggtgggcaggtcacaccccagcacagggcatcgtcgtgatggacgacctctcagcccagggttgtgaatacggcgacccggtaggaacatggtcagtggaccgcgtaaaggccggtatcgagcaactcgcggcactacacgcgaagacgtggggcgttcgtcctgccgactacccctggctcacatccgactacgaccaagccattctcacattgatgcagaccttcgaggctgtcgtcaatggtcctgatcgccctacagttcccgcttacatccgagaccaagaccgcgtgacggctgtgctcaagaagcattaccgctcgcgcaaccccaagttccagtgtttgctgcacggcgacgcgcatctcggtaacacgtatcttgacaagggcgcaccgcgcttcctcgattggcagatgatccacatcgggtcggcgttccacgacgtctcgtactacattggcggcgcgctcacgatcgaggaccgccgcgcacacgaatgggagatcgtcgaccactacctccagacgctggcgaaactcggtgtccccggagttctcaagagcacagacgaggacgtccagattgagtacaaaaaatcattcctcgcgggcattggctggataatgtgcccttatgagatgcagccaagggatagcgtacacgccatggctgtgagatacgctgctgcttttgatgaccacaaaatactggagcttgtcgagtcactacccgagccgaagacaagtgcgtaa

SEQ ID NO: 7612 - protein, 375 aa, Muscodor strobelii
  misc_feature: SGI Peptide ID NO. 562304
  misc_feature (60)..(307): Pfam Id: PF02958 Pfam Desc: Domain of function (DUF227)
  misc_feature (32)..(366): NCBI GI: 46126831 Blast Desc: FG07793.1 [Gibberella zeae PH-1]
  misc_feature (32)..(367): NCBI GI: 46117314 Blast Desc: FG04499.1 [Gibberella zeae PH-1]
  misc_feature (27)..(372): NCBI GI: 256726985 Blast Desc: [Nectria haematococca mpVI 77-13-4]
  misc_feature (32)..(366): NCBI GI: 256733834 Blast Desc: NECHADRAFT_36810 [Nectria haematococca mpVI 77-13-4]
  misc_feature (25)..(373): NCBI GI: 46115600 Blast Desc: FG03642.1 [Gibberella zeae PH-1]
  misc_feature (32)..(369): NCBI GI: 116199033 Blast Desc: CHGG_07672 [Chaetomium globosum CBS 148.51] gi|88178951|gb|EAQ86419.1| CHGG_07672 [Chaetomium globosum CBS 148.51]
  misc_feature (32)..(368): NCBI GI: 256722660 Blast Desc: NECHADRAFT_16945 [Nectria haematococca mpVI 77-13-4]
  misc_feature (32)..(365): NCBI GI: 256730199 Blast Desc: NECHADRAFT_45402 [Nectria haematococca mpVI 77-13-4]
  misc_feature (32)..(365): NCBI GI: 46114616 Blast Desc: FG03150.1 [Gibberella zeae PH-1]
  misc_feature (32)..(365): NCBI GI: 46111069 Blast Desc: FG02416.1 [Gibberella zeae PH-1]
  misc_feature: Useful for introducing or modulating the production of volatile compounds
MGETIVEAPMNTGVSTPSLAKLGAAPVEGVQLPSVPEDLTAEWLSSVLKLNVKSVEKTNELAGTATKVYVTAQTDHGEKKFCIKGGFNPAFIQQMPWIVMIYQREVEFFNRIAPSLDHMELPKSWWAGHTPAQGIVVMDDLSAQGCEYGDPVGTWSVDRVKAGIEQLAALHAKTWGVRPADYPWLTSDYDQAILTLMQTFEAVVNGPDRPTVPAYIRDQDRVTAVLKKHYRSRNPKFQCLLHGDAHLGNTYLDKGAPRFLDWQMIHIGSAFHDVSYYIGGALTIEDRRAHEWEIVDHYLQTLAKLGVPGVLKSTDEDVQIEYKKSFLAGIGWIMCPYEMQPRDSVHAMAVRYAAAFDDHKILELVESLPEPKTSA

SEQ ID NO: 7613 - DNA, 2129 bp, Muscodor strobelii
  misc_feature: SGI EST ID NO. CUFF.18929.0
  misc_feature: Variant of the nucleotide sequence at SEQ ID NO 7611
cttacatacgtacacgagtaagtcactggtgtcattgtatggagtaaacgaccagaagtcatcgcgatgactatactctttcaccaccggttatcattcatacgctcaatagtccgtttctcgattatatttgatgtcgatctgctgttcatgtcacgacagtgccataaccgttggatgatgcaggacaacagatggcagataggaatttttttccagcggtcaatgagccacaggcttggctgcagcaggcaacacgtgcaaaagtctagtaggtgacaccctgggaccagctcagacaatccagaacagataaggctagagaccagctacaccgccttacccataccactctcaatttcctacctagtcgccaactgcataaatataatagactgaacctgcaatcttcttcagaaaggtggggtggatggcaatgagaccccgcggttgatctgttgagatgggtgccacgacatacagtaagttgtaaaatatcggtgacggaggtggtttaaaggtgagcattctagctatcgagcttatttaggatctatcgacttctatatttcggcatagccttggtgtttcatgaaattgctttcttctcgtttctcatatactgaccataagctatcaacacgcaaacccagagagaacatcagacaatatgggcgaaactattgttgaggcacctatgaataccggtgtgagcacaccatcactggccaagctcggtgctgcccccgtggagggcgttcaactcccttccgtccccgaagatctcacagccgaatggctttctagtgtgttaaagctcaatgtcaaatcagtagagaagacaaacgaactggccggcacagcgacaaaggtgtatgtgacggcacagacggaccatggagagaagaagttttgtatcaagggcggcttcaatccggctttcattcaacagatgccatggatcgtcatgatctatcagcgtgaggtcgaattcttcaaccgaatcgcgccgtcgttagatcacatggagctgcccaagtcatggtgggcaggtcacaccccagcacagggcatcgtcgtgatggacgacctctcagcccagggttgtgaatacggcgacccggtaggaacatggtcagtggaccgcgtaaaggccggtatcgagcaactcgcggcactacacgcgaagacgtggggcgttcgtcctgccgactacccctggctcacatccgactacgaccaagccattctcacattgatgcagaccttcgaggctgtcgtcaatggtcctgatcgccctacagttcccgcttacatccgagaccaagaccgcgtgacggctgtgctcaagaagcattaccgctcgcgcaaccccaagttccagtgtttgctgcacggcgacgcgcatctcggtaacacgtatcttgacaagggcgcaccgcgcttcctcgattggcagatgatccacatcgggtcggcgttccacgacgtctcgtactacattggcggcgcgctcacgatcgaggaccgccgcgcacacgaatgggagatcgtcgaccactacctccagacgctggcgaaactcggtgtccccggagttctcaagagcacagacgaggacgtccagattgagtacaaaaaatcattcctcgcgggcattggctggataatgtgcccttatgagatgcagccaagggatagcgtacacgccatggctgtgagatacgctgctgcttttgatgaccacaaaatactggagcttgtcgagtcactacccgagccgaagacaagtgcgtaaaaaggggtatacgcgagcggagaggaaaagcgctacatagagatggatataattttatgaataatgaaaatgacgatgggaacgacgagaaagactcggcttaatacatgttccaacatgaaacaattaactgtgatttcaattattcggtcctgtcacttatgtactccatcagctagattacaccggcaatgagactgtagggacgcatacggacaggaagtgcagaaagaaaaaacgtggaccgtctctgacttggcaatgcatatttcgagttgtgaagcatatgcatatgtagcacaatatacagtgagccaacattgcatccagg

SEQ ID NO: 7614 - DNA, 1458 bp, Muscodor strobelii
  misc_feature: SGI cDNA ID NO. 562305
  misc_feature: Reduced expression when VOC is produced
  misc_feature: Encodes the peptide sequence at SEQ ID NO 7615
atgggacgcccaaggctgataatacttatccggcacgggcagagcgagggaaacaagaaccgcgaaatacaccagactattcccgatcaccgagtgaaactaacacccgatggctgggctcaagctcgtgacgctggacgtcggctccgcgccatgctacgaccagatgacaccctccagttctacacttcgccatatcggcggacgagggagactaccgatggcattcttgagactctgacttcagacgaaccaggcccttccccctttaaacgatccaacatgaccatctacgaagagcctcgtctacgtgagcaggatttcgggaacttccaaccttgtagtgctgagatggagcgcatgtggcaagagcgcgctgattatggtcattttttctaccgtattcctaatggtgagagcgctgcagacgcctatgaccgtgtctctggcttcaacgaaagtctgtggcgccagtttggcgaggacgatttcccgagcgttcttgtgctggttacacatgggctcatgtctcgggtgtttttaatgaagtggtaccacttttccgtggagtactttgaggacttacggaacgtgaaccactgcgaattcatgatcatgaagaagaagcaagacagtgggaagtacattttacaaaataagcttcgcacttggtctgaattaaggcgcgaacgagccgctataaaggccaaggaagagaaggaacaaggcgcttcgggacatcacaaacagaaagtagaatcatctccagcaatactaccccggaagtggggaggctgtccagaaggttgtactcacggccagcatttcaaaattcgacgagatttacttgaacttcgacagcacgacgaagcaagcgctgaagctagtgttccccatagtaacgcgggcagcaaccatgggaccaatagcttggcgagcagaagagtacctaaggagcggcagcttaataactcggatgacgactcggatgatccacggggtctccatcctccagccatcgatatcaccaaagctcgcgatgcagtcgtttcttctccagatgggacaccttctttcatcacagcagaagatcgtcatcgccataaccccaaaacaccccaaaagtcaatgttcctccatgtcggtcgcgattttggcggcacctattcaggccacgctagtgaagaggacctgtctgagagtgacgcccgcgagagactggcggcaaaggctgcgagggtgaagaacggtgacaagaacggcatgaatggcaatggcagagaatctacgaagtactccaactcgagcagccggcatgcgcacgctaataggcttggcgatgcgcccagcaactcggaagatgggagcgacgaggcagaaggagaggcagaagccgaattagatgatcttgacgaagcagaaaaggaagacaggagcattcgagggagtgtgtactga

SEQ ID NO: 7615 - protein, 485 aa, Muscodor strobelii
  misc_feature: SGI Peptide ID NO. 562305
  misc_feature (6)..(180): Pfam Id: PF00300 Pfam Desc: Phosphoglycerate mutase family
  misc_feature (1)..(485): NCBI GI: 85080908 Blast Desc: NCU01845 [Neurospora crassa OR74A] gi|28881227|emb|CAD70465.1| conserved [Neurospora crassa] gi|28917700|gb|EAA27393.1| conserved [Neurospora crassa OR74A]
  misc_feature (1)..(392): NCBI GI: 116199583 Blast Desc: CHGG_07947 [Chaetomium globosum CBS 148.51] gi|88179226|gb|EAQ86694.1| CHGG_07947 [Chaetomium globosum CBS 148.51]
  misc_feature (1)..(485): NCBI GI: 39977515 Blast Desc: MGG_06642 [Magnaporthe grisea 70-15] gi|145013845|gb|EDJ98486.1| MGG_06642 [Magnaporthe grisea 70-15]
  misc_feature (1)..(485): NCBI GI: 154321343 Blast Desc: BC1G_01546 [Botryotinia fuckeliana B05.10] gi|150852084|gb|EDN27276.1| BC1G_01546 [Botryotinia fuckeliana B05.10]
  misc_feature (1)..(485): NCBI GI: 261354849 Blast Desc: phosphoglycerate mutase family domain-containing protein [Verticillium albo-atrum VaMs.102]
  misc_feature (1)..(485): NCBI GI: 46123219 Blast Desc: FG05987.1 [Gibberella zeae PH-1]
  misc_feature (1)..(485): NCBI GI: 156053774 Blast Desc: SS1G_05734 [Sclerotinia sclerotiorum 1980] gi|154703515|gb|EDO03254.1| SS1G_05734 [Sclerotinia sclerotiorum 1980]
  misc_feature (1)..(432): NCBI GI: 212526946 Blast Desc: phosphoglycerate mutase family domain protein [Penicillium marneffei ATCC 18224] gi|210073028|gb|EEA27115.1| phosphoglycerate mutase family domain protein [Penicillium ATCC
  misc_feature (1)..(297): NCBI GI: 171689382 Blast Desc: protein product [Podospora anserina] gi|170944653|emb|CAP70764.1| protein product [Podospora anserina]
  misc_feature (1)..(302): NCBI GI: 258563640 Blast Desc: conserved [Uncinocarpus reesii 1704] gi|237908072|gb|EEP82473.1| conserved [Uncinocarpus reesii 1704]
  misc_feature (2)..(225): SWISSPROT Homolog: EC 5.4.2.1 Phosphoglycerate mutase
  misc_feature: Useful for introducing or modulating the production of volatile compounds
MGRPRLIILIRHGQSEGNKNREIHQTIPDHRVKLTPDGWAQARDAGRRLRAMLRPDDTLQFYTSPYRRTRETTDGILETLTSDEPGPSPFKRSNMTIYEEPRLREQDFGNFQPCSAEMERMWQERADYGHFFYRIPNGESAADAYDRVSGFNESLWRQFGEDDFPSVLVLVTHGLMSRVFLMKWYHFSVEYFEDLRNVNHCEFMIMKKKQDSGKYILQNKLRTWSELRRERAAIKAKEEKEQGASGHHKQKVESSPAILPRKWGGCPEGCTHGQHFKIRRDLLELRQHDEASAEASVPHSNAGSNHGTNSLASRRVPKERQLNNSDDDSDDPRGLHPPAIDITKARDAVVSSPDGTPSFITAEDRHRHNPKTPQKSMFLHVGRDFGGTYSGHASEEDLSESDARERLAAKAARVKNGDKNGMNGNGRESTKYSNSSSRHAHANRLGDAPSNSEDGSDEAEGEAEAELDDLDEAEKEDRSIRGSVY

SEQ ID NO: 7616 - DNA, 2841 bp, Muscodor strobelii
  misc_feature: SGI EST ID NO. CUFF.18946.0
  misc_feature: Variant of the nucleotide sequence at SEQ ID NO 7614
caggtacccattttcagctaactttcttgtggttttgagaactccgaggataagtcagtgagcaggtgtctatggcaccatagtattctgatcatcgtccaatatgggagacgttcatctcctgattctatgcccacacaaccgtgggccgctcgcacacgcagcgactccggcaattgatcatagatagcacgagcacagcagagcagacatccatacagccgacgacacatccagccagccaggtgggtctttcatgcaggagcgcgcttggaggggctttcggaggggcagatcccaagtcaaacttctcgcatcattggacggcatcaggtgctgctatgagtgccagccatatagcatgaccagggcatgatctccctcctcgacctcattctctcattacatcatttcattttctaccctgcgactatacattgtctgtacaagatcgctagctattggttaccgagcatattcacatctgtttgttggtcgcgtgtcttgcttttcacccatggctattttggtcgtcatttaactagtcctcattgtggcgagaacttaccgccacgtacaaatagtcgctgccgtacatatatttaacgcctcttgccacctcagcgcacttgtctcgcaccgttcctcttgagagctcctgccaagagaaatatctaatcaagacacgctgatacccatccctacgttgcttgttataaaataccttataccggattctcgactcggcttcccctgaaatatctgacctgatcataatgggacgcccaaggctgataatacttatccggcacgggcagagcgagggaaacagtaaggccttcactcgatgaacctcggaagtacaaacgcgactaacgggcagacaagagaaccgcgaaatacaccagactattcccgatcaccgagtgaaactaacacccgatggctgggctcaagctcgtgacgctggacgtcggctccgcgccatgctacgaccagatgacaccctccagttctacacttcgccatatcggcggacgagggagactaccgatggcattcttgagactctgacttcagacgaaccaggcccttccccctttaaacgatccaacatgaccatctacgaagagcctcgtctacgtgagcaggatttcgggaacttccaaccttgtagtgctgagatggagcgcatgtggcaagagcgcgctgattatggtcattttttctaccgtattcctaatggtgagagcgctgcagacgcctatgaccgtgtctctggcttcaacgaaagtctgtggcgccagtttggcgaggacgatttcccgagcgttcttgtgctggttacacatgggctcatgtctcgggtgtttttaatgaagtggtaccacttttccgtggagtactttgaggacttacggaacgtgaaccactgcgaattcatgatcatgaagaagaagcaagacagtgggaagtacattttacaaaataagcttcgcacttggtctgaattaaggcgcgaacgagccgctataaaggccaaggaagagaaggaacaaggcgcttcgggacatcacaaacagaaagtagaatcatctccagcaatactaccccggaagtggggaggctgtccagaaggttgtactcacggccagcatttcaaaattcgacgagatttacttgaacttcgacagcacgacgaagcaagcgctgaagctagtgttccccatagtaacgcgggcagcaaccatgggaccaatagcttggcgagcagaagagtacctaaggagcggcagcttaataactcggatgacgactcggatgatccacggggtctccatcctccagccatcgatatcaccaaagctcgcgatgcagtcgtttcttctccagatgggacaccttctttcatcacagcagaagatcgtcatcgccataaccccaaaacaccccaaaagtcaatgttcctccatgtcggtcgcgattttggcggcacctattcaggccacgctagtgaagaggacctgtctgagagtgacgcccgcgagagactggcggcaaaggctgcgagggtgaagaacggtgacaagaacggcatgaatggcaatggcagagaatctacgaagtactccaactcgagcagccggcatgcgcacgctaataggcttggcgatgcgcccagcaactcggaagatgggagcgacgaggcagaaggagaggcagaagccgaattagatgatcttgacgaagcagaaaaggaagacaggagcattcgagggagtgtgtactgaaagattgtcacctgcgtgttggtcggatatacccttatgagaagcaataatgaatacgatattgagacatttagccgtgccgaagcctcaaattgatacggtggtgtaaagatgattatttgaagtacgtcgaacacgtttagaatgattcactagcgctcgagttagttgataccgtaccgtagctaatccccatatgcttaagactgcaatgtgttagctatatgagttgctccttcaattcctagaccacgctcaagtcatgttctatggccagtagaatattgcttatcatttgggaaatttcatgcggaaaatcggcgtgcaagtcaagttgtttctggacggtggggagatctagggctagaatgaatttgaatgccattccaacggggcaaagaagggtttgcaagtcggtctatggcgtttctcgcgttcgcttcaagcacgtagtgttagtgtacgagttcggacagcgaaccggagtactcgtgagttatagattagttagcatagtccctgctttaaggtgcttatggggcatattaat

SEQ ID NO: 7617 - DNA, 630 bp, Muscodor strobelii
  misc_feature: SGI cDNA ID NO. 562306
  misc_feature: Reduced expression when VOC is produced
  misc_feature: Encodes the peptide sequence at SEQ ID NO 7618
atgtccggcgaaggcccagaaagcatccccacctccgcagacccgcgctccaagcgtccaaccaagaagcgcgccctcacgcccctctcctcgcaagccaaagacctcgacgccctattcgcgcgtccagaccaagacatccggaccgaagccccgtccggcaacacacgcacgaccctacccccagaaatcgtagccaacgtgcaaggctcttccgccggcgccggatccggcgaattccacgtctacaaagcctcccgcagacgagaatacgagcgcctacgccgcatggacgacgaggtagccagagaaaccgcgaccgccgccttcgagcagaataaagagaaccgcgatcgcaaggacgacgagaagacgcgccgcaaccgcgagaagagggataagaagcgcagggctagggagcgggctaagaatggaaatgcagacgctaaagacgggaatggagatggagatgatggtgccaagtcctctcgtcccgttgcttcttccgcgagcaagccgaggatcgagttgacgagagtcagagatgctgaacatggtggagatgaagatcaggatgctagtgatcagctgatggaggagcccaagggcatcgtcatcgaagatgactga

SEQ ID NO: 7618 - protein, 209 aa, Muscodor strobelii
  misc_feature: SGI Peptide ID NO. 562306
  misc_feature (44)..(185): Pfam Id: PF06658 Pfam Desc: Domain of function (DUF1168)
  misc_feature (61)..(141): Pfam Id: PF06658 Pfam Desc: Domain of function (DUF1168)
  misc_feature (1)..(130): NCBI GI: 261354850 Blast Desc: conserved [Verticillium albo-atrum VaMs.102]
  misc_feature (1)..(209): NCBI GI: 46123217 Blast Desc: FG05986.1 [Gibberella zeae PH-1]
  misc_feature (1)..(125): NCBI GI: 39977511 Blast Desc: MGG_06640 [Magnaporthe grisea 70-15] gi|145013846|gb|EDJ98487.1| MGG_06640 [Magnaporthe grisea 70-15]
  misc_feature (1)..(209): NCBI GI: 169605221 Blast Desc: SNOG_05632 [Phaeosphaeria nodorum SN15] gi|160706726|gb|EAT86696.2| SNOG_05632 [Phaeosphaeria nodorum SN15]
  misc_feature (1)..(209): NCBI GI: 242784115 Blast Desc: DUF1168 domain protein [Talaromyces stipitatus ATCC 10500] gi|218720469|gb|EED19888.1| DUF1168 domain protein [Talaromyces stipitatus ATCC 10500]
  misc_feature (1)..(209): NCBI GI: 240108428 Blast Desc: CPC735_007750 [Coccidioides posadasii C735 delta SOWgp]
  misc_feature (1)..(209): NCBI GI: 119186817 Blast Desc: CIMG_03456 [Coccidioides immitis RS]
  misc_feature (1)..(133): NCBI GI: 256732982 Blast Desc: NECHADRAFT_78830 [Nectria haematococca mpVI 77-13-4]
  misc_feature (1)..(135): NCBI GI: 145233311 Blast Desc: An02g08930 [Aspergillus niger] gi|134056956|emb|CAK44303.1| protein product [Aspergillus niger]
  misc_feature (1)..(125): NCBI GI: 258563498 Blast Desc: [Uncinocarpus reesii 1704] gi|237908001|gb|EEP82402.1| [Uncinocarpus reesii 1704]
  misc_feature: Useful for introducing or modulating the production of volatile compounds
MSGEGPESIPTSADPRSKRPTKKRALTPLSSQAKDLDALFARPDQDIRTEAPSGNTRTTLPPEIVANVQGSSAGAGSGEFHVYKASRRREYERLRRMDDEVARETATAAFEQNKENRDRKDDEKTRRNREKRDKKRRARERAKNGNADAKDGNGDGDDGAKSSRPVASSASKPRIELTRVRDAEHGGDEDQDASDQLMEEPKGIVIEDD

SEQ ID NO: 7619 - DNA, 1623 bp, Muscodor strobelii
  misc_feature: SGI cDNA ID NO. 562307
  misc_feature: Reduced expression when VOC is produced
  misc_feature: Encodes the peptide sequence at SEQ ID NO 7620
atgcaggcgccggttgtggttatgaacacccagagcggcgagagacagactggtagaaaagcccagctgtctaacatcgccgctgccaaaatcgtcgccgacatcatccgatcatgtctcggccccaaggccatgctgaagatgctgctcgaccccatgggcggcatcgtcctcaccaacgacggccatgctatcctgcgagagatcgaggtgtcccacccggctgccaagagcatgatcgagctcagccggacacaggacgaagaggtcggtgatgggactacaaccgtcatcattctaggtggcgagatcctcgctcaagccctaccccagctcgagcgcaacatccaccccgtcgtcatcatatccgccttcaagcgagctctgaaggacgcgctggagatcatcgacgacatctccctgcccatcgacatcgacgacgacgaggctatgactagcttaatatcctcctccatcggcaccaagttcgtctcgagatggtccgatctgatgtgcgagctggccctcagtgccgtgcgcaccgtgtcgtgggagattggtaatggcaagcaggaggtcgacatcaagagatacgcgcgtgtggaaaaagtgccaggcggcgagattgaagacagcagagtgctcgacggcgtcatgctcaacaaggacatcactcaccccaagatgcgcaggaggatcgagaacccccggatcgtgctgctggattgccctctagagtacaagaagggagagtcgcaaacaaacatcgagatctcgaaagaggaggactggaaccgcattctacagattgaagaggagcaggtcaaggccatgtgcgaggccatcattgcgttgaagcccgacttggtcatcaccgagaagggcgtctccgacctggcgcagcactacttcatgaaggccaacatcactgctctccgccgcgtccgcaagaccgacaacaacagaatcgctagagccacgggcgcgacgatcgtcaaccgggtggatgatctccaggagtcagacgttggcaccaagtgtgggctcttcgagattgagaagattggcgacgaatacttcaccttcctgaccaagtgcaagacccccaaggcctgcaccatccttcttcgtggcccatccaaggatatcctcaatgagatcgagcgaaatctacaggacgccatgggcgtggcacgcaacgtcatattccacccgagactatcgcctggcggtggcgcaacagagatggccgtctctgtcaagttagggcagctggcgaggaacatcgagggcgtccagcagtggccatacaaggccgtggccgatgcgcttgaggtcattccgcgaaccttggtacagaatgccggcgcgagccccgtaagagtactgacggagcttcgcgccaagcactcggagggcaagagctcgtggggtattaacggagacacgggcacgattgtagacatgaagcagtacggcatctgggagccccaagcgatcaagctgcagagcatcaagactgccatcgaggctgcctgcctcctactaagagtggacgatatctgtagtgcgaagacggcacagcaggttggaggagctgggcttggtggaggagatgattga

SEQ ID NO: 7620 - protein, 540 aa, Muscodor strobelii
  misc_feature: SGI Peptide ID NO. 562307
  misc_feature (32)..(526): Pfam Id: PF00118 Pfam Desc: TCP-1/cpn60 chaperonin family
  misc_feature (1)..(540): NCBI GI: 39977509 Blast Desc: T-complex protein 1 [Magnaporthe grisea 70-15] gi|145013847|gb|EDJ98488.1| T-complex protein 1 [Magnaporthe grisea 70-15]
  misc_feature (1)..(540): NCBI GI: 171689386 Blast Desc: protein product [Podospora anserina] gi|170944655|emb|CAP70766.1| protein product [Podospora anserina]
  misc_feature (1)..(530): NCBI GI: 46123215 Blast Desc: FG05985.1 [Gibberella zeae PH-1]
  misc_feature (1)..(528): NCBI GI: 116199587 Blast Desc: T-complex protein 1 [Chaetomium globosum CBS 148.51] gi|88179228|gb|EAQ86696.1| T-complex protein 1 [Chaetomium globosum CBS 148.51]
  misc_feature (1)..(528): NCBI GI: 164428224 Blast Desc: T-complex protein 1 subunit gamma [Neurospora crassa OR74A] gi|28881229|emb|CAD70467.1| chaperonin of the TCP1 ring complex [Neurospora crassa] gi|157072061|gb|EAA27391.2| T-complex
  misc_feature (1)..(540): NCBI GI: 169763760 Blast Desc: [Aspergillus oryzae RIB40] gi|238489717|ref|XP_002376096.1| t-complex protein 1, gamma subunit (Cct3), [Aspergillus flavus NRRL3357] protein product 1,
  misc_feature (1)..(536): NCBI GI: 156053778 Blast Desc: T-complex protein 1, gamma subunit [Sclerotinia sclerotiorum 1980] gi|154703517|gb|EDO03256.1| T-complex protein 1, gamma subunit [Sclerotinia sclerotiorum 1980]
  misc_feature (1)..(540): NCBI GI: 70999193 Blast Desc: t-complex protein 1, gamma subunit (Cct3) [Aspergillus fumigatus Af293] gi|66851955|gb|EAL92280.1| t-complex protein 1, gamma subunit (Cct3), [Aspergillus fumigatus Af293] t-complex 1,
  misc_feature (1)..(540): NCBI GI: 225681962 Blast Desc: T-complex protein 1 subunit gamma [Paracoccidioides brasiliensis Pb03] gi|226289127|gb|EEH44639.1| T-complex protein 1 subunit gamma [Paracoccidioides brasiliensis Pb18]
  misc_feature (1)..(540): NCBI GI: 225555828 Blast Desc: T-complex protein [Ajellomyces capsulatus G186AR]
  misc_feature: Useful for introducing or modulating the production of volatile compounds
MQAPVVVMNTQSGERQTGRKAQLSNIAAAKIVADIIRSCLGPKAMLKMLLDPMGGIVLTNDGHAILREIEVSHPAAKSMIELSRTQDEEVGDGTTTVIILGGEILAQALPQLERNIHPVVIISAFKRALKDALEIIDDISLPIDIDDDEAMTSLISSSIGTKFVSRWSDLMCELALSAVRTVSWEIGNGKQEVDIKRYARVEKVPGGEIEDSRVLDGVMLNKDITHPKMRRRIENPRIVLLDCPLEYKKGESQTNIEISKEEDWNRILQIEEEQVKAMCEAIIALKPDLVITEKGVSDLAQHYFMKANITALRRVRKTDNNRIARATGATIVNRVDDLQESDVGTKCGLFEIEKIGDEYFTFLTKCKTPKACTILLRGPSKDILNEIERNLQDAMGVARNVIFHPRLSPGGGATEMAVSVKLGQLARNIEGVQQWPYKAVADALEVIPRTLVQNAGASPVRVLTELRAKHSEGKSSWGINGDTGTIVDMKQYGIWEPQAIKLQSIKTAIEAACLLLRVDDICSAKTAQQVGGAGLGGGDD

SEQ ID NO: 7621 - DNA, 3051 bp, Muscodor strobelii
  misc_feature: SGI EST ID NO. CUFF.19107.1
  misc_feature: Variant of the nucleotide sequence at SEQ ID NO 7619
tcaacatttacaactgatcacaacgtgaacgagacaccgccgtttgagacgtgtctgtttggctgcagatcccacaccaaagtaaccatcctcttcgcattctctagtcacacatagagcgccttcgtcgccggcaaggcttgttctcaagatgcaggcgccggttgtggttatgaacacccagagcggcgagagacagactggtagaaaagcccagctgtctaacatcgccgctgccaaaatcgtcgccgacatcatccgatcatgtctcggccccaaggccatgctgaagatgctgctcgaccccatgggcggcatcgtcctcaccaacgacggccatgctatcctgcgagagatcgaggtgtcccacccggctgccaagagcatgatcgagctcagccggacacaggacgaagaggtcggtgatgggactacaaccgtcatcattctaggtggcgagatcctcgctcaagccctaccccagctcgagcgcaacatccaccccgtcgtcatcatatccgccttcaagcgagctctgaaggacgcgctggagatcatcgacgacatctccctgcccatcgacatcgacgacgacgaggctatgactagcttaatatcctcctccatcggcaccaagttcgtctcgagatggtccgatctgatgtgcgagctggccctcagtgccgtgcgcaccgtgtcgtgggagattggtaatggcaagcaggaggtcgacatcaagagatacgcgcgtgtggaaaaagtgccaggcggcgagattgaagacagcagagtgctcgacggcgtcatgctcaacaaggacatcactcaccccaagatgcgcaggaggatcgagaacccccggatcgtgctgctggattgccctctagagtacaagaagggagagtcgcaaacaaacatcgagatctcgaaagaggaggactggaaccgcattctacagattgaagaggagcaggtcaaggccatgtgcgaggccatcattgcgttgaagcccgacttggtcatcaccgagaagggcgtctccgacctggcgcagcactacttcatgaaggccaacatcactgctctccgccgcgtccgcaagaccgacaacaacagaatcgctagagccacgggcgcgacgatcgtcaaccgggtggatgatctccaggagtcagacgttggcaccaagtgtgggctcttcgagattgagaagattggcgacgaatacttcaccttcctgaccaagtgcaagacccccaaggcctgcaccatccttcttcgtggcccatccaaggatatcctcaatgagatcgagcgaaatctacaggacgccatgggcgtggcacgcaacgtcatattccacccgagactatcgcctggcggtggcgcaacagagatggccgtctctgtcaagttagggcagctggcgaggaacatcgagggcgtccagcagtggccatacaaggccgtggccgatgcgcttgaggtcattccgcgaaccttggtacagaatgccggcgcgagccccgtaagagtactgacggagcttcgcgccaagcactcggagggcaagagctcgtggggtattaacggagacacgggcacgattgtagacatgaagcagtacggcatctgggagccccaagcgatcaagctgcagagcatcaagactgccatcgaggctgcctgcctcctactaagagtggacgatatctgtagtgcgaagacggcacagcaggttggaggagctgggcttggtggaggagatgattgagcgaacccgtgatggtgttggcataatgtgacgggctcggtttagaatatcccgactgaggacaataccccatgtaccgtggctaccaaaaagttcgacgagatagaagaattttagacggctcctctgccattccattatgactttgactgtgtaagtaagtctgcgaaaactgtctagtgtaaaatgaccgatctatctcattgtcggctcagtggcaggctatagccatctgtatggtaaggtggtaaaatcaaaagatgatggtacgccacagagtccatcccgggtccatcatcaatgcttgggtatctctattcatcctcgcctcgtttccctttctcttactcgccttgttaccaagcgacacctcagtcatcttcgatgacgatgcccttgggctcctccatcagctgatcactagcatcctgatcttcatctccaccatgttcagcatctctgactctcgtcaactcgatcctcggcttgctcgcggaagaagcaacgggacgagaggacttggcaccatcatctccatctccattcccgtctttagcgtctgcatttccattcttagcccgctccctagccctgcgcttcttatccctcttctcgcggttgcggcgcgtcttctcgtcgtccttgcgatcgcggttctctttattctgctcgaaggcggcggtcgcggtttctctggctacctcgtcgtccatgcggcgtaggcgctcgtattctcgtctgcgggaggctttgtagacgtggaattcgccggatccggcgccggcggaagagccttgcacgttggctacgatttctgggggtagggtcgtgcgtgtgttgccggacggggcttcggtccggatgtcttggtctggacgcgcgaatagggcgtcgaggtctttggcttgcgaggagaggggcgtgagggcgcgcttcttggttggacgcttggagcgcgggtctgcggaggtggggatgctttctgggccttcgccggacatgttggcggtggttgtgaggtgtgaggtgtgaagtgtgaggtgggtgagggttggggtgtttgtccttgcggtgttggcgcgcgagatggcgcttgtgtagttgtgtttcgctatttatggtgattgtcgagcgtcacgatctgcaagattgcgtacgcgatggagagagttggaaatgcgacgatgtatatgtatgcaaagcgcaaacagatggttggaaggattgaatttagaaacatccaacattgtaatgtatgcgatgaggctaggcggccg

SEQ ID NO: 7622 - DNA, 699 bp, Muscodor strobelii
  misc_feature: SGI cDNA ID NO. 562308
  misc_feature: Encodes the peptide sequence at SEQ ID NO 7623
atggggaagggaaaatatatcgacctcacgaacgatgacgatgacgatttcgacgagtccgtatcctgttcttcattcagcacgacaagtaccggaccgccgccaccaggtggcttgcaagcttacctcgaccaacagcgtgacttgctatcagatcaagagaaacattatatcgcaaaggaaggcacacagaatatatacgaggcccagtggagatttgactactatcgaaagcttgctaaggggcgagagagagagcagaatcttccccagatcccggagcgggacgtaacagatcttacgcaacacccaccaggcgcgaaaccgttctgggtgcaaaaagatggaacagtcatgaaaggcatcaagggcgtgtcgttttccgggtttatcctgcctaggcgaagtgcctgcattcggtctaccgattacgacaagccgtggcgtgaacggtcgacacccatggcaaatgctgagacagggaatctgaagcaggcaaacaacgcacaagatgctatggagctagatgctatggaggcgggtgctatggaggcggatgctatggaggtggatgctatggagatggatgctatggagatggatccaacgagcccaggtccaggcaagagacagatggccgagagcctgtgtggtgaagaaatgaatccgccggcgaagcgtttcaagtcagaagactga

SEQ ID NO: 7623 - protein, 232 aa, Muscodor strobelii
  misc_feature: SGI Peptide ID NO. 562308
MGKGKYIDLTNDDDDDFDESVSCSSFSTTSTGPPPPGGLQAYLDQQRDLLSDQEKHYIAKEGTQNIYEAQWRFDYYRKLAKGREREQNLPQIPERDVTDLTQHPPGAKPFWVQKDGTVMKGIKGVSFSGFILPRRSACIRSTDYDKPWRERSTPMANAETGNLKQANNAQDAMELDAMEAGAMEADAMEVDAMEMDAMEMDPTSPGPGKRQMAESLCGEEMNPPAKRFKSED

SEQ ID NO: 7624 - DNA, 2382 bp, Muscodor strobelii
  misc_feature: SGI cDNA ID NO. 562309
  misc_feature: Encodes the peptide sequence at SEQ ID NO 7625
atgaccccagaagagacgataacgatcgacagcattggcagagtccagcgagccggggcaggccaacgtaatcctcaggatcaagatgcctcattctgcctggaggagccgagcgaggaccagggttccgctttgaatatctggctgcgaacacaagaaccgcattctcattccatcatttcgagccactccaatgaccatattctactcggaagtgatgatcaagcatcgcagaaccaagggagtatagttgctagttcacgctctgtacagctcttagatcctgttgcctctgtaagcactgactgtcaacaaattgacttgaatgctcgagctcagaaaccgactgctgggacgtggccaagaaattcggacattatcactgacccgaagcattatcattccaattcgccgagtacagagtctcttgcactgcaacaagtaatcagccagatggaggacgtattttaccgaaatcgtgattacacccgagatccatcttctcgctatgcatcctccagatacaccacaggcccaaatagccaacaaactacaccacggggctcgcacctcagtctttcagatctaagagacaacacagggttatttctgccggttgcttctagtagggaaccatttcgtccgtatatcaacggtagcgagaagacagagactagctcatacaaaaccgctttaaacgatatctcgtcatcagcagacacaggagccggcgtttcggagacgaatctaccagtcgatggcactacctccgttaccgtatcacatacaacgagcttcgagcagcgggaggaagaattaaggtcggttgaaaagcgttttggttcagctccaatgcgaggtcatcccctagtccctgttcatagtaggttccatgaagaatttgatgattacaacaacgtcgacagcgtgtccagctcatttctatcgaaactgcattctgcattctcaaagaagtctacaataccagcctcgtatgtggggcaggggagaaaagctggcataccgcttgacagcagtaatattacgactactatgctaccaaatacccttacagcagtgtcgagctcagattcgccttcaaagcccatgccatcgatcactcctgaaagtatccgtatcgaggaagcctcctatgggcatcggcagcgtgcactagttctagatgcagaacaactgtcaggacgactcaaggcgaagttaagcaagatatcggttcgcagtcatgtagttgagtctaagactgccaaacggatgcctccagccatagtggacaatgatgtaggagggagccctcgatcgaaatcaatacaagatgatggtattgatccaatcgagcagtcaagcggacacagctctatgcattgtggccaagagagtaccccaagaatcacgattgaagaccctgatgacatacacgcttgtgttctgcaagaatgggtagaacaactccaggatgacgatgtacgccgtaatacacagtcaagaataaccaccccgaaactgcgactccgaagattgcgaacccctccagcatcgtgggccaagtggccttcagagacgagagcggccaggacaggctcagctggagagagcgatcttgtgatggcgagagacttcgcagaagtttcaagtctgccacgaaaggataagatagagaagcaatcaacagataagaagtccctccaatcatcacgagctttatcagatcaaattggcaaagccctgaagtccagatgggacaagataatgatgcacaagagtactgcagagcgtcctttagatccagcgccgccgtcacccacaggtcttggttctcgagaactccttgaatatcctgaatttgaacttcttccgacgggaacaagtgctttcaaggaagtgcaggccctggagaaacagattgacgtcatcaaacgtcgctctttttccctagtacccagtacacgattcagctctgattatcagagaaactcgtttgtcgatgccatgaatacagctcttccattgacaccaagaacaccattgggaagtttccttaatactccccaatcccacacttcgtatgaggattgtgtacaaactcaaatcctcgaggatgacggcgtgacgaatactgccgtggcccatgctcaaagcgccaagatgcagcgagctctttcgactggcaatattcataccaaaacaccaaccaatccaacctcggcaagtatcgaaatgcacaaggatcctacctacttatccgtagattggaaggcagatatacgacgaccccagagtgctggaggctcccaccgtacagtccattttagaagttctagtcttggcggcagcagccgagcaagtgaaatgcagacatcttaa

SEQ ID NO: 7625 - protein, 793 aa, Muscodor strobelii
  misc_feature: SGI Peptide ID NO. 562309
  misc_feature (260)..(638): NCBI GI: 261356776 Blast Desc: conserved [Verticillium albo-atrum VaMs.102]
  misc_feature (191)..(645): NCBI GI: 145606012 Blast Desc: MGG_11868 [Magnaporthe grisea 70-15] gi|145013751|gb|EDJ98392.1| MGG_11868 [Magnaporthe grisea 70-15]
  misc_feature (513)..(694): NCBI GI: 46138619 Blast Desc: FG10824.1 [Gibberella zeae PH-1]
  misc_feature (495)..(646): NCBI GI: 85082108 Blast Desc: NCU03403 [Neurospora crassa OR74A] gi|28917929|gb|EAA27614.1| [Neurospora crassa OR74A]
  misc_feature (495)..(646): NCBI GI: 18376375 Blast Desc: conserved [Neurospora crassa]
MTPEETITIDSIGRVQRAGAGQRNPQDQDASFCLEEPSEDQGSALNIWLRTQEPHSHSIISSHSNDHILLGSDDQASQNQGSIVASSRSVQLLDPVASVSTDCQQIDLNARAQKPTAGTWPRNSDIITDPKHYHSNSPSTESLALQQVISQMEDVFYRNRDYTRDPSSRYASSRYTTGPNSQQTTPRGSHLSLSDLRDNTGLFLPVASSREPFRPYINGSEKTETSSYKTALNDISSSADTGAGVSETNLPVDGTTSVTVSHTTSFEQREEELRSVEKRFGSAPMRGHPLVPVHSRFHEEFDDYNNVDSVSSSFLSKLHSAFSKKSTIPASYVGQGRKAGIPLDSSNITTTMLPNTLTAVSSSDSPSKPMPSITPESIRIEEASYGHRQRALVLDAEQLSGRLKAKLSKISVRSHVVESKTAKRMPPAIVDNDVGGSPRSKSIQDDGIDPIEQSSGHSSMHCGQESTPRITIEDPDDIHACVLQEWVEQLQDDDVRRNTQSRITTPKLRLRRLRTPPASWAKWPSETRAARTGSAGESDLVMARDFAEVSSLPRKDKIEKQSTDKKSLQSSRALSDQIGKALKSRWDKIMMHKSTAERPLDPAPPSPTGLGSRELLEYPEFELLPTGTSAFKEVQALEKQIDVIKRRSFSLVPSTRFSSDYQRNSFVDAMNTALPLTPRTPLGSFLNTPQSHTSYEDCVQTQILEDDGVTNTAVAHAQSAKMQRALSTGNIHTKTPTNPTSASIEMHKDPTYLSVDWKADIRRPQSAGGSHRTVHFRSSSLGGSSRASEMQTS

SEQ ID NO: 7626 - DNA, 2301 bp, Muscodor strobelii
  misc_feature: SGI cDNA ID NO. 562310
  misc_feature: Encodes the peptide sequence at SEQ ID NO 7627
atggttcagtccgccattctcggtttcccccgcatgggtgtgaaccgtgacctgaagaaggctaccgaggcttactggggcggcaagatctcccaggccgacctcctcgccgaggccaagcgcctccgtctcgcccactggaagatccagaaggatgccggtgtcgacatcatcccctccaacgactttgccctctacgaccaggtcctcacacacatccaggacttcggcgccgtccccgagcgctactccaacgccggcctcgaccgcatcgatgagtactttgccatgggccgtggccaccagaagggcggtgtcgacgtcccctcgttggaaatggtgaagtggttcgactccaactaccactacgtcaagcccaccctgcaggacaaccagaccttcaccctcacctccagccccaaggccgtcaacgagttcctcgaggccaaggaggccggcatcaccacccgccccgtcctcgtcggccccgtctctttcctccacctcggcaaggccgaccgtggccagagcgtagaccccatcgacctcctcgagaagcttctgcccgtctacgagcagctgctcaccaagctcaaggaggctggcgccgagactgtccagatcgacgagcccatcctcgtcttcgatctccctgccaagtccaaggctgccttcaagcccacctacgagaagttcgccagcctcggcgacaagattcccaagcttgtcttctccacctacttcggtgacatcgtccacaaccttgaggctctgcccaaggacatctatgccgtccacgtcgacctcgtccgcaaccccgagcagctggacaccgttgccggcgctctcggctccaagaccatcctgtccgccggtgtcgtcgatggccgcaacatctggaagaccaacttcaagcgcgccatcgagactgtcgagagtgccatccagaaggtcggcaaggaccgtgtcattgttgccacctccagctctctcctccacaccccccacacccttgccagcgagaagaagctcgactccgagattgccgactggttctccttcgcctctgagaaggctgttgaggttgccatcatcgctaaggctgttactgagggccccgctgccgtcaaggctgagcttgaggccaacgccgcgtccgtgcacgctcgtgctacctccaagcgcaccaacaacgctgccgtcaaggacaggcagtccaagatccagaagtcagactacagccgcaagtctgagttcgcccagagaatttctcagcagcaggataagctcaagcttcctctgttccccaccaccaccattggctctttcccccagaccaaggagatccgtgtctcccgtcagaagctcaccaagagtgagatcactgaggctcaatatgacaagttcatcgagcaggagattgacatgaacgtcaagatccaggacgagctcgacattgatgtgtacgtccacggtgagcctgagcgaaacgacatggttcagtacttcggtgagcgtctggatggttatgccttcaccacccacgcctgggtccagagttacggttcccgctgcgtccgacctcctatcatcgtcggtgatatctctcgccccgctcccatgaccgtcaaggagtccaagtatgccgtatcagtctccaagaagcccatgaagggtatgttgacaggtcccgtcacctgcttgcgctggtctttccctcgtgatgatatccaccagtccgtacaggcagagcagctcgctctcgccctccgtgacgaggtcgtagatctcgagaaggctggcgtcgacgtcatccaggtcgacgagcctgctctccgtgaaggtctgcccctgcgatccggcaaggaacgtgaggcttaccttgactgggccgtcaaggctttcagactctcgaccgtcggcgttgaggactcaactcagatccactctcacttctgctactctgagttccaggacttcttccatgccatcgccgccttggacgccgatgtgctgtccattgagaacagcaagtctgactccaagctactcggtgtcttcgtcgaggaggcttacccccgtcacatcggccctggtgtctacgacattcactcccctcgtgttcccagcgagcaggagatcaaggaccgcatcgaggagatgcttcagtacctcaagcctgagcagctctggatcaaccccgactgtggtctcaagacccgccagtgggccgagaccaaggaggctcttgtcaacatggtcaatgctgccaagtacttccgtaccaagtacgccaaatag

SEQ ID NO: 7627 - protein, 766 aa, Muscodor strobelii
  misc_feature: SGI Peptide ID NO. 562310
  misc_feature (3)..(319): Pfam Id: PF08267 Pfam Desc: Cobalamin-independent synthase, N-terminal domain
  misc_feature (435)..(759): Pfam Id: PF01717 Pfam Desc: Cobalamin-independent synthase, Catalytic domain
  misc_feature (1)..(766): NCBI GI: 39977655 Blast Desc: MGG_06712 [Magnaporthe grisea 70-15] gi|145013770|gb|EDJ98411.1| MGG_06712 [Magnaporthe grisea 70-15]
  misc_feature (1)..(766): NCBI GI: 154297791 Blast Desc: BC1G_12307 [Botryotinia fuckeliana B05.10] gi|150858436|gb|EDN33628.1| BC1G_12307 [Botryotinia fuckeliana B05.10]
  misc_feature (1)..(766): NCBI GI: 156043831 Blast Desc: SS1G_10919 [Sclerotinia sclerotiorum 1980] gi|154695306|gb|EDN95044.1| SS1G_10919 [Sclerotinia sclerotiorum 1980]
  misc_feature (1)..(766): NCBI GI: 46138621 Blast Desc: FG10825.1 [Gibberella zeae PH-1]
  misc_feature (1)..(766): NCBI GI: 225560553 Blast Desc: cobalamin-independent methionine synthase MetH/D [Ajellomyces capsulatus G186AR]
  misc_feature (1)..(766): NCBI GI: 261206394 Blast Desc: 5-methyltetrahydropteroyltriglutamate-homocysteine methyltransferase [Ajellomyces dermatitidis SLH14081] gi|239592993|gb|EEQ75574.1| methyltransferase [Ajellomyces ER-3]
  misc_feature (1)..(766): NCBI GI: 226287890 Blast Desc: Cobalamin-independent synthase [Paracoccidioides brasiliensis Pb18]
  misc_feature (1)..(766): NCBI GI: 119188029 Blast Desc: CIMG_04062 [Coccidioides immitis RS]
  misc_feature (1)..(766): NCBI GI: 115398117 Blast Desc: ATEG_05472 [Aspergillus terreus NIH2624] gi|114192841|gb|EAU34541.1| ATEG_05472 [Aspergillus terreus NIH2624]
  misc_feature (1)..(766): NCBI GI: 169773743 Blast Desc: [Aspergillus oryzae RIB40] gi|238491758|ref|XP_002377116.1| cobalamin-independent methionine synthase MetH/D [Aspergillus flavus NRRL3357] protein product
  misc_feature (1)..(765): SWISSPROT Homolog: EC 2.1.1.14 5-methyltetrahydropteroyltriglutamate--homocysteine S-methyltransferase
MVQSAILGFPRMGVNRDLKKATEAYWGGKISQADLLAEAKRLRLAHWKIQKDAGVDIIPSNDFALYDQVLTHIQDFGAVPERYSNAGLDRIDEYFAMGRGHQKGGVDVPSLEMVKWFDSNYHYVKPTLQDNQTFTLTSSPKAVNEFLEAKEAGITTRPVLVGPVSFLHLGKADRGQSVDPIDLLEKLLPVYEQLLTKLKEAGAETVQIDEPILVFDLPAKSKAAFKPTYEKFASLGDKIPKLVFSTYFGDIVHNLEALPKDIYAVHVDLVRNPEQLDTVAGALGSKTILSAGVVDGRNIWKTNFKRAIETVESAIQKVGKDRVIVATSSSLLHTPHTLASEKKLDSEIADWFSFASEKAVEVAIIAKAVTEGPAAVKAELEANAASVHARATSKRTNNAAVKDRQSKIQKSDYSRKSEFAQRISQQQDKLKLPLFPTTTIGSFPQTKEIRVSRQKLTKSEITEAQYDKFIEQEIDMNVKIQDELDIDVYVHGEPERNDMVQYFGERLDGYAFTTHAWVQSYGSRCVRPPIIVGDISRPAPMTVKESKYAVSVSKKPMKGMLTGPVTCLRWSFPRDDIHQSVQAEQLALALRDEVVDLEKAGVDVIQVDEPALREGLPLRSGKEREAYLDWAVKAFRLSTVGVEDSTQIHSHFCYSEFQDFFHAIAALDADVLSIENSKSDSKLLGVFVEEAYPRHIGPGVYDIHSPRVPSEQEIKDRIEEMLQYLKPEQLWINPDCGLKTRQWAETKEALVNMVNAAKYFRTKYAK

SEQ ID NO: 7628 - DNA, 3003 bp, Muscodor strobelii
  misc_feature: SGI EST ID NO. CUFF.19029.0
  misc_feature: Variant of the nucleotide sequence at SEQ ID NO 7626
tcatatttgagtgcccctcctctcactgtctgaggtttttctttcctctcttcccatcctcatcctctcccatcctagactctcttctacaatctctactcaattggtgttgtctgtgccacagcgcctttgtccaaacgtctctataactgggttgagatttggaagtagaagtttgtttcagtcaaaagttttatatcacatatcccagaccacagccaagatggttcagtccgccattctcggtttcccccgcatgggtgtgaaccgtgacctgaagaaggctaccgaggcttactggggcggcaagatctcccaggccgacctcctcgccgaggccaagcgcctccgtctcgcccactggaagatccagaaggatgccggtgtcgacatcatcccctccaacgactttgccctctacgaccaggtcctcacacacatccaggacttcggcgccgtccccgagcgctactccaacgccggcctcgaccgcatcgatgagtactttgccatgggccgtggccaccagaagggcggtgtcgacgtcccctcgttggaaatggtgaagtggttcgactccaactaccactacgtcaagcccaccctgcaggacaaccagaccttcaccctcacctccagccccaaggccgtcaacgagttcctcgaggccaaggaggccggcatcaccacccgccccgtcctcgtcggccccgtctctttcctccacctcggcaaggccgaccgtggccagagcgtagaccccatcgacctcctcgagaagcttctgcccgtctacgagcagctgctcaccaagctcaaggaggctggcgccgagactgtccagatcgacgagcccatcctcgtcttcgatctccctgccaagtccaaggctgccttcaagcccacctacgagaagttcgccagcctcggcgacaagattcccaagcttgtcttctccacctacttcggtgacatcgtccacaaccttgaggctctgcccaaggacatctatgccgtccacgtcgacctcgtccgcaaccccgagcagctggacaccgttgccggcgctctcggctccaagaccatcctgtccgccggtgtcgtcgatggccgcaacatctggaagaccaacttcaagcgcgccatcgagactgtcgagagtgccatccagaaggtcggcaaggaccgtgtcattgttgccacctccagctctctcctccacaccccccacacccttgccagcgagaagaagctcgactccgagattgccgactggttctccttcgcctctgagaaggctgttgaggttgccatcatcgctaaggctgttactgagggccccgctgccgtcaaggctgagcttgaggccaacgccgcgtccgtgcacgctcgtgctacctccaagcgcaccaacaacgctgccgtcaaggacaggcagtccaagatccagaagtcagactacagccgcaagtctgagttcgcccagagaatttctcagcagcaggataagctcaagcttcctctgttccccaccaccaccattggctctttcccccagaccaaggagatccgtgtctcccgtcagaagctcaccaagagtgagatcactgaggctcaatatgacaagttcatcgagcaggagattgacatgaacgtcaagatccaggacgagctcgacattgatgtgtacgtccacggtgagcctgagcgaaacgacatggttcagtacttcggtgagcgtctggatggttatgccttcaccacccacgcctgggtccagagttacggttcccgctgcgtccgacctcctatcatcgtcggtgatatctctcgccccgctcccatgaccgtcaaggagtccaagtatgccgtatcagtctccaagaagcccatgaagggtatgttgacaggtcccgtcacctgcttgcgctggtctttccctcgtgatgatatccaccagtccgtacaggcagagcagctcgctctcgccctccgtgacgaggtcgtagatctcgagaaggctggcgtcgacgtcatccaggtcgacgagcctgctctccgtgaaggtctgcccctgcgatccggcaaggaacgtgaggcttaccttgactgggccgtcaaggctttcagactctcgaccgtcggcgttgaggactcaactcagatccactctcacttctgctactctgagttccaggacttcttccatgccatcgccgccttggacgccgatgtgctgtccattgagaacagcaagtctgactccaagctactcggtgtcttcgtcgaggaggcttacccccgtcacatcggccctggtgtctacgacattcactcccctcgtgttcccagcgagcaggagatcaaggaccgcatcgaggagatgcttcagtacctcaagcctgagcagctctggatcaaccccgactgtggtctcaagacccgccagtgggccgagaccaaggaggctcttgtcaacatggtcaatgctgccaagtacttccgtaccaagtacgccaaatagacggtgtcttgaaatgatgtcatgccaatgagttttttattttgtcgtgtttttagcatatttgccctatttcaacaccggcgttctatagggcatgggtcttgaggaaactgtcatataccaaaaaagttatacaggccagataggcaggcggggatacggagcattcaacacagcatttaaagcggaaagggaaacatgataccacgccgatcaaccggctgggtggatggcgttaatggaattattccgagaaggcttgtggccttcatgtagtagtagtagttctggtcaacagcaggttgaccattgtcgagaagcccttcaactgggcgcgagataaacaaaaataataccagttcaggctccaggttgctgcctgggtgttcaacatatatgttccaggtttgccgtgcatgtatatgatgtaaggtagaatctgagagttaatttcattttgtaagaaaaagagctgtggc

SEQ ID NO: 7629 - DNA, 1128 bp, Muscodor strobelii
  misc_feature: SGI cDNA ID NO. 562311
  misc_feature: Reduced expression when VOC is produced
  misc_feature: Encodes the peptide sequence at SEQ ID NO 7630
atgaagtccactactgttgcattcggcctgttcgctggccttgcttctgcatacaaccaccaccccaggcatttccacggtccttacgtgaagcgaaacgaaaccactgccgctcctggtgcccagactactttgactgttggcattaccagcatccataccatcacatcctgcgctgcctcaatcactgactgccccgctaactcgggcagcccggtaactgttaccgaggtcattgatctgaccacaactgtctgccccgtgaccgctgcggaatctgtctcaagctctgttgtcggcgcccacagcagtggttatattactggcactacccgtacagttacgagcactgacagcgtcccgacgcagaccgcagctcctagctccaccattgctagttcctcgaacgctgctgaatccagtgaagccgcctctgttcccgccactggtgcctcaacctccattgtagtgggagcccaaaccactggaaccacgaccgagactatcacatacacaacccttcactccaccttcactgaaattgtcactttcaccgcgtatcctaccggtggctctggctccggctccggctccggttctggttctggttctgatattaccagcaccgatgctaccacgtacactactctcacaaccaccagcacccgtacagtcaccgttcccggctcatccgtctccgaggctgctgtgactcctactggaggatctggctcaggttctggctcgggtggctcgggtgaatgtgttcccgtcactgtcaccgtaacggagtctgctcctgcaagcaccgtttatgtgaccgttggtaacagcggagatgctacttcaagcagtattgcggctgaggctgtccctactagcagttccacgattactggaggcagtacctatcccactagcggatccggatcatcgggctccggttcggacggctctggaagctccggaagcggcgacagcggtgacgatgatgaatgccctcctgagtcatctggcgatgttactatcacccagactgccaccgttgcaccctatcccacccccagcaacggcacctacccaactggcacaggcatcccgctccgtcgctctcacccgctctactag

SEQ ID NO: 7630 - protein, 375 aa, Muscodor strobelii
  misc_feature: SGI Peptide ID NO. 562311
  misc_feature (21)..(102): NCBI GI: 154297761 Blast Desc: BC1G_12292 [Botryotinia fuckeliana B05.10] gi|150858421|gb|EDN33613.1| BC1G_12292 [Botryotinia fuckeliana B05.10]
  misc_feature (1)..(288): NCBI GI: 256729168 Blast Desc: NECHADRAFT_60862 [Nectria haematococca mpVI 77-13-4]
  misc_feature (1)..(98): NCBI GI: 145606024 Blast Desc: MGG_11870 [Magnaporthe grisea 70-15] gi|145013771|gb|EDJ98412.1| MGG_11870 [Magnaporthe grisea 70-15]
  misc_feature (1)..(117): NCBI GI: 116204599 Blast Desc: CHGG_10183 [Chaetomium globosum CBS 148.51] gi|88176311|gb|EAQ83779.1| CHGG_10183 [Chaetomium globosum CBS 148.51]
  misc_feature (1)..(106): NCBI GI: 85083738 Blast Desc: NCU01752 [Neurospora crassa OR74A] gi|7800887|emb|CAB91245.1| related to lustrin A [Neurospora crassa] gi|28918262|gb|EAA27939.1| [Neurospora crassa OR74A]
  misc_feature (1)..(113): NCBI GI: 171689216 Blast Desc: protein product [Podospora anserina] gi|170944570|emb|CAP70681.1| protein product [Podospora anserina]
  misc_feature (39)..(346): NCBI GI: 116204599 Blast Desc: CHGG_10183 [Chaetomium globosum CBS 148.51] gi|88176311|gb|EAQ83779.1| CHGG_10183 [Chaetomium globosum CBS 148.51]
  misc_feature (37)..(114): NCBI GI: 85083738 Blast Desc: NCU01752 [Neurospora crassa OR74A] gi|7800887|emb|CAB91245.1| related to lustrin A [Neurospora crassa] gi|28918262|gb|EAA27939.1| [Neurospora crassa OR74A]
  misc_feature (39)..(124): NCBI GI: 119490989 Blast Desc: extracellular serine-threonine rich protein [Neosartorya fischeri NRRL 181] gi|119411315|gb|EAW21258.1| extracellular serine-threonine rich protein [Neosartorya fischeri
  misc_feature (39)..(88): NCBI GI: 255937591 Blast Desc: Pc13g14140 [Penicillium chrysogenum Wisconsin 54-1255] gi|211584442|emb|CAP92483.1| Pc13g14140 [Penicillium chrysogenum Wisconsin 54-1255]
  misc_feature: Useful for introducing or modulating the production of volatile compounds
MKSTTVAFGLFAGLASAYNHHPRHFHGPYVKRNETTAAPGAQTTLTVGITSIHTITSCAASITDCPANSGSPVTVTEVIDLTTTVCPVTAAESVSSSVVGAHSSGYITGTTRTVTSTDSVPTQTAAPSSTIASSSNAAESSEAASVPATGASTSIVVGAQTTGTTTETITYTTLHSTFTEIVTFTAYPTGGSGSGSGSGSGSGSDITSTDATTYTTLTTTSTRTVTVPGSSVSEAAVTPTGGSGSGSGSGGSGECVPVTVTVTESAPASTVYVTVGNSGDATSSSIAAEAVPTSSSTITGGSTYPTSGSGSSGSGSDGSGSSGSGDSGDDDECPPESSGDVTITQTATVAPYPTPSNGTYPTGTGIPLRRSHPLY

SEQ ID NO: 7631 - DNA, 1994 bp, Muscodor strobelii
  misc_feature: SGI EST ID NO. CUFF.19008.0
  misc_feature: Variant of the nucleotide sequence at SEQ ID NO 7629
ggggacctctcgcttgcatgtaagttagatgtaggagtaaaaaggctcacccgccagtttggagataccctctcttttccttttctctctaccctttgcgtgtctgcttgctttgagtccatctcgagtctctcttttttcacactcacttcgacgttgttcgtcctttacattcattcttgcatagccagctgtgcccgtttcttcgcacatttcatacacttcgacaaccttagcaactgtgtctgctcagcccttgcggaatcgactttcgctcactcaaaacatttgcacttgcaattgtccactcattcgacgaccttcgaagttacattcacttaacgagaccagacagacttgaaagtccaaagacaagccatatcaaagatcaaggagtagcaactactgagtccaagtaaacgatcagtgtcatcaaatatcaaatatcaaaatgaagtccactactgttgcattcggcctgttcgctggccttgcttctgcatacaaccaccaccccaggcatttccacggtccttacgtgaagcgaaacgaaaccactgccgctcctggtgcccagactactttgactgttggcattaccagcatccataccatcacatcctgcgctgcctcaatcactgactgccccgctaactcgggcagcccggtaactgttaccgaggtcattgatctgaccacaactgtctgccccgtgaccgctgcggaatctgtctcaagctctgttgtcggcgcccacagcagtggttatattactggcactacccgtacagttacgagcactgacagcgtcccgacgcagaccgcagctcctagctccaccattgctagttcctcgaacgctgctgaatccagtgaagccgcctctgttcccgccactggtgcctcaacctccattgtagtgggagcccaaaccactggaaccacgaccgagactatcacatacacaacccttcactccaccttcactgaaattgtcactttcaccgcgtatcctaccggtggctctggctccggctccggctccggttctggttctggttctgatattaccagcaccgatgctaccacgtacactactctcacaaccaccagcacccgtacagtcaccgttcccggctcatccgtctccgaggctgctgtgactcctactggaggatctggctcaggttctggctcgggtggctcgggtgaatgtgttcccgtcactgtcaccgtaacggagtctgctcctgcaagcaccgtttatgtgaccgttggtaacagcggagatgctacttcaagcagtattgcggctgaggctgtccctactagcagttccacgattactggaggcagtacctatcccactagcggatccggatcatcgggctccggttcggacggctctggaagctccggaagcggcgacagcggtgacgatgatgaatgccctcctgagtcatctggcgatgttactatcacccagactgccaccgttgcaccctatcccacccccagcaacggcacctacccaactggcacaggcatcccgctccgtcgctctcacccgctctactagacgtcttggaaattatcagtggtagatggataaggacaggagaatgatgtggcttggcattttggattcatcattgtacaatatccaggcccccaattttgacacgctggatgcggcagtcagattcacgaccatgaaaattatggagcgatcacaggagttgcggtagaacacctgggtgatgtacttacattcaattcttgtatgtggattacaacaaatcttgaacagaccttttgatatcttgcaagtgtacgctcaaaagctgctgtgtgtttgatcgctggtgtgacatgtgtcttatatggtaatgcggagtgagatcacgaaataacgttcgagaatgtctgagcccaataattcagtggaatagaaactgttcagtcgctgtacccaaatccgtgcgatgagtgtg

SEQ ID NO: 7632 - DNA, 489 bp, Muscodor strobelii
  misc_feature: SGI cDNA ID NO. 562313
  misc_feature: Encodes the peptide sequence at SEQ ID NO 7633
atgccagcccaagtcatcaacgccccgtcacaggacaccgtgatccagaagaaatccgtgttcctagcaggcacaaccacccctgggggcgatgcagactggcgcgagacgctgtctgcctcactcgccaaatactcaatcacgatcttcaaccctaaccggccggactgggatagcacctggcgggaggacatcaattttgatccctaccgcgagcaagtcgaatgggagcttgagaagcagacggcggccgacctagttgtcgtctatttcggcccggaaacactggcgccaatcagcttactcgaatttggactgtctgctcagaccccaggcaaagtcatcgccattgcgcctgaaggctacaagaagaggggcaacgttcagatagtctgtcgcaagttcaatatcaagtttcttgacagtatcgacaaactccatgaggctatattggaaaagcttaagccgcttgaaatggagaccacataa

SEQ ID NO: 7633 - protein, 162 aa, Muscodor strobelii
  misc_feature: SGI Peptide ID NO. 562313
  misc_feature (3)..(154): NCBI GI: 119470981 Blast Desc: NFIA_055580 [Neosartorya fischeri NRRL 181] gi|119406258|gb|EAW16209.1| conserved [Neosartorya fischeri NRRL 181]
  misc_feature (3)..(154): NCBI GI: 149210557 Blast Desc: MGCH7_ch7g753 [Magnaporthe grisea 70-15] gi|86196708|gb|EAQ71346.1| MGCH7_ch7g753 [Magnaporthe grisea 70-15]
  misc_feature (4)..(154): NCBI GI: 255945721 Blast Desc: Pc20g11420 [Penicillium chrysogenum Wisconsin 54-1255] gi|211588363|emb|CAP86471.1| Pc20g11420 [Penicillium chrysogenum Wisconsin 54-1255]
  misc_feature (4)..(154): NCBI GI: 70992051 Blast Desc: AFUA_6G09860 [Aspergillus fumigatus Af293] gi|66848507|gb|EAL88836.1| AFUA_6G09860 [Aspergillus fumigatus Af293] gi|159124443|gb|EDP49561.1| AFUB_075910 [Aspergillus
  misc_feature (3)..(157): NCBI GI: 171682890 Blast Desc: protein product [Podospora anserina] gi|170941404|emb|CAP67055.1| protein product [Podospora anserina]
  misc_feature (3)..(131): NCBI GI: 145609804 Blast Desc: MGG_02975 [Magnaporthe grisea 70-15] gi|145017192|gb|EDK01555.1| MGG_02975 [Magnaporthe grisea 70-15]
  misc_feature (19)..(132): NCBI GI: 115385118 Blast Desc: conserved [Aspergillus terreus NIH2624] gi|114196798|gb|EAU38498.1| conserved [Aspergillus terreus NIH2624]
  misc_feature (2)..(158): NCBI GI: 85096121 Blast Desc: NCU05641 [Neurospora crassa OR74A] gi|28921684|gb|EAA30966.1| conserved [Neurospora crassa OR74A]
  misc_feature (8)..(154): NCBI GI: 256724994 Blast Desc: NECHADRAFT_91470 [Nectria haematococca mpVI 77-13-4]
  misc_feature (16)..(159): NCBI GI: 46110631 Blast Desc: FG02197.1 [Gibberella zeae PH-1]
MPAQVINAPSQDTVIQKKSVFLAGTTTPGGDADWRETLSASLAKYSITIFNPNRPDWDSTWREDINFDPYREQVEWELEKQTAADLVVVYFGPETLAPISLLEFGLSAQTPGKVIAIAPEGYKKRGNVQIVCRKFNIKFLDSIDKLHEAILEKLKPLEMETT

SEQ ID NO: 7634 - DNA, 1073 bp, Muscodor strobelii
  misc_feature: SGI EST ID NO. CUFF.18999.0
  misc_feature: Variant of the nucleotide sequence at SEQ ID NO 7632
tgttcatatggtcacaagatcatactccaaaatcccataccaagatcactcaggctgccgatgggagctgaagatggaagcgaccacatacagagagccccgctcaccacagatgctcttcacttacttaagctttgctcatcccttctacgaaagctagcatagtccttcaccagtctcaaatatctcatattacgatccaaacccttcttaacccaaaggattctgagaattctacccgtgcggcattacgcctccagccacagtcagatcatgccagcccaagtcatcaacgccccgtcacaggacaccgtgatccagaagaaatccgtgttcctagcaggcacaaccacccctgggggcgatgcagactggcgcgagacgctgtctgcctcactcgccaaatactcaatcacgatcttcaaccctaaccggccggactgggatagcacctggcgggaggacatcaattttgatccctaccgcgagcaagtcgaatgggagcttgagaagcagacggcggccgacctagttgtcgtctatttcggcccggaaacactggcgccaatcagcttactcgaatttggactgtctgctcagaccccaggcaaagtcatcgccattgcgcctgaaggctacaagaagaggggcaacgttcagatagtctgtcgcaagttcaatatcaagtttcttgacagtatcgacaaactccatgaggctatattggaaaagcttaagccgcttgaaatggagaccacataaatagaatgcgtcactttgatgtggcatatcttagttttatgacggttttctagaggactgcagtcgcactgaccacaattatcgtaagctcgctaagagactgtgattgaggtgtttggttacaagagttaggcgggagatgggatgatatcgaaatacagtagccatgagttctgagagtcacgagagtaaatcgaatcgtgtataccgccttttcactcaacctccactagtaaggagctcaaatccactctgaatagctgattaacgacgaagaacataatgtagatactctgattgcccaatagaaa

SEQ ID NO: 7635 - DNA, 1503 bp, Muscodor strobelii
  misc_feature: SGI cDNA ID NO. 562314
  misc_feature: Encodes the peptide sequence at SEQ ID NO 7636
atgactgatagctcacaacaaaagaagcgtggtcggcctgctcgtaccactgctcctacgaaacaagagcctaagtcgagtcaagcgcagtctcaaacacgaagacggggtcgttcatccgccatacatccagaaatcgctggcgatgctgatgccaagaataaaagcagaccaaggaagcagacagatgtgatcgaggaaccagcagaggaggctgaagaagcagatgacgagaatgagcaaaactctagcctcctcagacggagtcgtcgccatcaagcaccgagaggtcaaatttctaatgatacagggggtaccgctccacggcaaccggttcatcaagcgtctgtcctccaacgaagtggaaaggcgggtatgaagcaatcggaacttgtccccactcacgagcatgaagaccaagttgaagatgagacttcctctcaccatcaagcgaaaaagaggagaggacgcccgtttctgaaagatcaccaacaacatcaagcggacgatgccgctaaggatagtgcggctttctccgggccgtcgcatgacaattctgcgccaaaacaagcaagccggcaatcgaagcaggggcggtcttctcaagggcacgaagaagcgacgagaagacgggaaccaaaaggcagaaaacgtcgctcagacgggtccacaaagtccgctagaaaagagcagtcaccagaggaacaggatcagtcacgggataactcatctaccagcgaatcggactcgcctccaccgtacagatatatagcgaagcgcacacgccgcatacctcgttctgttatcgagtccaaatggtcacctctcgatcagtctggtgttagcaatatcgccaatattttgactgcggcgtcacgacccgttttgctccatgtgagcaatcgcaagcaataccagcatgcggagcacgctctcgaacatgctgcgaaaagtcttagcagaaggtcaagcaagcttccatttccaccagcttcgactctaccccgccgggaggatgagcttgactacgagcggacacagtccgctgttgaagcgcttcgctcccagctcgatcctcttcaacacagcgtcgaacttctcaagtacgagaagaagcgagcagagaaggagctagaacaggagtataaggctctccagcagctcagcaccaatgcgcgttccgaggccagagaaaaaagagatcaactaaggaaaatgcatgttctcgtgcccgagaagaactccaatgtgacaggagaatatattgttagagttgatgtagcaccgtcggaagactttctcggcggggcatttgccgacttgcaagacgatgaattagtaggactcgccggccaaattagcaatcatatggagagtatgcatggaaatctggatcaaattgatggcgtgctacccgctatcgcgagaagcgatgctctgttgaaagctacactgcaaggcattctcgaccaagacaagttcgagaatggggtgttaggctaa

SEQ ID NO: 7636 - protein, 500 aa, Muscodor strobelii
  misc_feature: SGI Peptide ID NO. 562314
  misc_feature (153)..(500): NCBI GI: 39977657 Blast Desc: MGG_06713 [Magnaporthe grisea 70-15] gi|145013769|gb|EDJ98410.1| MGG_06713 [Magnaporthe grisea 70-15]
  misc_feature (253)..(500): NCBI GI: 171689588 Blast Desc: protein product [Podospora anserina] gi|170944756|emb|CAP70867.1| protein product [Podospora anserina]
  misc_feature (254)..(500): NCBI GI: 85110788 Blast Desc: NCU06791 [Neurospora crassa OR74A] gi|18376000|emb|CAB91734.2| [Neurospora crassa] gi|28925318|gb|EAA34396.1| [Neurospora crassa OR74A]
  misc_feature (196)..(500): NCBI GI: 256728958 Blast Desc: NECHADRAFT_40195 [Nectria haematococca mpVI 77-13-4]
  misc_feature (242)..(500): NCBI GI: 46138495 Blast Desc: FG10762.1 [Gibberella zeae PH-1]
  misc_feature (223)..(500): NCBI GI: 156030812 Blast Desc: SS1G_14345 [Sclerotinia sclerotiorum 1980] gi|154700736|gb|EDO00475.1| SS1G_14345 [Sclerotinia sclerotiorum 1980]
  misc_feature (217)..(481): NCBI GI: 238841783 Blast Desc: conserved [Microsporum canis CBS 113480]
  misc_feature (254)..(500): NCBI GI: 261356777 Blast Desc: [Verticillium albo-atrum VaMs.102]
  misc_feature (213)..(481): NCBI GI: 261195352 Blast Desc: conserved [Ajellomyces dermatitidis SLH14081] gi|239587952|gb|EEQ70595.1| conserved [Ajellomyces dermatitidis SLH14081]
  misc_feature (213)..(484): NCBI GI: 115383966 Blast Desc: conserved [Aspergillus terreus NIH2624] gi|114196222|gb|EAU37922.1| conserved [Aspergillus terreus NIH2624]
MTDSSQQKKRGRPARTTAPTKQEPKSSQAQSQTRRRGRSSAIHPEIAGDADAKNKSRPRKQTDVIEEPAEEAEEADDENEQNSSLLRRSRRHQAPRGQISNDTGGTAPRQPVHQASVLQRSGKAGMKQSELVPTHEHEDQVEDETSSHHQAKKRRGRPFLKDHQQHQADDAAKDSAAFSGPSHDNSAPKQASRQSKQGRSSQGHEEATRRREPKGRKRRSDGSTKSARKEQSPEEQDQSRDNSSTSESDSPPPYRYIAKRTRRIPRSVIESKWSPLDQSGVSNIANILTAASRPVLLHVSNRKQYQHAEHALEHAAKSLSRRSSKLPFPPASTLPRREDELDYERTQSAVEALRSQLDPLQHSVELLKYEKKRAEKELEQEYKALQQLSTNARSEAREKRDQLRKMHVLVPEKNSNVTGEYIVRVDVAPSEDFLGGAFADLQDDELVGLAGQISNHMESMHGNLDQIDGVLPAIARSDALLKATLQGILDQDKFENGVLG

SEQ ID NO: 7637 - DNA, 737 bp, Muscodor strobelii
  misc_feature: SGI EST ID NO. CUFF.19005.0
  misc_feature: Variant of the nucleotide sequence at SEQ ID NO 7635
cgccatacatccagaaatcgctggcgatgctgatgccaagaataaaagcagaccaaggaagcagacagatgtgatcgaggaaccagcagaggaggctgaagaagcagatgacgagaatgagcaaaactctagcctcctcagacggagtcgtcgccatcaagcaccgagaggtcaaatttctaatgatacagggggtaccgctccacggcaaccggttcatcaagcgtctgtcctccaacgaagtggaaaggcgggtatgaagcaatcggaacttgtccccactcacgagcatgaagaccaagttgaagatgagacttcctctcaccatcaagcgaaaaagaggagaggacgcccgtttctgaaagatcaccaacaacatcaagcggacgatgccgctaaggatagtgcggctttctccgggccgtcgcatgacaattctgcgccaaaacaagcaagccggcaatcgaagcaggggcggtcttctcaagggcacgaagaagcgacgagaagacgggaaccaaaaggcagaaaacgtcgctcagacgggtccacaaagtccgctagaaaagagcagtcaccagaggaacaggatcagtcacgggataactcatctaccagcgaatcggactcgcctccaccgtacagatatatagcgaagcgcacacgccgcatacctcgttctgttatcgagtccaaatggtcacctctcgatcagtctggtgttagcaatatcgcca

SEQ ID NO: 7638 - DNA, 804 bp, Muscodor strobelii
  misc_feature: SGI cDNA ID NO. 562315
  misc_feature: Reduced expression when VOC is produced
  misc_feature: Encodes the peptide sequence at SEQ ID NO 7639
atgcgcttctcctcgcttcctgtcttgctggcaatgccactgctggcgatcgccgacactcccgactaccaggcgcagttccaggattacctcggtcaggcccagatttacttcgacaagttcgcctccaagattccatctcccagcaaattcgaccctgttgccgccgccgccgccaaggttggcgcatctaagatagatatcctaggcctgcacaactggaaagagacactctatggccctgtaaccccaggaagcacaaagccggaagagtggtgggtacttatcactggcggcaataagacatgtttcggtcattgcggcaatttagaagccgcattcaacgagacagccggcaaatttgccctcgactcgacagctcctcatgctgcgcttgtcaactgcgacaatcagcctgtactgtgtaactcttggtccgcgcctgttggctctctctggattttcgagatgctgcccgagccagctgcgatagacctgtattcaaagaggttcaatttgacaaccgtcacctctgacgattttattcaactccgaaaggatggctataagactgacgcaaagtttcatgacggcttcttccaccccttcaacggccctctggctaagaatggtcttgccgttcctgccggctacgttctttggggatttagcttgcttcctagctgggctttcatgatcctgatctctatgtttagccgacgaatgatgtccagccgtatggagggccaaatgcaaggtggcccacgtcctgctgccgctggccaagccgctcctcgaagatag

SEQ ID NO: 7639 - protein, 267 aa, Muscodor strobelii
  misc_feature: SGI Peptide ID NO. 562315
  misc_feature (1)..(259): NCBI GI: 46123331 Blast Desc: FG06043.1 [Gibberella zeae PH-1]
  misc_feature (1)..(267): NCBI GI: 256733007 Blast Desc: [Nectria haematococca mpVI 77-13-4]
  misc_feature (1)..(249): NCBI GI: 156030808 Blast Desc: SS1G_14343 [Sclerotinia sclerotiorum 1980] gi|154700734|gb|EDO00473.1| SS1G_14343 [Sclerotinia sclerotiorum 1980]
  misc_feature (1)..(249): NCBI GI: 116205091 Blast Desc: CHGG_10429 [Chaetomium globosum CBS 148.51] gi|88176557|gb|EAQ84025.1| CHGG_10429 [Chaetomium globosum CBS 148.51]
  misc_feature (1)..(249): NCBI GI: 154299551 Blast Desc: BC1G_10738 [Botryotinia fuckeliana B05.10] gi|150857230|gb|EDN32422.1| BC1G_10738 [Botryotinia fuckeliana B05.10]
  misc_feature (1)..(258): NCBI GI: 85110786 Blast Desc: NCU06790 [Neurospora crassa OR74A] gi|18376001|emb|CAB91735.2| [Neurospora crassa] gi|28925317|gb|EAA34395.1| [Neurospora crassa OR74A]
  misc_feature (1)..(266): NCBI GI: 145606022 Blast Desc: MGG_06714 [Magnaporthe grisea 70-15] gi|145013768|gb|EDJ98409.1| MGG_06714 [Magnaporthe grisea 70-15]
  misc_feature (1)..(267): NCBI GI: 212542059 Blast Desc: conserved [Penicillium marneffei ATCC 18224] gi|210066091|gb|EEA20184.1| conserved [Penicillium marneffei ATCC 18224]
  misc_feature (1)..(257): NCBI GI: 119500430 Blast Desc: NFIA_105630 [Neosartorya fischeri NRRL 181] gi|119415137|gb|EAW25075.1| conserved [Neosartorya fischeri NRRL 181]
  misc_feature (33)..(247): NCBI GI: 115492725 Blast Desc: [Aspergillus terreus NIH2624] gi|114197850|gb|EAU39550.1| [Aspergillus terreus NIH2624]
  misc_feature: Useful for introducing or modulating the production of volatile compounds
MRFSSLPVLLAMPLLAIADTPDYQAQFQDYLGQAQIYFDKFASKIPSPSKFDPVAAAAAKVGASKIDILGLHNWKETLYGPVTPGSTKPEEWWVLITGGNKTCFGHCGNLEAAFNETAGKFALDSTAPHAALVNCDNQPVLCNSWSAPVGSLWIFEMLPEPAAIDLYSKRFNLTTVTSDDFIQLRKDGYKTDAKFHDGFFHPFNGPLAKNGLAVPAGYVLWGFSLLPSWAFMILISMFSRRMMSSRMEGQMQGGPRPAAAGQAAPRR

SEQ ID NO: 7640 - DNA, 2131 bp, Muscodor strobelii
  misc_feature: SGI EST ID NO. CUFF.19093.0
  misc_feature: Variant of the nucleotide sequence at SEQ ID NO 7638
catcatcatcactatgcgatagccctgggactgatttccattactattttcttcggaccatccatatcttgtccacgaacgcgttcatattcttgcgcctgtattgcgtcgtctcaagctctgtcgagtgcaactgttcttgattgatatccactcctttgatacatagcttggtggcatcattcgatccgcattgctcgacaatctatatcgttgcactaacaaaggtcttcctcgctctcaataccaaaatgcgcttctcctcgcttcctgtcttgctggcaatgccactgctggcgatcgccgacactcccgactaccaggcgcagttccaggattacctcggtcaggcccagatttacttcgacaagttcgcctccaagattccatctcccagcaaattcgaccctgttgccgccgccgccgccaaggttggcgcatctaagatagatatcctaggcctgcacaactggaaagagacactctatggccctgtaaccccaggaagcacaaagccggaagagtggtgggtacttatcactggcggcaataagacatgtttcggtcattgcggcaatttagaagccgcattcaacgagacagccggcaaatttgccctcgactcgacagctcctcatgctgcgcttgtcaactgcgacaatcagcctgtactgtgtaactcttggtccgcgcctgttggctctctctggattttcgagatgctgcccgagccagctgcgatagacctgtattcaaagaggttcaatttgacaaccgtcacctctgacgattttattcaactccgaaaggatggctataagactgacgcaaagtttcatgacggcttcttccaccccttcaacggccctctggctaagaatggtcttgccgttcctgccggctacgttctttggggatttagcttgcttcctagctgggctttcatgatcctgatctctatgtttagccgacgaatgatgtccagccgtatggagggccaaatgcaaggtggcccacgtcctgctgccgctggccaagccgctcctcgaagatagattgatcacgccgctgataagtcaacacacgtgtgctcgactttgaggcacacagatgtatatgtatatgccagaggcatccgcttcatatgtatctacgcccagacttctagtcttgtaatgtagtaatcctcataatgtattcttcgcagcctctgatcctcacctgcgctcatgattctgtttgcatgtctcctggatgccgtggagtccgtctagggcttcgccggccacattcgaattggaaagtcgaccatatcgcaagtcactcatatcgccggcgatctgtctgatagagtcgagcagggtggtttcctctccttccaaagtccggatctcatcttccagatcattcacagcgccatcgagttccggcacaatgctcaacagagagtgttgtttgggtgcgagagtagtggacgtcgatccatatagctgataccgcacaagttagatttggcataatacggcatacacaccaacaatgcggaggaaatgcctggtaacaaacgtacagctctctcgatctcgatctcatcgtcttggtcgtctaaggcgccctcctttttcgtcttgataatggtacggcgcagagccttgccttgtttgacttcggcatcgatgctggatgagacggaatctacgagagcgttccgctgatgctggagatctcgatatagcgctcgaacctgtggtgaagcctgttgcgacttggggaataaggacgtaaattcttgcagagaaataatcgttggcaaccgggaaggaagcagtagataattgcgaagaattgtgccttcagtgggtgccattgcgatggaagtccacggacgaagataatttcgcgatgaattaagacggtgcttgttggctcactcaatggatactcgaggcatgagcttcaacaagagtgttcgcgatacagaaaatgcttattgtaaggttacaagcgtagcatcactcaagatgatgtcttttccaatcaactcataaactcaatgttacttgaactgaatgtgagcagaggtatgtacctcagtacctaaccttcttagaacctgaagacatcagatgtg

SEQ ID NO: 7641 - DNA, 570 bp, Muscodor strobelii
  misc_feature: SGI cDNA ID NO. 562316
  misc_feature: Encodes the peptide sequence at SEQ ID NO 7642
atggcacccactgaaggcacaattcttcgcaattatctactgcttccttcccggttgccaacgattatttctctgcaagaatttacgtccttattccccaagtcgcaacaggcttcaccacaggttcgagcgctatatcgagatctccagcatcagcggaacgctctcgtagattccgtctcatccagcatcgatgccgaagtcaaacaaggcaaggctctgcgccgtaccattatcaagacgaaaaaggagggcgccttagacgaccaagacgatgagatcgagatcgagagagctctatatggatcgacgtccactactctcgcacccaaacaacactctctgttgagcattgtgccggaactcgatggcgctgtgaatgatctggaagatgagatccggactttggaaggagaggaaaccaccctgctcgactctatcagacagatcgccggcgatatgagtgacttgcgatatggtcgactttccaattcgaatgtggccggcgaagccctagacggactccacggcatccaggagacatgcaaacagaatcatgagcgcaggtga

SEQ ID NO: 7642 - protein, 189 aa, Muscodor strobelii
  misc_feature: SGI Peptide ID NO. 562316
  misc_feature (4)..(70): Pfam Id: PF09447 Pfam Desc: Cnl2/NKP2 family protein
  misc_feature (1)..(182): NCBI GI: 261356779 Blast Desc: conserved [Verticillium albo-atrum VaMs.102]
  misc_feature (1)..(182): NCBI GI: 156030806 Blast Desc: SS1G_14342 [Sclerotinia sclerotiorum 1980] gi|154700733|gb|EDO00472.1| SS1G_14342 [Sclerotinia sclerotiorum 1980]
  misc_feature (1)..(183): NCBI GI: 256732564 Blast Desc: [Nectria haematococca mpVI 77-13-4]
  misc_feature (1)..(183): NCBI GI: 46123329 Blast Desc: FG06042.1 [Gibberella zeae PH-1]
  misc_feature (1)..(188): NCBI GI: 154299553 Blast Desc: BC1G_10739 [Botryotinia fuckeliana B05.10] gi|150857231|gb|EDN32423.1| BC1G_10739 [Botryotinia fuckeliana B05.10]
  misc_feature (1)..(183): NCBI GI: 116205089 Blast Desc: CHGG_10428 [Chaetomium globosum CBS 148.51] gi|88176556|gb|EAQ84024.1| CHGG_10428 [Chaetomium globosum CBS 148.51]
  misc_feature (1)..(182): NCBI GI: 242769746 Blast Desc: conserved [Talaromyces stipitatus ATCC 10500] gi|218725031|gb|EED24448.1| conserved [Talaromyces stipitatus ATCC 10500]
  misc_feature (1)..(182): NCBI GI: 212542099 Blast Desc: conserved [Penicillium marneffei ATCC 18224] gi|210066111|gb|EEA20204.1| conserved [Penicillium marneffei ATCC 18224]
  misc_feature (1)..(182): NCBI GI: 121707776 Blast Desc: conserved [Aspergillus clavatus NRRL 1] gi|119400086|gb|EAW10512.1| conserved [Aspergillus clavatus NRRL 1]
  misc_feature (1)..(184): NCBI GI: 259487337 Blast Desc: TPA: conserved [Aspergillus nidulans FGSC A4]
MAPTEGTILRNYLLLPSRLPTIISLQEFTSLFPKSQQASPQVRALYRDLQHQRNALVDSVSSSIDAEVKQGKALRRTIIKTKKEGALDDQDDEIEIERALYGSTSTTLAPKQHSLLSIVPELDGAVNDLEDEIRTLEGEETTLLDSIRQIAGDMSDLRYGRLSNSNVAGEALDGLHGIQETCKQNHERR

SEQ ID NO: 7643 - DNA, 2294 bp, Muscodor strobelii
  misc_feature: SGI EST ID NO. CUFF.19094.2
  misc_feature: Variant of the nucleotide sequence at SEQ ID NO 7641
cacatctgatgtcttcaggttctaagaaggttaggtactgaggtacatacctctgctcacattcagttcaagtaacattgagtttatgagttgattggaaaagacatcatcttgagtgatgctacgcttgtaaccttacaataagcattttctgtatcgcgaacactcttgttgaagctcatgcctcgagtatccattgagtgagccaacaagcaccgtcttaattcatcgcgaaattatcttcgtccgtggacttccatcgcaatggcacccactgaaggcacaattcttcgcaattatctactgcttccttcccggttgccaacgattatttctctgcaagaatttacgtccttattccccaagtcgcaacaggcttcaccacaggttcgagcgctatatcgagatctccagcatcagcggaacgctctcgtagattccgtctcatccagcatcgatgccgaagtcaaacaaggcaaggctctgcgccgtaccattatcaagacgaaaaaggagggcgccttagacgaccaagacgatgagatcgagatcgagagagctctatatggatcgacgtccactactctcgcacccaaacaacactctctgttgagcattgtgccggaactcgatggcgctgtgaatgatctggaagatgagatccggactttggaaggagaggaaaccaccctgctcgactctatcagacagatcgccggcgatatgagtgacttgcgatatggtcgactttccaattcgaatgtggccggcgaagccctagacggactccacggcatccaggagacatgcaaacagaatcatgagcgcaggtgaggatcagaggctgcgaagaatacattatgaggattactacattacaagactagaagtctgggcgtagatacatatgaagcggatgcctctggcatatacatatacatctgtgtgcctcaaagtcgagcacacgtgtgttgacttatcagcggcgtgatcaatctatcttcgaggagcggcttggccagcggcagcaggacgtgggccaccttgcatttggccctccatacggctggacctatgagttgtcagtactgtgggtgagcaagcactgtcaacacaaattttcactcacatcattcgtcggctaaacatagagatcaggatcatgaaagcccagctaggaagcaagctaaatccccaaagaacgtagccggcaggaacggcaagaccattcttagccagagggccgttgaaggggtggaagaagccgtcatgaaactttgcgtcagtcttatagccatcctttcggagttgaataaaatcgtcagaggtgacggttgtcaaattgaacctctttgaatacaggtctatcgcagctggctcgggcagcatctcgaaaatccagagagagccaacaggcgcggaccaagagttacacagtacaggctgattgtcgcagttgacaagcgcagcatgaggagctgtcgagtcgagggcaaatttgccggctgtctcgttgaatgcggcttctaaattgccgcaatgacctgatatcccatttagcttggtgaattttcaagagggtgatcgagcaagaacagaagacctaccgaaacatgtcttattgccgccagtgataagtacccaccactcttccggctttgtgcttcctggggttacagggccatagagtgtctctttccagttgtgcaggcctaggatatctatcttagatgcgccaaccttggcggcggcggcggcaacagggtcgaatttgctgggagatggaatcttggaggcgaacttgtcgaagtaaatctgggcctgaccgaggtaatcctggaactgcgcctggtagtcgggagtgtcggcgatcgccagcagtggcattgccagcaagacaggaagcgaggagaagcgcattttggtattgagagcgaggaagacctttgttagtgcaacgatatctagcgcaatgttagagcaggtgcaattgcgcgcggtggtaagaagtgaaggcaaaaatcatgacaatgtcaccagtgggggccaacaaatggattagaaaagatgatgtaacttgcacatacagattgtcgagcaatgcggatcgaatgatgccaccaagctatgtatcaaaggagtggatatcaatcaagaacagttgcactcgacagagcttgagacgacgcaatacaggcgcaagaatatgaacgcgttcgtggacaagatatggatggtccgaagaaaatagtaatggaaatcagtcccagggctatcgcatagtgatgatgatg

SEQ ID NO: 7644 - DNA, 474 bp, Muscodor strobelii
  misc_feature: SGI cDNA ID NO. 562317
  misc_feature: Encodes the peptide sequence at SEQ ID NO 7645
atgccgccggcaaagcaggagaaggctcctccctacagcaaggacgagaaagtcctatgcttccatggcgatctaatgtatgaggctaagattacagaggtcaaggtcgagcctggcaagaagcctgaggatgcgcaataccgcatccactacaagggctggaaggccagctgggacgactgggtcagccaggaccgtatgcgcaagctcactgatgacaacaagcaacttgcctcacagctccaggctcaggctcgcatgcgtgctcctggcgccaaaggcgctaagaaggggggagcgaaggcaaccggttctgagatgagttccgcacggggtagtgaagagcgcgccgctggaacatccagttttgctgggagaggaccaagacgtaaccgtgactacgaacttgaggctgtaagtatatttctactcttttctgtgcgcatcgtaccccgtgcggcatcagggtattga

SEQ ID NO: 7645 - protein, 157 aa, Muscodor strobelii
  misc_feature: SGI Peptide ID NO. 562317
  misc_feature (1)..(145): NCBI GI: 116205087 Blast Desc: CHGG_10427 [Chaetomium globosum CBS 148.51] gi|88176555|gb|EAQ84023.1| CHGG_10427 [Chaetomium globosum CBS 148.51]
  misc_feature (1)..(146): NCBI GI: 164424579 Blast Desc: NCU06788 [Neurospora crassa OR74A] gi|18376003|emb|CAB91737.2| related to Chromo domain protein Alp13 [Neurospora crassa] gi|157070572|gb|EAA34393.2| conserved
  misc_feature (1)..(142): NCBI GI: 171689592 Blast Desc: protein product [Podospora anserina] gi|170944758|emb|CAP70869.1| protein product [Podospora anserina]
  misc_feature (1)..(138): NCBI GI: 261356780 Blast Desc: histone acetylase complex subunit [Verticillium albo-atrum VaMs.102]
  misc_feature (1)..(137): NCBI GI: 145606020 Blast Desc: MGG_06716 [Magnaporthe grisea 70-15] gi|145013767|gb|EDJ98408.1| MGG_06716 [Magnaporthe grisea 70-15]
  misc_feature (1)..(150): NCBI GI: 169771543 Blast Desc: [Aspergillus oryzae RIB40] gi|83768100|dbj|BAE58239.1| protein product [Aspergillus oryzae]
  misc_feature (12)..(150): NCBI GI: 255947936 Blast Desc: Pc22g07100 [Penicillium chrysogenum Wisconsin 54-1255] gi|211591752|emb|CAP97998.1| Pc22g07100 [Penicillium chrysogenum Wisconsin 54-1255]
  misc_feature (1)..(150): NCBI GI: 225559906 Blast Desc: histone acetylase complex subunit [Ajellomyces capsulatus G186AR] gi|225559957|gb|EEH08239.1| histone acetylase complex subunit [Ajellomyces capsulatus G186AR]
  misc_feature (1)..(150): NCBI GI: 240276191 Blast Desc: histone acetylase complex subunit [Ajellomyces capsulatus H143]
  misc_feature (1)..(150): NCBI GI: 154287674 Blast Desc: HCAG_01679 [Ajellomyces capsulatus NAm1] gi|150408273|gb|EDN03814.1| HCAG_01679 [Ajellomyces capsulatus NAm1]
MPPAKQEKAPPYSKDEKVLCFHGDLMYEAKITEVKVEPGKKPEDAQYRIHYKGWKASWDDWVSQDRMRKLTDDNKQLASQLQAQARMRAPGAKGAKKGGAKATGSEMSSARGSEERAAGTSSFAGRGPRRNRDYELEAVSIFLLFSVRIVPRAASGY

SEQ ID NO: 7646 - DNA, 1723 bp, Muscodor strobelii
  misc_feature: SGI EST ID NO. CUFF.19011.0
  misc_feature: Variant of the nucleotide sequence at SEQ ID NO 7644
gattacccaggcattcaccccattttcaaatgtgctacgaacattgaaatcataaacattccagtcactgaggtatttcacttgcagctcgactcagccacacacggtgaaagcagatcattattgtgcatacttctgatatttcagcaccatgccgccggcaaagcaggagaaggctcctccctacagcaaggacgagaaagtcctatgcttccatggcgatctaatgtatgaggctaagattacagaggtcaaggtcgagcctggcaagaagcctgaggatgcgcaataccgcatccactacaagggctggaaggccagctgggacgactgggtcagccaggaccgtatgcgcaagctcactgatgacaacaagcaacttgcctcacagctccaggctcaggctcgcatgcgtgctcctggcgccaaaggcgctaagaaggggggagcgaaggcaaccggttctgagatgagttccgcacggggtagtgaagagcgcgccgctggaacatccagttttgctgggagaggaccaagacgtaaccgtgactacgaacttgaggctgaggaatccttccacactagaccgtccgtcaagctcattatccctgatagtctcaagggtctgcttgtagacgactgggagaacgtcaccaagaacatgcagcttgttccccttcctcatcctaagcctgtcacgaagattctggaggactactcagcgtacgagatgccgaatcgtccagctggctcatcgcatgtagacattctggaagagaccttgagcggtttgaaggagtattttgacaaatctcttggtcgtatcctcttgtacaagttcgaacgaccccaatatgccgagatccacaagaagtggaattcagcagaccctgagtttcagggcaagacggccagcgacatctatggcgccgagcatctctgtcgcctcatagtctctcttccagagctgatcgcccagaccaacatggatcagcagtcagtcaaccgccttcgagaagagctcgccaagttcgccacctggctgacgaagcatgctgccgagtatttcaccacaagttatgagacccctgtcgccgactacgccgacaaagctaagaactaaggctcggtccgaacaagagctctatcgcaactttgctcaagttgcgtacggttcagtttccgctcacttcttcgtctcccaaagacgagcaatcaacaatgatatttccagtgcttcttgtcgcttggacgtctatgaaacaaccacttcggcactgagtcaccacgaattttgactttcgccgactctgcattaccaaggatacacatactactatgcaaaacacgaatgtatctcatcccccttgaccagatacgatcaggctgagctgtatttctaaaaggagcgaggagttgtctcataggaaagaggacacatgatgaacgctctttgagtttgcgtaagactgcgttcttttgtcccaacggaggaatcagagggcatgtaccatagacgaggatcaggaagtcaggttcggtatggtgataatggatgcatgcaacctctgtttattagaccgtacttgttgcggtgatggcgggacaggagactggtctccacgttgtcggtgaattggagattaaccaggacggatggataccttatgtagatcagtctccctccaaattaaggccgttgattatgcacatgtgcattata

SEQ ID NO: 7647 - DNA, 1185 bp, Muscodor strobelii
  misc_feature: SGI cDNA ID NO. 562318
  misc_feature: Encodes the peptide sequence at SEQ ID NO 7648
atggcggaactctgcactcccatcacctcgtcatctcccacgaacgcatccactggctctccaagggcttcttccccatcttctgtttcatcatgcttggcagaatcatccgaccccgacagctgtgtgtcagagccagcccagatgaataaacgcactcctccaccatctccccatcctcgcaaacgcaaacgcgtggtactggccgtcactcaacggccagtcacacctcggagggcaagctaccgcatctcaaagccgaccacctccgccgccgctaattctttcgcggtcaaagagagggcatgggcgaaggcagcagcaagaacagatcattgtctggttctacctcagaaaaatcgcaaatatgtcacacgtaatggcaagcccctttatggagctcaggacgcccctttctgtgttcctgatgaccctcgacgctcgaagaaacagaaggtccgcaacgagttagcgatcaaggcgatcactgctgggacgccttcagacctaccctaccggcccagaggtccggccctgccactcacccccatgccttacctgaccgcaccattgggacacataagaaatccaccgcctattgcgtacgaaactaatgaaacttcacaggaggaatccttccacactagaccgtccgtcaagctcattatccctgatagtctcaagggtctgcttgtagacgactgggagaacgtcaccaagaacatgcagcttgttccccttcctcatcctaagcctgtcacgaagattctggaggactactcagcgtacgagatgccgaatcgtccagctggctcatcgcatgtagacattctggaagagaccttgagcggtttgaaggagtattttgacaaatctcttggtcgtatcctcttgtacaagttcgaacgaccccaatatgccgagatccacaagaagtggaattcagcagaccctgagtttcagggcaagacggccagcgacatctatggcgccgagcatctctgtcgcctcatagtctctcttccagagctgatcgcccagaccaacatggatcagcagtcagtcaaccgccttcgagaagagctcgccaagttcgccacctggctgacgaagcatgctgccgagtatttcaccacaagttatgagacccctgtcgccgactacgccgacaaagctaagaactaa

SEQ ID NO: 7648 - protein, 394 aa, Muscodor strobelii
  misc_feature: SGI Peptide ID NO. 562318
  misc_feature (101)..(381): Pfam Id: PF05712 Pfam Desc: MRG
  misc_feature (210)..(316): Pfam Id: PF05712 Pfam Desc: MRG
  misc_feature (325)..(381): Pfam Id: PF05712 Pfam Desc: MRG
  misc_feature (206)..(393): NCBI GI: 171689592 Blast Desc: protein product [Podospora anserina] gi|170944758|emb|CAP70869.1| protein product [Podospora anserina]
  misc_feature (196)..(394): NCBI GI: 256733006 Blast Desc: NECHADRAFT_59995 [Nectria haematococca mpVI 77-13-4]
  misc_feature (87)..(394): NCBI GI: 85110780 Blast Desc: NCU06787 [Neurospora crassa OR74A] gi|18376004|emb|CAB91738.2| related to Chromo domain protein Alp13 [Neurospora crassa] gi|28925314|gb|EAA34392.1| NCU06787
  misc_feature (117)..(394): NCBI GI: 46123325 Blast Desc: FG06040.1 [Gibberella zeae PH-1]
  misc_feature (205)..(394): NCBI GI: 169771543 Blast Desc: [Aspergillus oryzae RIB40] gi|83768100|dbj|BAE58239.1| protein product [Aspergillus oryzae]
  misc_feature (205)..(394): NCBI GI: 238485882 Blast Desc: histone acetylase complex subunit MRG15-2 [Aspergillus flavus NRRL3357] gi|220699058|gb|EED55397.1| histone acetylase complex subunit MRG15-2 [Aspergillus flavus NRRL3357]
  misc_feature (209)..(393): NCBI GI: 156030800 Blast Desc: SS1G_14339 [Sclerotinia sclerotiorum 1980] gi|154700730|gb|EDO00469.1| SS1G_14339 [Sclerotinia sclerotiorum 1980]
  misc_feature (205)..(393): NCBI GI: 70993826 Blast Desc: histone acetylase complex subunit MRG15-2 [Aspergillus fumigatus Af293] gi|74671558|sp|Q4WPW2.1|EAF3_ASPFU RecName: Full=Chromatin modification-related protein eaf3 histone complex
  misc_feature (205)..(393): NCBI GI: 121707780 Blast Desc: histone acetylase complex subunit MRG15-2 [Aspergillus clavatus NRRL 1] gi|119400087|gb|EAW10513.1| histone acetylase complex subunit MRG15-2 [Aspergillus clavatus NRRL 1]
  misc_feature (205)..(393): NCBI GI: 119500388 Blast Desc: histone acetylase complex subunit MRG15-2 [Neosartorya fischeri NRRL 181] gi|119415116|gb|EAW25054.1| histone acetylase complex subunit MRG15-2 [Neosartorya fischeri NRRL 181]
MAELCTPITSSSPTNASTGSPRASSPSSVSSCLAESSDPDSCVSEPAQMNKRTPPPSPHPRKRKRVVLAVTQRPVTPRRASYRISKPTTSAAANSFAVKERAWAKAAARTDHCLVLPQKNRKYVTRNGKPLYGAQDAPFCVPDDPRRSKKQKVRNELAIKAITAGTPSDLPYRPRGPALPLTPMPYLTAPLGHIRNPPPIAYETNETSQEESFHTRPSVKLIIPDSLKGLLVDDWENVTKNMQLVPLPHPKPVTKILEDYSAYEMPNRPAGSSHVDILEETLSGLKEYFDKSLGRILLYKFERPQYAEIHKKWNSADPEFQGKTASDIYGAEHLCRLIVSLPELIAQTNMDQQSVNRLREELAKFATWLTKHAAEYFTTSYETPVADYADKAKN

SEQ ID NO: 7649 - DNA, 1723 bp, Muscodor strobelii; identical to SEQ ID NO: 7646
  misc_feature: SGI EST ID NO. CUFF.19011.0
  misc_feature: Variant of the nucleotide sequence at SEQ ID NO 7647

SEQ ID NO: 7650 - DNA, 261 bp, Muscodor strobelii
  misc_feature: SGI cDNA ID NO. 562319
  misc_feature: Reduced expression when VOC is produced
  misc_feature: Encodes the peptide sequence at SEQ ID NO 7651
atgtcctacttccgcataaccctccaccgctcagccatcggcctaccccagaggtcaagaggtgtcctcgctgccctcggtctgcgcaagcgctgccagaccgtcttcaagcccgtgtctcccgatgcagccggtatgatcatgaaggtcaaggaacttgtacgcgtagaggaggtcgataacgcgatgacgacgaaagagttacgggagtccagacggccggagccgggattctatatcgagaaggctgtgccaaggtga

SEQ ID NO: 7651 - protein, 86 aa, Muscodor strobelii
  misc_feature: SGI Peptide ID NO. 562319
  misc_feature (3)..(54): Pfam Id: PF00327 Pfam Desc: Ribosomal protein L30p/L7e
  misc_feature (1)..(86): NCBI GI: 261356783 Blast Desc: conserved [Verticillium albo-atrum VaMs.102]
  misc_feature (1)..(86): NCBI GI: 39977667 Blast Desc: [Magnaporthe grisea 70-15] gi|145013765|gb|EDJ98406.1| [Magnaporthe grisea 70-15]
  misc_feature (1)..(86): NCBI GI: 171689594 Blast Desc: protein product [Podospora anserina] gi|170944759|emb|CAP70870.1| protein product [Podospora anserina]
  misc_feature (1)..(86): NCBI GI: 85110778 Blast Desc: NCU06786 [Neurospora crassa OR74A] gi|18376005|emb|CAB91739.2| related to ribosomal protein L30 [Neurospora crassa] gi|28925313|gb|EAA34391.1| conserved crassa
  misc_feature (1)..(83): NCBI GI: 70993862 Blast Desc: 50S ribosomal protein L30 [Aspergillus fumigatus Af293] gi|66849412|gb|EAL89740.1| 50S ribosomal protein L30, [Aspergillus fumigatus Af293] gi|159125303|gb|EDP50420.1| 50S
  misc_feature (1)..(83): NCBI GI: 119500422 Blast Desc: 50S ribosomal protein L30, [Neosartorya fischeri NRRL 181] gi|119415133|gb|EAW25071.1| 50S ribosomal protein L30, [Neosartorya fischeri NRRL 181]
  misc_feature (1)..(82): NCBI GI: 119194159 Blast Desc: CIMG_01454 [Coccidioides immitis RS]
  misc_feature (1)..(82): NCBI GI: 240105424 Blast Desc: ribosomal protein L30 containing protein [Coccidioides posadasii C735 delta SOWgp]
  misc_feature (1)..(82): NCBI GI: 258567418 Blast Desc: UREG_05142 [Uncinocarpus reesii 1704] gi|237905899|gb|EEP80300.1| UREG_05142 [Uncinocarpus reesii 1704]
  misc_feature (1)..(83): NCBI GI: 240281849 Blast Desc: 50S ribosomal protein L30 [Ajellomyces capsulatus H143]
  misc_feature: Useful for introducing or modulating the production of volatile compounds
MSYFRITLHRSAIGLPQRSRGVLAALGLRKRCQTVFKPVSPDAAGMIMKVKELVRVEEVDNAMTTKELRESRRPEPGFYIEKAVPR

SEQ ID NO: 7652 - DNA, 1001 bp, Muscodor strobelii
  misc_feature: SGI EST ID NO. CUFF.19018.0
  misc_feature: Variant of the nucleotide sequence at SEQ ID NO 7650
cacaggctgaaatttctggcttggcgacagacccacttaaaagctggctggcaggatcccgtcccaaagcaagccagtgcttgacatacgcgaccttgtgtgccaatccatcgttcagttcttgtggtggtcgagtccaaagacctaacacataagagaggcttcattgcaagttgtttgctgtttcaagttacaacggcaagggagtcttggggggaccttttgttacgatctctgcgactccgatcgacgacgaacgagcgattctttgcgtttcaccggaatcacaagcgacggtcaattagcagtctacgccggtcacccgtgacgtgcatacatccctcgagcacactaccccaggcgcatctatcgagcacgatcgtacaatagcgacaccagcatactcatctctccatctctcgcaataaatccaccgaaacaaacatgtcctacttccgcataaccctccaccgctcagccatcggcctaccccagaggtcaagaggtgtcctcgctgccctcggtctgcgcaagcgctgccagaccgtcttcaagcccgtgtctcccgatgcagccggtatgatcatgaaggtcaaggaacttgtacgcgtagaggaggtcgataacgcgatgacgacgaaagagttacgggagtccagacggccggagccgggattctatatcgagaaggctgtgccaaggtgataggaggatcgagggatatgttatgagggtggaatagttgatggaaacttagggtgagagacgtataaagatgaagccgatgatccagaggaggaagacgcagagaaagaagattgtctcagcttgatgaacctaggctctgtacgatgaaaaaatggaaggggaagggagtgtatcatcagttgtatatcacacaatctagagccctcgaatatctgtatatgcatacatcgcgctgcaacacaaaacacatgaagatcataccaaaacatcgagtagtccacagcaggccatgg

SEQ ID NO: 7653 - DNA, 1995 bp, Muscodor strobelii
  misc_feature: SGI cDNA ID NO. 562320
  misc_feature: Elevated expression when VOC is produced
  misc_feature: Encodes the peptide sequence at SEQ ID NO 7654
atggcatcggcaactaccaatggcgacaagagcggcgggctctctgctaacgacaagatcacacgtttctctgctcccagccggccgctgagccccttaccgtcacacgctctcttcaacaacaagacgagatgcttcgtttacggtcttcagaaccgagccgtgcaaggtatgcttgacttcgacttcatctgcaagcgaagcactccctcagtggccggaatcatctacaccttcggtggccagttcgtcagcaagatgtactggggcaccagcgagacactcctgcccgtctaccaggagacggccaaggctgtcgccaaacacccggacgtcgacgttgtcgtcaacttcgcctcgtcccgtagcgtctacagctccaccatggagctgatgcagttccctcagatcaagaccattgccatcatcgccgaaggtgtccctgagcgtcgtgctcgagaaatcgcccatgttgcgcgtaagaagggtgtcaccatcattggccctgccactgtcggtgggatcaagcctggcagcttcaagattggtaacaccggtggtatgatggacaacatcgttgcgtccaagctctaccgcaagggatccgtcgcctacgtctccaagtctggtggcatgtccaacgagttgaacaacatcatctcccagaacaccgatggtgtttacgagggtgttgcgattggtggtgacagatatccgggcactactttcattgaccacatgctccgattccaacaagaccctgaatgcaaggttttggtgctacttggtgaagtcggtggcgtggaggagtacaaggtgattgatgctgtcaaacaaggtgtcatcaccaagcccattgtcgcatgggctattggtacttgcgccagcatgttcaagaccgaagtgcaattcggccacgcaggctcctttgccaactcgcaattggaaaccgctgcgatgaagaacaagatgatgaaggaagccggtatccacgtcccagacaccttcgaggacatgccttccgtgctcaagagcgtatacgacaagctcgttaaggacaaggtcatcgttcccgccaaggagcctgttgttcccaagatccccatggactactcgtgggcccaagagcttggtctcatccgcaagcctgctgccttcatttccaccatctctgatgatcgcggccaagagcttctgtatgctggcatgcccatctcggatgtgttcagggaggatattggcatcggcggtgtcatgtccctgctgtggttcagacggcgtcttccagactacgctaccaaattcttggaaatggtactcatgctcacggccgaccacggtccggccgtctctggtgccatgaacaccatcatcacaacccgtgcaggcaaggatctgatcagctctctggttgccggtctgctgacgattggttctcgcttcggtggtgcccttgacggtgccgcagaggagttcagcaaggctgccgacaacggcctcagccctcgtgacttcgttgacacgatgcgcaagcagaacaagctcattccaggtatcggccaccgtatcaagtcacgaaacaaccctgacttgcgtgtcgagctggtcaaggagtacgttctcgccaacttccccacccacaagctgctggactacgccttggccgtcgagacggtgacgacgtcgaagaaggacaacctgattctcaacgtcgacggctgtgtggcggtgtgcttcgtcgacttgatgcgcagctgcggcgcgttcagcttagaggaggctgaggactacatgaagatgggtgtcctgaacggtctcttcgtgctgggccggagcattggtcttattgcccactacctagatcagaagagactgcgcaccagcttgtaccgccacccctgggatgatatcacttacttgttgccttctctgcccacgctggcctcagagggtgcgacaggctctgagagccgcgttgaggtttcgatcaaatag

SEQ ID NO: 7654 - protein, 664 aa, Muscodor strobelii
  misc_feature: SGI Peptide ID NO. 562320
  misc_feature (38)..(147): Pfam Id: PF02629 Pfam Desc: CoA binding domain
  misc_feature (188)..(333): Pfam Id: PF00549 Pfam Desc: CoA-ligase
  misc_feature (14)..(641): NCBI GI: 50554757 Blast Desc: YALI0E34793p [Yarrowia lipolytica] gi|49650656|emb|CAG80394.1| YALI0E34793p [Yarrowia lipolytica]
  misc_feature (3)..(663): NCBI GI: 261356785 Blast Desc: ATP-citrate synthase subunit 1 [Verticillium albo-atrum VaMs.102]
  misc_feature (34)..(640): NCBI GI: 19112994 Blast Desc: ATP citrate synthase subunit 1 () [Schizosaccharomyces pombe 972h-] gi|30912748|sp|Q9P7W3.1|ACL1_SCHPO RecName: Full= ATP-citrate synthase subunit 1; AltName: Full=ATP-citrate 1; 1 1
  misc_feature (17)..(637): NCBI GI: 242216681 Blast Desc: [Postia placenta Mad-698-R] gi|220726691|gb|EED80632.1| [Postia placenta Mad-698-R]
  misc_feature (39)..(637): NCBI GI: 169866324 Blast Desc: CC1G_09654 [Coprinopsis cinerea okayama7#130] gi|116499157|gb|EAU82052.1| CC1G_09654 [Coprinopsis cinerea okayama7#130]
  misc_feature (18)..(637): NCBI GI: 170102777 Blast Desc: [Laccaria bicolor S238N-H82] gi|164642501|gb|EDR06757.1| [Laccaria bicolor S238N-H82]
  misc_feature (17)..(637): NCBI GI: 71004972 Blast Desc: UM01005.1 [Ustilago maydis 521] gi|46096782|gb|EAK82015.1| UM01005.1 [Ustilago maydis 521]
  misc_feature (17)..(639): NCBI GI: 58260100 Blast Desc: [Cryptococcus neoformans var. neoformans JEC21] gi|134116646|ref|XP_772995.1| CNBJ2710 [Cryptococcus neoformans var. neoformans B-3501A] gi|50255615|gb|EAL18348.1| CNBJ2710 var.
  misc_feature (20)..(642): NCBI GI: 156374103 Blast Desc: [Nematostella vectensis] gi|156216653|gb|EDO37585.1| [Nematostella vectensis]
  misc_feature (27)..(647): NCBI GI: 56118260 Blast Desc: acly protein [Xenopus (Silurana) tropicalis] gi|51703371|gb|AAH80908.1| acly protein [Xenopus (Silurana) tropicalis]
  misc_feature (3)..(663): SWISSPROT Homolog: EC 2.3.3.8 ATP citrate synthase
  misc_feature: Useful for introducing or modulating the production of volatile compounds
MASATTNGDKSGGLSANDKITRFSAPSRPLSPLPSHALFNNKTRCFVYGLQNRAVQGMLDFDFICKRSTPSVAGIIYTFGGQFVSKMYWGTSETLLPVYQETAKAVAKHPDVDVVVNFASSRSVYSSTMELMQFPQIKTIAIIAEGVPERRAREIAHVARKKGVTIIGPATVGGIKPGSFKIGNTGGMMDNIVASKLYRKGSVAYVSKSGGMSNELNNIISQNTDGVYEGVAIGGDRYPGTTFIDHMLRFQQDPECKVLVLLGEVGGVEEYKVIDAVKQGVITKPIVAWAIGTCASMFKTEVQFGHAGSFANSQLETAAMKNKMMKEAGIHVPDTFEDMPSVLKSVYDKLVKDKVIVPAKEPVVPKIPMDYSWAQELGLIRKPAAFISTISDDRGQELLYAGMPISDVFREDIGIGGVMSLLWFRRRLPDYATKFLEMVLMLTADHGPAVSGAMNTIITTRAGKDLISSLVAGLLTIGSRFGGALDGAAEEFSKAADNGLSPRDFVDTMRKQNKLIPGIGHRIKSRNNPDLRVELVKEYVLANFPTHKLLDYALAVETVTTSKKDNLILNVDGCVAVCFVDLMRSCGAFSLEEAEDYMKMGVLNGLFVLGRSIGLIAHYLDQKRLRTSLYRHPWDDITYLLPSLPTLASEGATGSESRVEVSIK

SEQ ID NO: 7655 - DNA, 3565 bp, Muscodor strobelii
  misc_feature: SGI EST ID NO. CUFF.19537.0
  misc_feature: Variant of the nucleotide sequence at SEQ ID NO 7653
gggaagtcgaagtggacccatctggactcctcgtacctgtacctgatccatagaaggaggggtccgcagcgtggggcatttaagagctcttgaaggaactccccagcgatcatgacttcgggtcagcaagacgctttgggctcactaaagaggattacgaagaccaagaatacagaagggcaaggtcttacatctggctttatcgggctgagatgcattgggattcgggagccgggaaactgcaattggaaaatcgccaagaagaaatgcgttagggggaggggctattcaacaatctgagtcccgacaccagtgcacaggccggcgtgttcaccaccccaactaatccggttcagggacccggttcaaatagtacctcttcgggtatcttagcttcgaaagcggacatgctcaaacgccctgtggaatttatcgcggaagcagaaacttgcaggatccatactcgaggtggaacaatcagtccagggagaaaagagctatcgagacgacgagagcaatgaagagaaggaaccagtaatgcctgtatctggaacaaaactggctgccgatggtgtttacgcaggttctcaagctcgataggcttgggcttagtattactcattggcaattcagtgaggcccaactggaattacggcagaatcgtcccatgtcagtccgtacaattccaggctgtcaggtaccctcccgtgtggtggggtggggtctgtcgcgggctagcaagtagatgtatagggtccgtacctctacctgcatggacctgtgccgggtatagtacactagctgtccgcccttttacaccaacgccaacggcatcctccatcgcactcaattgaacacacctggacatccacaccagctcaattgtcagaagtactcagagggctgaggtacacaggagccgtctgcaaacccgagtaccgctcactccaagatcctctcccaccccaataacttgagcccgaggaagcaacgagtgaacatccccagctgtcgccagagctccccagtgcaatccgtgcttatcccacctcgacatccaccctctgtgccaattctaatcccaccaattcctcccactccatcccatcatctcgcgatcttgaattccgctcctcatcttccccagctgctcaattggctcttcttgtgctgcagaaaaagagcctgacgaagagtctctagaaaggcttcactttcaaagtcttggttttagttactttcttctctcacgtcatttagaagcgaggccgtcaagatggcatcggcaactaccaatggcgacaagagcggcgggctctctgctaacgacaagatcacacgtttctctgctcccagccggccgctgagccccttaccgtcacacgctctcttcaacaacaagacgagatgcttcgtttacggtcttcagaaccgagccgtgcaaggtatgcttgacttcgacttcatctgcaagcgaagcactccctcagtggccggaatcatctacaccttcggtggccagttcgtcagcaagatgtactggggcaccagcgagacactcctgcccgtctaccaggagacggccaaggctgtcgccaaacacccggacgtcgacgttgtcgtcaacttcgcctcgtcccgtagcgtctacagctccaccatggagctgatgcagttccctcagatcaagaccattgccatcatcgccgaaggtgtccctgagcgtcgtgctcgagaaatcgcccatgttgcgcgtaagaagggtgtcaccatcattggccctgccactgtcggtgggatcaagcctggcagcttcaagattggtaacaccggtggtatgatggacaacatcgttgcgtccaagctctaccgcaagggatccgtcgcctacgtctccaagtctggtggcatgtccaacgagttgaacaacatcatctcccagaacaccgatggtgtttacgagggtgttgcgattggtggtgacagatatccgggcactactttcattgaccacatgctccgattccaacaagaccctgaatgcaaggttttggtgctacttggtgaagtcggtggcgtggaggagtacaaggtgattgatgctgtcaaacaaggtgtcatcaccaagcccattgtcgcatgggctattggtacttgcgccagcatgttcaagaccgaagtgcaattcggccacgcaggctcctttgccaactcgcaattggaaaccgctgcgatgaagaacaagatgatgaaggaagccggtatccacgtcccagacaccttcgaggacatgccttccgtgctcaagagcgtatacgacaagctcgttaaggacaaggtcatcgttcccgccaaggagcctgttgttcccaagatccccatggactactcgtgggcccaagagcttggtctcatccgcaagcctgctgccttcatttccaccatctctgatgatcgcggccaagagcttctgtatgctggcatgcccatctcggatgtgttcagggaggatattggcatcggcggtgtcatgtccctgctgtggttcagacggcgtcttccagactacgctaccaaattcttggaaatggtactcatgctcacggccgaccacggtccggccgtctctggtgccatgaacaccatcatcacaacccgtgcaggcaaggatctgatcagctctctggttgccggtctgctgacgattggttctcgcttcggtggtgcccttgacggtgccgcagaggagttcagcaaggctgccgacaacggcctcagccctcgtgacttcgttgacacgatgcgcaagcagaacaagctcattccaggtatcggccaccgtatcaagtcacgaaacaaccctgacttgcgtgtcgagctggtcaaggagtacgttctcgccaacttccccacccacaagctgctggactacgccttggccgtcgagacggtgacgacgtcgaagaaggacaacctgattctcaacgtcgacggctgtgtggcggtgtgcttcgtcgacttgatgcgcagctgcggcgcgttcagcttagaggaggctgaggactacatgaagatgggtgtcctgaacggtctcttcgtgctgggccggagcattggtcttattgcccactacctagatcagaagagactgcgcaccagcttgtaccgccacccctgggatgatatcacttacttgttgccttctctgcccacgctggcctcagagggtgcgacaggctctgagagccgcgttgaggtttcgatcaaatagagaggagatagcaatagagggcaaaggactacatggtttcgaacgtaaaaggagggactatggcgtcatgaagactaatgatagaataaggccattgtggcttgcgtgtacgaggagttttagcatgctaaagtgcaggggattcgggatgatccagtatgagatataatagacagatttttgaaatatgttcatgaccaccaatgcaatgagttgctgagccataggtatattgaatgcattaaagctagcaggtgcactttcgaaaagttgcagagatgttggtgaccttgg

SEQ ID NO: 7656 - DNA, 1467 bp, Muscodor strobelii
  misc_feature: SGI cDNA ID NO. 562321
  misc_feature: Elevated expression when VOC is produced
  misc_feature: Encodes the peptide sequence at SEQ ID NO 7657
atgtcggcaaaggctatcctcgaggccgacggcaaggccatcctcaactaccacctcactcgtgctcccgtcatcaagccgagtcctctgccaaagccttcgaagcacaacgctcctccaagactggcctctctctacttccctgaggatgccgatgtcaacgctgtcctcgaccaggctgaggtcacctatccctggctcctccagagcggcgccaagttcgttgcaaagcctgatcagctgatcaagcgccgaggcaagagcggtctgctcgccttgaacaagacctggcctgaggcgaaggcttgggtcgctcagcgtgctgccaaatcgcagaaggtcgagcacacagagggcgttcttcgccagttcctggtcgagcctttcgttcctcacccggacggcaccgagtactacatcaacatcaactccgtcagagatggcgactggatcctcttcacccacgagggtggtgtagatgttggtgatgtcgatgcaaaggccgagaagttgttgatcccggtcgacttgtccgaatacccttcgaacgaggagatcgcggcgacgctgctgaagaaggtgcccaagggcgttcacaatgtgctggtcgactttatcactcgcctctatgccgtctacgttgactgccagttcacatacctcgagatcaaccctctcgttgttattcccaacgcagatgccacctcggctgaggttcacttcctcgatttggccgccaagttggatcagactgcggacttcgagtgcggtgccaaatgggcgattgcccgtgctcctgtgaacctgggcatcactgccgtgtcatctgctggtgacaaggtaagcgttgatgccggcccgccgatcgaattccctgcaccttttggtcgtgagctgaccaaggaagaggcttacatcgctgagatggatgccaagactggtgcatccctcaagctcactgttttgaaccctaacggccgcatttggacattggttgcaggtggtggtgcttccgtcgtttatgctgatgccattgcgtctgccgggttcgccgacgatctggcgaactatggtgaatactccggtgctcctaccgagtctcaaacatactactatgcccgcaccgtcttagatcttatgctacgcgctcccatgtcccctaagggcaaggtcctgttcatcggtggtggtattgccaacttcacgaacgtcgcttctacattcaagggtgtcattcgtgcgctccgcgagtatgcccatcagttgaatgagcatcacactcagatctgggtgcgtcgtgctggacctaactggcaagagggtctcaagaacatgaaggctgctacgcaagagctgggtctggatgcccacgttttcggcccggatatgcacgtgtcaggaattgtcccactcgctctgatccccggacgattggagcagaacacggtttcggaattccaaggctaa

SEQ ID NO: 7657 - protein, 488 aa, Muscodor strobelii
  misc_feature: SGI Peptide ID NO. 562321
  misc_feature (203)..(228): Pfam Id: PF08442 Pfam Desc: ATP-grasp domain
  misc_feature (1)..(487): NCBI GI: 116205083 Blast Desc: CHGG_10425 [Chaetomium globosum CBS 148.51] gi|88176553|gb|EAQ84021.1| CHGG_10425 [Chaetomium globosum CBS 148.51]
  misc_feature (1)..(488): NCBI GI: 256733005 Blast Desc: [Nectria haematococca mpVI 77-13-4]
  misc_feature (1)..(488): NCBI GI: 39977671 Blast Desc: MGG_06720 [Magnaporthe grisea 70-15] gi|145013763|gb|EDJ98404.1| MGG_06720 [Magnaporthe grisea 70-15]
  misc_feature (1)..(487): NCBI GI: 164424575 Blast Desc: NCU06783 [Neurospora crassa OR74A] gi|18376007|emb|CAB91741.2| ATP citrate lyase subunit 2 [Neurospora crassa] gi|157070571|gb|EAA34388.2| NCU06783 crassa
  misc_feature (1)..(487): NCBI GI: 171689598 Blast Desc: protein product [Podospora anserina] gi|170944761|emb|CAP70872.1| protein product [Podospora anserina]
  misc_feature (1)..(487): NCBI GI: 46123323 Blast Desc: FG06039.1 [Gibberella zeae PH-1]
  misc_feature (1)..(487): NCBI GI: 7160184 Blast Desc: ATP citrate lyase, subunit 2 [Sordaria macrospora]
  misc_feature (1)..(488): NCBI GI: 7159697 Blast Desc: ATP-citrat-lyase [Gibberella pulicaris]
  misc_feature (1)..(488): NCBI GI: 156060479 Blast Desc: ATP citrate lyase, subunit 2 [Sclerotinia sclerotiorum 1980] gi|154699786|gb|EDN99524.1| ATP citrate lyase, subunit 2 [Sclerotinia sclerotiorum 1980]
  misc_feature (1)..(474): NCBI GI: 119471599 Blast Desc: ATP citrate lyase subunit (Acl), putatibe [Neosartorya fischeri NRRL 181] gi|119406343|gb|EAW16294.1| ATP citrate lyase subunit (Acl), putatibe [Neosartorya fischeri NRRL 181]
  misc_feature (1)..(473): SWISSPROT Homolog: EC 2.3.3.8 ATP citrate synthase
  misc_feature: Useful for introducing or modulating the production of volatile compounds
MSAKAILEADGKAILNYHLTRAPVIKPSPLPKPSKHNAPPRLASLYFPEDADVNAVLDQAEVTYPWLLQSGAKFVAKPDQLIKRRGKSGLLALNKTWPEAKAWVAQRAAKSQKVEHTEGVLRQFLVEPFVPHPDGTEYYININSVRDGDWILFTHEGGVDVGDVDAKAEKLLIPVDLSEYPSNEEIAATLLKKVPKGVHNVLVDFITRLYAVYVDCQFTYLEINPLVVIPNADATSAEVHFLDLAAKLDQTADFECGAKWAIARAPVNLGITAVSSAGDKVSVDAGPPIEFPAPFGRELTKEEAYIAEMDAKTGASLKLTVLNPNGRIWTLVAGGGASVVYADAIASAGFADDLANYGEYSGAPTESQTYYYARTVLDLMLRAPMSPKGKVLFIGGGIANFTNVASTFKGVIRALREYAHQLNEHHTQIWVRRAGPNWQEGLKNMKAATQELGLDAHVFGPDMHVSGIVPLALIPGRLEQNTVSEFQG

SEQ ID NO: 7658 - DNA, 2229 bp, Muscodor strobelii
  misc_feature: SGI EST ID NO. CUFF.19708.0
  misc_feature: Variant of the nucleotide sequence at SEQ ID NO 7656
tggagggacacttgcttggaggggagcttgcccaaccgaaccaagtgaagcccggaggggtcccctaataaattctaatcgaatagaaatgtggtgagagcgacttggacacgggaagaaaagtggtgagcactcgcacacacgcttctctctggttctgctcactccatagctcctcctccagcacctgtccggtccaactagtgactggccccgggaggttcaaggttgaccgacgcagtccaacatccccagctgacttttcccaaagatcgcatctccatcctcgctcacttgctgcccactagacagcaacaccctcattctcaccgcccagctgcccatcgttcttctcatccaaactgctctttctcttcgcagcgtgacctctcgtctttggctctcgcttgagattgcaattgcgaattgatactgccatataaaggagtgtctgcatcatttgacaaagaaattgcacacgtacctcttctgcaactagcttctctcgcccagcacaatgtcggcaaaggctatcctcgaggccgacggcaaggccatcctcaactaccacctcactcgtgctcccgtcatcaagccgagtcctctgccaaagccttcgaagcacaacgctcctccaagactggcctctctctacttccctgaggatgccgatgtcaacgctgtcctcgaccaggctgaggtcacctatccctggctcctccagagcggcgccaagttcgttgcaaagcctgatcagctgatcaagcgccgaggcaagagcggtctgctcgccttgaacaagacctggcctgaggcgaaggcttgggtcgctcagcgtgctgccaaatcgcagaaggtcgagcacacagagggcgttcttcgccagttcctggtcgagcctttcgttcctcacccggacggcaccgagtactacatcaacatcaactccgtcagagatggcgactggatcctcttcacccacgagggtggtgtagatgttggtgatgtcgatgcaaaggccgagaagttgttgatcccggtcgacttgtccgaatacccttcgaacgaggagatcgcggcgacgctgctgaagaaggtgcccaagggcgttcacaatgtgctggtcgactttatcactcgcctctatgccgtctacgttgactgccagttcacatacctcgagatcaaccctctcgttgttattcccaacgcagatgccacctcggctgaggttcacttcctcgatttggccgccaagttggatcagactgcggacttcgagtgcggtgccaaatgggcgattgcccgtgctcctgtgaacctgggcatcactgccgtgtcatctgctggtgacaaggtaagcgttgatgccggcccgccgatcgaattccctgcaccttttggtcgtgagctgaccaaggaagaggcttacatcgctgagatggatgccaagactggtgcatccctcaagctcactgttttgaaccctaacggccgcatttggacattggttgcaggtggtggtgcttccgtcgtttatgctgatgccattgcgtctgccgggttcgccgacgatctggcgaactatggtgaatactccggtgctcctaccgagtctcaaacatactactatgcccgcaccgtcttagatcttatgctacgcgctcccatgtcccctaagggcaaggtcctgttcatcggtggtggtattgccaacttcacgaacgtcgcttctacattcaagggtgtcattcgtgcgctccgcgagtatgcccatcagttgaatgagcatcacactcagatctgggtgcgtcgtgctggacctaactggcaagagggtctcaagaacatgaaggctgctacgcaagagctgggtctggatgcccacgttttcggcccggatatgcacgtgtcaggaattgtcccactcgctctgatccccggacgattggagcagaacacggtttcggaattccaaggctaaacaccttgatttgatttaatgcggttggggtcactacaatcatgagaagatgaattaagacggccatgaagtcaggtagctgattatcatggtatgtacgttgagaggcactaggtaaatatccggattaggtgacttagctctcttgcggcctgcaattttcgaagagggcatagatattagaagtttgcccgagaacaaaacggcaatagaacattgtaatatgaacgattaaaactcgaacc

SEQ ID NO: 7659 - DNA, 1755 bp, Muscodor strobelii
  misc_feature: SGI cDNA ID NO. 562322
  misc_feature: Encodes the peptide sequence at SEQ ID NO 7660
atgcgttcgacgcccaacttaggaatggtctttatgcccattgctttcctcctaaacaatgcatacttggcggtggccaatgataattcaatagcgctttcgataccctcaacaccaccaaaggggacatctcaggttgtgagcccatcattcgcaggatttggcattgagccgacgagcttattctcatacatgggatatgatcagccaaacgctcttacgactaacctgcttcaaaatttgctaaactacactggtgcaccgccgcatatccggataggaggaaatactcaagactatttatacgatgaaacgatggtaaattggacgtgggtatggaacccaaaggcaactggtcgtggccagggtaattataagagtgatggcatattgatcgggccacgcttctttgaagccgctgatcggcttccacctgccacacctgtgaccatgggtctcaatctagcgtacgacggcgatgactatgtcgagcgtatcacgacgatggcaacaaaagcgctcgaccggacttcgaagaatattaatatcacggggttcgaaataggcaacgaaccagacctctatgcagaaaatggattcagagatgcgtcgtggagcgcgcagacgtacgttggacagtggttagaccgtgccactgcgctgtatcgaaatgttctctccccacgaaatctgtctgcatctttttttgaggcagcggccacggcgtcgacagtctcgccacttggatcagagttccaagtcaaaaatcttgccagcagtgccttaaactcgaatgcaaacgatgtcgggaaatccttcctgcggtcctggaatcaacatgactattactacttcattggcgtaacaccgtcacccatcacccttgcccagcttacacaattccagacaaccgaggaccaattcgcaagctgggcaaagcaagtacagcaggctcatgacaccccatacccttatgcattgcgtgagatgggaatcgtagggccaattggtttgacgggcgtgaccgatgtattcggtgcggcattatggacgctgaatttcctgctttacactgcgagtctgggcgtagaatctgtgcagttccacatgactgataacagcgccgcaagcgcctggcagcctatccaaatccaaggcatacagccctttgtacggcccgtatactatggtgtcgcggcttttgaccagactttaggatccaatggctgcggctctcgtgtgtggcaataccctcctgcaacactttcagtgccagcgggatacataggctacgtcagagcatacgcggtgtacgacggtgatgctctgtcatccatcgtcgtgatcaacggacaacaatcgaatgtctctgtctctagcaagccgtcactagacatacaactgcaacttccttcttctttcagtggtcagacgatacacctcgcctatctgacggcatctggtgctgacgcgacgaatgacacgacatggaacggactcagctaccagttgagcaacgatggaacgccaactgtcgtttcagtctcagaggacactctagatattagtgacgacggaaaagcgactttctccatacgtgacacgcaagccatcgtcgtcacaattggtaagaaagtcgggtctggttctcggagtgactccaattgtggttcagatagtgcggcgtccgggtctatgggcaataccacggatgactcctcggctgctgccacctcgttactctatcaacagtag

SEQ ID NO: 7660 - protein, 584 aa, Muscodor strobelii
  misc_feature: SGI Peptide ID NO. 562322
  misc_feature (23)..(547): NCBI GI: 189206353 Blast Desc: conserved [Pyrenophora tritici-repentis Pt-1C-BFP] gi|187975604|gb|EDU42230.1| conserved [Pyrenophora tritici-repentis Pt-1C-BFP]
  misc_feature (14)..(547): NCBI GI: 169621584 Blast Desc: SNOG_14003 [Phaeosphaeria nodorum SN15] gi|111057508|gb|EAT78628.1| SNOG_14003 [Phaeosphaeria nodorum SN15]
  misc_feature (44)..(556): NCBI GI: 71024703 Blast Desc: UM06434.1 [Ustilago maydis 521] gi|46101974|gb|EAK87207.1| UM06434.1 [Ustilago maydis 521]
  misc_feature (17)..(544): NCBI GI: 261358686 Blast Desc: beta-glucuronidase [Verticillium albo-atrum VaMs.102]
  misc_feature (29)..(532): NCBI GI: 85114813 Blast Desc: NCU00937 [Neurospora crassa OR74A] gi|28926556|gb|EAA35527.1| [Neurospora crassa OR74A] gi|156071386|dbj|BAF75800.1| beta-glucuronidase [Neurospora
  misc_feature (51)..(542): NCBI GI: 171694932 Blast Desc: protein product [Podospora anserina] gi|170947708|emb|CAP59870.1| protein product [Podospora anserina]
  misc_feature (33)..(542): NCBI GI: 170099433 Blast Desc: glycoside hydrolase family 79 protein [Laccaria bicolor S238N-H82] gi|164644460|gb|EDR08710.1| glycoside hydrolase family 79 protein [Laccaria bicolor S238N-H82]
  misc_feature (49)..(543): NCBI GI: 156060939 Blast Desc: SS1G_02612 [Sclerotinia sclerotiorum 1980] gi|154700016|gb|EDN99754.1| SS1G_02612 [Sclerotinia sclerotiorum 1980]
  misc_feature (46)..(542): NCBI GI: 145233889 Blast Desc: An02g11890 [Aspergillus niger] gi|134057255|emb|CAK96418.1| protein product [Aspergillus niger]
  misc_feature (70)..(543): NCBI GI: 154322026 Blast Desc: BC1G_01160 [Botryotinia fuckeliana B05.10] gi|150850407|gb|EDN25600.1| BC1G_01160 [Botryotinia fuckeliana B05.10]
MRSTPNLGMVFMPIAFLLNNAYLAVANDNSIALSIPSTPPKGTSQVVSPSFAGFGIEPTSLFSYMGYDQPNALTTNLLQNLLNYTGAPPHIRIGGNTQDYLYDETMVNWTWVWNPKATGRGQGNYKSDGILIGPRFFEAADRLPPATPVTMGLNLAYDGDDYVERITTMATKALDRTSKNINITGFEIGNEPDLYAENGFRDASWSAQTYVGQWLDRATALYRNVLSPRNLSASFFEAAATASTVSPLGSEFQVKNLASSALNSNANDVGKSFLRSWNQHDYYYFIGVTPSPITLAQLTQFQTTEDQFASWAKQVQQAHDTPYPYALREMGIVGPIGLTGVTDVFGAALWTLNFLLYTASLGVESVQFHMTDNSAASAWQPIQIQGIQPFVRPVYYGVAAFDQTLGSNGCGSRVWQYPPATLSVPAGYIGYVRAYAVYDGDALSSIVVINGQQSNVSVSSKPSLDIQLQLPSSFSGQTIHLAYLTASGADATNDTTWNGLSYQLSNDGTPTVVSVSEDTLDISDDGKATFSIRDTQAIVVTIGKKVGSGSRSDSNCGSDSAASGSMGNTTDDSSAAATSLLYQQ

SEQ ID NO: 7661 - DNA, 1236 bp, Muscodor strobelii
  misc_feature: SGI cDNA ID NO. 562323
  misc_feature: Encodes the peptide sequence at SEQ ID NO 7662
atggatgaaataactaagctattcaaagaggccgttgcggacggccaaatcccgggcgcagtgctagtggccaaagatcttacaggcaaaatcaacatagctgagagttatggagtccgtagtttacgggaagaggattctgagaaacgtcctctcatgcaaatcgacacgcctatgcgtgtcgcatcctgctctaagctattgacttccatcatggttcttcagtgcgtagagcagggcctcgcaaatctcgacgagggccttgacaatttgcttcctgaagttgctggcctaaaagtccttactggttttgataatgatggtaacccagtggagcgcgagcccaagtccccagtactgctaagacacatgctctcacattcctccggtctttgctataccttgacgtttccccttcttcatcaataccggaagtggcagggactagctctcgagcaggattatgataatctcgaccaaaacttcacgtatccgttgctgttcgatccaggcactagttgggcatatggacctaacctcgattggtgctcgagactaatagagagagccagtgggatgtcagcggaagatttcctacagaagtatatcgttgagcctttagaaatcggagcagacaatatgactttcgaactagagaagcacccccaaatgcaggcccgacgcggagacatgacagtccgcggcaccaacgactttacggcccacaataagagcgacagcattattaagttgcattatcaagacgaacagtattggcacaaagatattgcagcccatggcggtcagggcatttatacttcgcctgaagcgtatatgaaggtcctgtggagtattctctctgacgatgggaagctgctttcatcacaaacccgtgacctgttgttcgaaagagcacttagtccggaggcagagaaaggattcgacgactactgtttgatgctgaaagattatgctcccggcgtaccagttcccgtggaaataaagcactctcatagcctggggggcatgctgaccttggaagactgtgatggggatcgctggagacgcaaaggtaacttgtcgtgggcaggtatcaccaacattatctggaacattgacaaagaagcgggactctgttcgatgtgggcattccatatgaagccatggggagacagaatttgcaacgagcttggcactaaatttgagaaagccgtttataatctcctgcatcagtag

SEQ ID NO: 7662 - protein, 411 aa, Muscodor strobelii
  misc_feature: SGI Peptide ID NO. 562323
  misc_feature (4)..(403): Pfam Id: PF00144 Pfam Desc: Beta-lactamase
  misc_feature (4)..(306): Pfam Id: PF00144 Pfam Desc: Beta-lactamase
  misc_feature (8)..(411): NCBI GI: 4959948 Blast Desc: transesterase [Aspergillus terreus]
  misc_feature (8)..(411): NCBI GI: 115385439 Blast Desc: ATEG_09964 [Aspergillus terreus NIH2624] gi|114187713|gb|EAU29413.1| ATEG_09964 [Aspergillus terreus NIH2624]
  misc_feature (1)..(407): NCBI GI: 23574640 Blast Desc: transesterase [Penicillium citrinum]
  misc_feature (1)..(370): NCBI GI: 74275566 Blast Desc: transesterase [Monascus pilosus]
  misc_feature (1)..(406): NCBI GI: 156063242 Blast Desc: SS1G_01737 [Sclerotinia sclerotiorum 1980] gi|154697073|gb|EDN96811.1| SS1G_01737 [Sclerotinia sclerotiorum 1980]
  misc_feature (16)..(406): NCBI GI: 156053728 Blast Desc: SS1G_05711 [Sclerotinia sclerotiorum 1980] gi|154703492|gb|EDO03231.1| SS1G_05711 [Sclerotinia sclerotiorum 1980]
  misc_feature (1)..(406): NCBI GI: 154294458 Blast Desc: BC1G_13749 [Botryotinia fuckeliana B05.10] gi|150844758|gb|EDN19951.1| BC1G_13749 [Botryotinia fuckeliana B05.10]
  misc_feature (1)..(411): NCBI GI: 119485262 Blast Desc: beta-lactamase family protein [Neosartorya fischeri NRRL 181] gi|119410319|gb|EAW20266.1| beta-lactamase family protein [Neosartorya fischeri NRRL 181]
  misc_feature (4)..(407): NCBI GI: 242807404 Blast Desc: transesterase (LovD), [Talaromyces stipitatus ATCC 10500] gi|218715574|gb|EED14996.1| transesterase (LovD), [Talaromyces stipitatus ATCC 10500]
  misc_feature (1)..(407): NCBI GI: 258573097 Blast Desc: beta-lactamase [Uncinocarpus reesii 1704] gi|237900996|gb|EEP75397.1| beta-lactamase [Uncinocarpus reesii 1704]
MDEITKLFKEAVADGQIPGAVLVAKDLTGKINIAESYGVRSLREEDSEKRPLMQIDTPMRVASCSKLLTSIMVLQCVEQGLANLDEGLDNLLPEVAGLKVLTGFDNDGNPVEREPKSPVLLRHMLSHSSGLCYTLTFPLLHQYRKWQGLALEQDYDNLDQNFTYPLLFDPGTSWAYGPNLDWCSRLIERASGMSAEDFLQKYIVEPLEIGADNMTFELEKHPQMQARRGDMTVRGTNDFTAHNKSDSIIKLHYQDEQYWHKDIAAHGGQGIYTSPEAYMKVLWSILSDDGKLLSSQTRDLLFERALSPEAEKGFDDYCLMLKDYAPGVPVPVEIKHSHSLGGMLTLEDCDGDRWRRKGNLSWAGITNIIWNIDKEAGLCSMWAFHMKPWGDRICNELGTKFEKAVYNLLHQ

SEQ ID NO: 7663 - DNA, 498 bp, Muscodor strobelii
  misc_feature: SGI EST ID NO. CUFF.19042.0
  misc_feature: Variant of the nucleotide sequence at SEQ ID NO 7661
cgcgagcccaagtccccagtactgctaagacacatgctctcacattcctccggtctttgctataccttgacgtttccccttcttcatcaataccggaagtggcagggactagctctcgagcaggattatgataatctcgaccaaaacttcacgtatccgttgctgttcgatccaggcactagttgggcatatggacctaacctcgattggtgctcgagactaatagagagagccagtgggatgtcagcggaagatttcctacagaagtatatcgttgagcctttagaaatcggagcagacaatatgactttcgaactagagaagcacccccaaatgcaggcccgacgcggagacatgacagtccgcggcaccaacgactttacggcccacaataagagcgacagcattattaagttgcattatcaagacgaacagtattggcacaaagatattgcagcccatggcggtcagggcatttatacttcgcctgaagcgtat

SEQ ID NO: 7664 - DNA, 2094 bp, Muscodor strobelii
  misc_feature: SGI cDNA ID NO. 562324
  misc_feature: Elevated expression when VOC is produced
  misc_feature: Encodes the peptide sequence at SEQ ID NO 7665
atggagatgccagcggcagacgcttggggtgatgccgggcaggcttcgcagtacaaggtatatcggggccgttggacgaactggtctcgtggccgtatcctaggacagacactaacactgagtcggcgagatggtgatcttctcattgccttcaccgcagcctttatcgcgtttgtgggctctcggttctggcgcatcacttgcctaggattccaccgctaccattccacgacgcaacccgcagacgtcgtccaccaccaaaggcagatcattctgcgcaacagcgcctctgcagaccatggttttactcagcttatccaactgtgctatgcgtggcggtgttcacgtcaactgctcctacgcatgcttccgacacttgtactcgcgtcgatttgcgtcctcggcttcaccctagccagcggcttctcgtcccagatctcatcttctgtaggcaccgaggttctgctcgacggtactgactgctcacgattcacagctagtagcctgagttcttaccccttggccgccgaagtttacacatcgcaaatgatgaggaatgccctaaattatgctcagcgatgctattccaacgcaactgggctgatggaatgcgaaaccttcaccatccagcgcattccgacatttgtcaacaacactgtgggatgcccgtttgacaacagtatatgccgtgtggcttcgcccaacatgtggcttgatacgggtctcatcaatacgcacgatcatctgggagtcaacgcccctccgatgcctcacgaagaccagcatggaaaatacacgttgtataactacggtgactctcttgtgatgccagatggatcgaattacacttataaaatgaaagatatcaagtctcagtataactatggtagtggcgaaatgcctaataatgatttccgtcttgcggcccaggctgcctattccctggatcaagatatcgcttcgggctcagcattcgttccccgtcctgagctacagcagacagatgcagacatagtactcctgttcttttctggcaacggagtgatattcatcggacctatggatgatgcctggtaccgggttacaaccatgtattccgaatttctcgccagtgcagccagcggccctcctgttgttgttcgaagctatcgaccggatgaagcagtatcgcccttaggctgcatagagcgacatcagttctgcttcgcgaatgagacaacatgtggtcccctaggagggttcttcgacgccgtagtgggagccttcgagttggtgggcatggaaaggacaaaaatatttgacgaatatctcgtcttgacagacgaagtcactcgaaatccggaggcaagccgtttggcttgggtggtagctctgttgcaaggtaaccaggcgtcgctagaaggacttgccaatggtcttggcgcgtacctactggcgtcgacacagacacagaaggcaggcacgcagatgccgctcccaattaaccagtggcagctcgacgtcaagtatgcatgggcaatatccctggggtatctacaaggtatctttgttgagaccgcccagggcccgacggacccgagtcttgcagcatctaagatttctccagcgaatcctgcccagcagcagatatgcctaaaccaaaaaatccggagcacgaaatacgcgtccttcaacttcttcgcactcctattcatatatgtgcttggtctaaccatcgtagccatgtcgtacctaatagaaccaatactacgtttgcttcaacagatatggggatacaagacgtatgcacatctagaatggaccacgaacgcgatgttgcagctccataggctcgctcatgacaggaagtacgggaatgatatggcgtggtctcactgcgtcagctcaactccaacgactgctctcgacgtccgtctggcaggtctcgatatcggtgatccggcacacccgcgattgcaatcttcggccatatcggtagattctgattcaaagaagggtcaagatcagggagacggtgagaggaatacgggtagcaatgctaaatgcgattggccggccgcggagcagagttccgatacatcctctcactcttaa

SEQ ID NO: 7665 - protein, 697 aa, Muscodor strobelii
  misc_feature: SGI Peptide ID NO. 562324
  misc_feature (16)..(662): NCBI GI: 169615058 Blast Desc: SNOG_10683 [Phaeosphaeria nodorum SN15] gi|111060957|gb|EAT82077.1| SNOG_10683 [Phaeosphaeria nodorum SN15]
  misc_feature (20)..(669): NCBI GI: 189194015 Blast Desc: conserved [Pyrenophora tritici-repentis Pt-1C-BFP] gi|187978910|gb|EDU45536.1| conserved [Pyrenophora tritici-repentis Pt-1C-BFP]
  misc_feature (16)..(614): NCBI GI: 115399382 Blast Desc: [Aspergillus terreus NIH2624] gi|114192163|gb|EAU33863.1| [Aspergillus terreus NIH2624]
  misc_feature (15)..(627): NCBI GI: 169772941 Blast Desc: [Aspergillus oryzae RIB40] gi|83768800|dbj|BAE58937.1| protein product [Aspergillus oryzae]
  misc_feature (16)..(614): NCBI GI: 119474227 Blast Desc: NFIA_004500 [Neosartorya fischeri NRRL 181] gi|119407142|gb|EAW17092.1| conserved [Neosartorya fischeri NRRL 181]
  misc_feature (16)..(614): NCBI GI: 159128250 Blast Desc: conserved [Aspergillus fumigatus A1163]
  misc_feature (16)..(614): NCBI GI: 70986226 Blast Desc: conserved [Aspergillus fumigatus Af293] gi|66846236|gb|EAL86569.1| conserved [Aspergillus fumigatus Af293]
  misc_feature (20)..(613): NCBI GI: 121699395 Blast Desc: ACLA_082720 [Aspergillus clavatus NRRL 1] gi|119396149|gb|EAW06581.1| ACLA_082720 [Aspergillus clavatus NRRL 1]
  misc_feature (18)..(634): NCBI GI: 46116086 Blast Desc: FG03885.1 [Gibberella zeae PH-1]
  misc_feature (20)..(650): NCBI GI: 256723662 Blast Desc: NECHADRAFT_86728 [Nectria haematococca mpVI 77-13-4]
  misc_feature: Useful for introducing or modulating the production of volatile compounds
MEMPAADAWGDAGQASQYKVYRGRWTNWSRGRILGQTLTLSRRDGDLLIAFTAAFIAFVGSRFWRITCLGFHRYHSTTQPADVVHHQRQIILRNSASADHGFTQLIQLCYAWRCSRQLLLRMLPTLVLASICVLGFTLASGFSSQISSSVGTEVLLDGTDCSRFTASSLSSYPLAAEVYTSQMMRNALNYAQRCYSNATGLMECETFTIQRIPTFVNNTVGCPFDNSICRVASPNMWLDTGLINTHDHLGVNAPPMPHEDQHGKYTLYNYGDSLVMPDGSNYTYKMKDIKSQYNYGSGEMPNNDFRLAAQAAYSLDQDIASGSAFVPRPELQQTDADIVLLFFSGNGVIFIGPMDDAWYRVTTMYSEFLASAASGPPVVVRSYRPDEAVSPLGCIERHQFCFANETTCGPLGGFFDAVVGAFELVGMERTKIFDEYLVLTDEVTRNPEASRLAWVVALLQGNQASLEGLANGLGAYLLASTQTQKAGTQMPLPINQWQLDVKYAWAISLGYLQGIFVETAQGPTDPSLAASKISPANPAQQQICLNQKIRSTKYASFNFFALLFIYVLGLTIVAMSYLIEPILRLLQQIWGYKTYAHLEWTTNAMLQLHRLAHDRKYGNDMAWSHCVSSTPTTALDVRLAGLDIGDPAHPRLQSSAISVDSDSKKGQDQGDGERNTGSNAKCDWPAAEQSSDTSSHS

SEQ ID NO: 7666 - DNA, 2582 bp, Muscodor strobelii
  misc_feature: SGI EST ID NO. CUFF.19051.0
  misc_feature: Variant of the nucleotide sequence at SEQ ID NO 7664
ttgatagataggaacctcgagcgcttcaaatgggtatttcacccgatactctcacgtcgagctgtgggagttacgtcgaattttgatccacgaggcttttactgcttctagaccacatctttcacgccttgaaaagaaggagacgaactcctcataacgaaattgcgactgtctaagcctcttcataacctcctagtcgaacatgaggtgtagtacatgaagtaatttgatcacgatgaattttggggtgaaacttatgtccgaagatatctagggatcttcttcacatgccgacctactgctaaatcaccgacttcatgcccttggaatggagatgccagcggcagacgcttggggtgatgccgggcaggcttcgcagtacaaggtatatcggggccgttggacgaactggtctcgtggccgtatcctaggacagacactaacactgagtcggcgagatggtgatcttctcattgccttcaccgcagcctttatcgcgtttgtgggctctcggttctggcgcatcacttgcctaggattccaccgctaccattccacgacgcaacccgcagacgtcgtccaccaccaaaggcagatcattctgcgcaacagcgcctctgcagaccatggttttactcagcttatccaactgtgctatgcgtggcggtgttcacgtcaactgctcctacgcatgcttccgacacttgtactcgcgtcgatttgcgtcctcggcttcaccctagccagcggcttctcgtcccagatctcatcttctgtaggcaccgaggttctgctcgacggtactgactgctcacgattcacagctagtagcctgagttcttaccccttggccgccgaagtttacacatcgcaaatgatgaggaatgccctaaattatgctcagcgatgctattccaacgcaactgggctgatggaatgcgaaaccttcaccatccagcgcattccgacatttgtcaacaacactgtgggatgcccgtttgacaacagtatatgccgtgtggcttcgcccaacatgtggcttgatacgggtctcatcaatacgcacgatcatctgggagtcaacgcccctccgagtgagagaattttgctgcgacgaatccttcactgcgccccgttgataacagatggatatacagtgcctcacgaagaccagcatggaaaatacacgttgtataactacggtgactctcttgtgatgccagatggatcgaattacacttataaaatgaaagatatcaagtctcagtataactatggtagtggcgaaatgcctaataatgatttccgtcttgcggcccaggctgcctattccctggatcaagatatcgcttcgggctcagcattcgttccccgtcctgagctacagcagacagatgcagacatagtactcctgttcttttctggcaacggagtgatattcatcggacctatggatgatgcctggtaccgggttacaaccatgtattccgaatttctcgccagtgcagccagcggccctcctgttgttgttcgaagctatcgaccggatgaagcagtatcgcccttaggctgcatagagcgacatcagttctgcttcgcgaatgagacaacatgtggtcccctaggagggttcttcgacgccgtagtgggagccttcgagttggtgggcatggaaaggacaaaaatatttgacgaatatctcgtcttgacagacgaagtcactcgaaatccggaggcaagccgtttggcttgggtggtagctctgttgcaaggtaaccaggcgtcgctagaaggacttgccaatggtcttggcgcgtacctactggcgtcgacacagacacagaaggcaggcacgcagatgccgctcccaattaaccagtggcagctcgacgtcaagtatgcatgggcaatatccctggggtatctacaaggtatctttgttgagaccgcccagggcccgacggacccgagtcttgcagcatctaagatttctccagcgaatcctgcccagcagcagatatgcctaaaccaaaaaatccggagcacgaaatacgcgtccttcaacttcttcgcactcctattcatatatgtgcttggtctaaccatcgtagccatgtcgtacctaatagaaccaatactacgtttgcttcaacagatatggggatacaagacgtatgcacatctagaatggaccacgaacgcgatgttgcagctccataggctcgctcatgacaggaagtacgggaatgatatggcgtggtctcactgcgtcagctcaactccaacgactgctctcgacgtccgtctggcaggtctcgatatcggtgatccggcacacccgcgattgcaatcttcggccatatcggtagattctgattcaaagaagggtcaagatcagggagacggtgagaggaatacgggtagcaatgctaaatgcgattggccggccgcggagcagagttccgatacatcctctcactcttaatattttcagcagccttgaatatccggcacaccaatctttaaagatttcatgattttgacgtcaaataagccctactaaaatgggtgagagtttctaa

SEQ ID NO: 7667 - DNA, 1569 bp, Muscodor strobelii
  misc_feature: SGI cDNA ID NO. 562325
  misc_feature: Encodes the peptide sequence at SEQ ID NO 7668
atggcgagcgcaaatgagaagggcctttcggagcaacttcaacacacctcttcacacgcacacgataagcaactcggagatgttcacgaccttcaagacttaacgttactgggttacaaagctgaattgcaacggaaccggtcaatgttcacactcttattccagtctctggcaattgctgcaatcccttatggcttcgggagccctttaatttccgcggtctatggaggaggtcaattgccgatgtttctaggttggatcattgttttaattctagacgaatgcatcgctttatcgctaagcgagttggcttcccgatatcccacgtctgcaggaccttattattggtcttttcagctcgcgagtccaaagtatcgtacactcttgtcattcatcacaggctggtcttggcttattggcaactggactattaccctctctgtaaattttggatttgcttctctcgtcgcagccacgataaacttataccatcccgagctcatcttcgagccttggcaactccttcttatattctacgctctgtgcttcttgacatttttcgttgtggcttttggaaataagatcttaccgttcgtcgacacattctgtgcagtgttcactgctgttagcatactcgttaccctgatcactctgtcagctactgcaaaagacggcaggcattctccaagctatacactaggccactacgatacgagcctgtcaggctggggtaacttctctttctttattggcatacttccggctgcctacactttctcagcgattggcatgatatcatctatggcagaagagtgtgacaagcctacagtgaaattaccaaccgcgctatctctatgtgtgcccgtcggtggcatagccgggctattcttcgttatacccatatgtgcaacattgcctgatctcacagacatactggacgcaccagttggccaagccctcccttatattttcggccgcgttacaggctctccaggaggtggactagcgttgacatttcttgtattcgtgatcacttttttctgttcaatttccatcaccgttgccgcgtcacgatgtacttgggcctttgcacgggacaacgctatacctctggcttggctttgggcaaaaatcgattctcgttatgggacgcctatctgggcgctagccctgacaactgtggtccaactccttctcggtctcatcaacctgggatcctcatccgcgtttctcgcgtttgtctctgtgggagtagtgtcactcgctgtgtcatacggaattcccatcgcaatctctctcgcttaccagcgcaaagaagttaaaacagcacgatggaagttgacagagactataggattcgcagtgaatatattggcagtagcgtggatcgtcttcgagctagtgcttttctcgctgcccactgtccttccagtcacggcagtaagcatgaactatgccatcgtcgttttcgtcgggttcatggttctcagcgcgatctggtatttgatatacgcgcgcaaagtgtacaagggccccccggaatcggatggtctcatgtcaactttatag

SEQ ID NO: 7668 - protein, 522 aa, Muscodor strobelii
  misc_feature: SGI Peptide ID NO. 562325
  misc_feature (51)..(519): Pfam Id: PF00324 Pfam Desc: Amino acid permease
  misc_feature (247)..(503): Pfam Id: PF00324 Pfam Desc: Amino acid permease
  misc_feature (1)..(518): NCBI GI: 46124347 Blast Desc: FG06551.1 [Gibberella zeae PH-1]
  misc_feature (10)..(518): NCBI GI: 242785942 Blast Desc: amino acid permease, [Talaromyces stipitatus ATCC 10500] gi|218720849|gb|EED20268.1| amino acid permease, [Talaromyces stipitatus ATCC 10500]
  misc_feature (29)..(518): NCBI GI: 154290902 Blast Desc: BC1G_15383 [Botryotinia fuckeliana B05.10] gi|150847202|gb|EDN22395.1| BC1G_15383 [Botryotinia fuckeliana B05.10]
  misc_feature (23)..(518): NCBI GI: 212543195 Blast Desc: amino acid permease, [Penicillium marneffei ATCC 18224] gi|210066659|gb|EEA20752.1| amino acid permease, [Penicillium marneffei ATCC 18224]
  misc_feature (82)..(518): NCBI GI: 171691108 Blast Desc: protein product [Podospora anserina] gi|170945502|emb|CAP71614.1| protein product [Podospora anserina]
  misc_feature (12)..(507): NCBI GI: 119496159 Blast Desc: amino acid permease, [Neosartorya fischeri NRRL 181] gi|119413015|gb|EAW22956.1| amino acid permease, [Neosartorya fischeri NRRL 181]
  misc_feature (11)..(518): NCBI GI: 255939648 Blast Desc: Pc16g02210 [Penicillium chrysogenum Wisconsin 54-1255] gi|211585216|emb|CAP92891.1| Pc16g02210 [Penicillium chrysogenum Wisconsin 54-1255]
  misc_feature (11)..(518): NCBI GI: 119191950 Blast Desc: CIMG_00352 [Coccidioides immitis RS]
  misc_feature (11)..(518): NCBI GI: 240106284 Blast Desc: amino acid transporter, [Coccidioides posadasii C735 delta SOWgp]
  misc_feature (3)..(507): NCBI GI: 70995026 Blast Desc: amino acid permease [Aspergillus fumigatus Af293] gi|66849914|gb|EAL90241.1| amino acid permease, [Aspergillus fumigatus Af293] gi|159131035|gb|EDP56148.1| amino acid permease,
MASANEKGLSEQLQHTSSHAHDKQLGDVHDLQDLTLLGYKAELQRNRSMFTLLFQSLAIAAIPYGFGSPLISAVYGGGQLPMFLGWIIVLILDECIALSLSELASRYPTSAGPYYWSFQLASPKYRTLLSFITGWSWLIGNWTITLSVNFGFASLVAATINLYHPELIFEPWQLLLIFYALCFLTFFVVAFGNKILPFVDTFCAVFTAVSILVTLITLSATAKDGRHSPSYTLGHYDTSLSGWGNFSFFIGILPAAYTFSAIGMISSMAEECDKPTVKLPTALSLCVPVGGIAGLFFVIPICATLPDLTDILDAPVGQALPYIFGRVTGSPGGGLALTFLVFVITFFCSISITVAASRCTWAFARDNAIPLAWLWAKIDSRYGTPIWALALTTVVQLLLGLINLGSSSAFLAFVSVGVVSLAVSYGIPIAISLAYQRKEVKTARWKLTETIGFAVNILAVAWIVFELVLFSLPTVLPVTAVSMNYAIVVFVGFMVLSAIWYLIYARKVYKGPPESDGLMSTL

SEQ ID NO: 7669 - DNA, 1491 bp, Muscodor strobelii
  misc_feature: SGI EST ID NO. CUFF.19077.0
  misc_feature: Variant of the nucleotide sequence at SEQ ID NO 7667
ctcagcgattggcatgatatcatctatggcagaagagtgtgacaagcctacagtgaaattaccaaccgcgctatctctatgtgtgcccgtcggtggcatagccgggctattcttcgttatacccatatgtgcaacattgcctgatctcacagacatactggacgcaccagttggccaagccctcccttatattttcggccgcgttacaggctctccaggaggtggactagcgttgacatttcttgtattcgtgatcacttttttctgttcaatttccatcaccgttgccgcgtcacgatgtacttgggcctttgcacgggacaacgctatacctctggcttggctttgggcaaaaatcgattctcgttatgggacgcctatctgggcgctagccctgacaactgtggtccaactccttctcggtctcatcaacctgggatcctcatccgcgtttctcgcgtttgtctctgtgggagtagtgtcactcgctgtgtcatacggaattcccatcgcaatctctctcgcttaccagcgcaaagaagttaaaacagcacgatggaagttgacagagactataggattcgcagtgaatatattggcagtagcgtggatcgtcttcgagctagtgcttttctcgctgcccactgtccttccagtcacggcagtaagcatgaactatgccatcgtcgttttcgtcgggttcatggttctcagcgcgatctggtatttgatatacgcgcgcaaagtgtacaagggccccccggaatcggatggtctcatgtcaactttatagggaggcactcttgcatacagactgaaggatttggtataccggccgatcctgtggaattattctctaggtgcgcagcacattgaccctcccctttcatggggcccgcttcggtcatttctgtacagtcggtcattgctgctcgaccttcttcgaccaccgggatgacacggagctctcgcatattgtcgtttccgtcacatttccagttaaaaaatcgcagcaccctcgcagtcaatcgacgcatcaagggatacattaaaggtaggttcgttgcgatagtcgctacgaatactgctcgaagtgtccatcgatgtgcttgttctgctccgtttccttggtccgagaatataagtgtaacgcgtatgatagcgatcacagcaatgaggatgtcgcctacgatcagtgtgattaagccaagcttcttccacagctttatcttagccatccacaacagtgggaagggtatgtaaaggatatatctggtatttggagagactctgcgttagcctacattatcataagtctagtagacagaagtccacagcttataagacagaacggtttggtgcctgaaagatagtcagatgaacgaataaatcggtgccttactacaaaaagttagtacagatctgaggggaatatgttcggacgaaggaaattaccctagcaaggtgcgactgtacataccatagatgttg

SEQ ID NO: 7670 - DNA, 1005 bp, Muscodor strobelii
  misc_feature: SGI cDNA ID NO. 562326
  misc_feature: Elevated expression when VOC is produced
  misc_feature: Encodes the peptide sequence at SEQ ID NO 7671
atggaggccaccacattcgacggggtactaccctacgtggacgctctcggcactgctccggcatgggctacaacagtgcttctgtgtattggcgcggttgcgctgctgacgctcgtgtacaagctgtacaatcatgcaagcttttatctgctgccgtaccagaatctggacaaataccggcgcgaggacaagtcgtgggcgcttgtgacaggcgggtctgctgggataggtctcgagactgccaaggagctcgcagtccaaggctttaatattctgatcctgggccacctgcctcaagagctcgaagaggcaactcgtacaattcaggcctatgccccgggaaccgaggtcaagatcatcgtaatgaacgccgtaaccgccacacccgagcagattgaggaaggtctcggcgagacactcagcctgccgcttaccgttctagtcaacaatgttgccgtgtcgcccgtcacgttccccggaattcaaaacttggccgagtattcggctgcagatctcgaccgtcagatctttgcgaatgcacgtttcatgtctcacgtaacacgaattctgcttccaaacttggccgtgtatggaccctcgatggttctgagtgtaagctctggtgccaagatgggagtgcctggcattgcaccatattctgcgtgcaaagggtacatagtttcgatgaacagggccatagcccgcgagatgaccgctacaaagcagccagtcgattgtctcacgattattcctggcgatgtcaagacgccgtctaaccacatctctctcactcctggagctcccgacgccaacacgttcgctaaagccatgcttgcgcgtgcccccagggcaatttcaagagggtggcatgagctttatcctatgtggatacactctctttctttccacatggcagatatgatcccaagatcaatgctggagtcttcgcttctttctacatttgagaccaagaggcagcttgtgctcaaatccaagatgaactga

SEQ ID NO: 7671 - protein, 334 aa, Muscodor strobelii
  misc_feature: SGI Peptide ID NO. 562326
  misc_feature (65)..(238): Pfam Id: PF00106 Pfam Desc: short chain dehydrogenase
  misc_feature (65)..(221): Pfam Id: PF00106 Pfam Desc: short chain dehydrogenase
  misc_feature (25)..(325): NCBI GI: 256733838 Blast Desc: NECHADRAFT_77388 [Nectria haematococca mpVI 77-13-4]
  misc_feature (19)..(332): NCBI GI: 171678445 Blast Desc: protein product [Podospora anserina] gi|170937292|emb|CAP61949.1| protein product [Podospora anserina]
  misc_feature (25)..(313): NCBI GI: 171683069 Blast Desc: protein product [Podospora anserina] gi|170941494|emb|CAP67145.1| protein product [Podospora anserina]
  misc_feature (27)..(324): NCBI GI: 258566091 Blast Desc: [Uncinocarpus reesii 1704] gi|237907491|gb|EEP81892.1| [Uncinocarpus reesii 1704]
  misc_feature (15)..(324): NCBI GI: 240111243 Blast Desc: oxidoreductase,short chain dehydrogenase, [Coccidioides posadasii C735 delta SOWgp]
  misc_feature (15)..(324): NCBI GI: 119189415 Blast Desc: CIMG_04755 [Coccidioides immitis RS]
  misc_feature (20)..(326): NCBI GI: 121700733 Blast Desc: short chain dehydrogenase/reductase, [Aspergillus clavatus NRRL 1] gi|119396774|gb|EAW07205.1| short chain dehydrogenase/reductase, [Aspergillus clavatus NRRL 1]
  misc_feature (51)..(267): NCBI GI: 145610509 Blast Desc: MGG_01141 [Magnaporthe grisea 70-15] gi|145017885|gb|EDK02164.1| MGG_01141 [Magnaporthe grisea 70-15]
  misc_feature (30)..(312): NCBI GI: 70996520 Blast Desc: short chain dehydrogenase/reductase [Aspergillus fumigatus Af293] gi|66850650|gb|EAL90977.1| short chain dehydrogenase/reductase, [Aspergillus fumigatus Af293] short
  misc_feature (30)..(313): NCBI GI: 119494437 Blast Desc: short chain dehydrogenase/reductase, [Neosartorya fischeri NRRL 181] gi|119412276|gb|EAW22217.1| short chain dehydrogenase/reductase, [Neosartorya fischeri NRRL 181]
  misc_feature (65)..(278): SWISSPROT Homolog: EC 1.1.1.62 Estradiol 17-beta-dehydrogenase
  misc_feature: Useful for introducing or modulating the production of volatile compounds
MEATTFDGVLPYVDALGTAPAWATTVLLCIGAVALLTLVYKLYNHASFYLLPYQNLDKYRREDKSWALVTGGSAGIGLETAKELAVQGFNILILGHLPQELEEATRTIQAYAPGTEVKIIVMNAVTATPEQIEEGLGETLSLPLTVLVNNVAVSPVTFPGIQNLAEYSAADLDRQIFANARFMSHVTRILLPNLAVYGPSMVLSVSSGAKMGVPGIAPYSACKGYIVSMNRAIAREMTATKQPVDCLTIIPGDVKTPSNHISLTPGAPDANTFAKAMLARAPRAISRGWHELYPMWIHSLSFHMADMIPRSMLESSLLSTFETKRQLVLKSKMN

SEQ ID NO: 7672 - DNA, 3242 bp, Muscodor strobelii
  misc_feature: SGI EST ID NO. CUFF.19295.2
  misc_feature: Variant of the nucleotide sequence at SEQ ID NO 7670
gcccccttgggtagtaataagtcacataatgctggccgccatgttgcgtatgccctgcgtatagcatggctttgggaatagccaagtaacgactaagtaaatgagaagtggattcacgacagacgcctgtattgctctgacagagccgtcacacagcagcctacttctgcccccaagatgacagtattccatcacttgccctatccaccatgttacttcggtaagattcattgtgccatggctacttgtacctagccagattgcaacatgtatggcaagacggagccgaagccctggccggctgtggctcctgggcacaaggaaaggtctcaaggggagtatttagtagatgccaatccctcagcatcgcgagcgtacgttctcgaaggatgagaataaggtaatcgtcctcgacctctacactccttgtcgtctcttgcctcgtctttctttcctacataccgaagcctgacgtttttctttcccgattgtgatcgtcgatactaccttcacctgcatggactttctgcgagatactacccaagtaaagcatatacatcgaacaacacggcactcatgatataacgccagccaacgactatattacacttattttcattatatcaaatatcatatctagaccggatctagacgagagcttagaattcgctatcatttgcctcccgagacactccactactacgacgacgtttccgaagatcaactgccttcccgccgttgaccacttgaccctgaaggtcacacggcagtacggaaagaggctatcatacgacccgacaggacaggccagcggagaggaggagataaagaggcaaagcttgtgcattgcccgcattgcctgcatcgaggtgcatgcaggcgagagcggagtgcggagaaatagaccgattatttaaaccaccatccacaaactaacgacatggaggccaccacattcgacggggtactaccctacgtggacgctctcggcactgctccggcatgggctacaacagtgcttctgtgtattggcgcggttgcgctgctgacgctcgtgtacaagctgtacaatcatgcaagcttttatctgctgccgtaccagaatctggacaaataccggcgcgaggacaagtcgtgggcgcttgtgacaggcgggtctgctgggataggtctcgagactgccaaggagctcgcagtccaaggctttaatattctgatcctgggccacctgcctcaagagctcgaagaggcaactcgtacaattcaggcctatgccccgggaaccgaggtcaagatcatcgtaatgaacgccgtaaccgccacacccgagcagattgaggaaggtctcggcgagacactcagcctgccgcttaccgttctagtcaacaatgttgccgtgtcgcccgtcacgttccccggaattcaaaacttggccgagtattcggctgcagatctcgaccgtcagatctttgcgaatgcacgtttcatgtctcacgtaacacgaattctgcttccaaacttggccgtgtatggaccctcgatggttctgagtgtaagctctggtgccaagatgggagtgcctggcattgcaccatattctgcgtgcaaagggtacatagtttcgatgaacagggccatagcccgcgagatgaccgctacaaagcagccagtcgattgtctcacgattattcctggcgatgtcaagacgccgtctaaccacatctctctcactcctggagctcccgacgccaacacgttcgctaaagccatgcttgcgcgtgcccccagggcaatttcaagagggtggcatgagctttatcctatgtggatacactctctttctttccacatggcagatatgatcccaagatcaatgctggagtcttcgcttctttctacatttgagaccaagaggcagcttgtgctcaaatccaagatgaactgatttgcatttttacggtgtcacgggggtcgtggtttagaagcatattgatcaagatgatcaggaatggcgttgtgtcctttttgttggattatagggttataagagcctactctagtcagatatcgactgaatatggctggtgagagagagattcgcagcagtttcatgcctatagtgctttgagttgtcaagcgcaacgcaaagtctgcttcggagcgtggcatcctactgccatgcaaaactccgtctcggagctatttgggtctcctgaatccagtggaagacctgcaaacaatgttaacgtgcattcatccagcgatagaaaaatagattatcacatacgagagacagagcgtctgaatactttcctggtgtcattatctgccgtgtaataactccgactagacgacactcctacaagcccatgaccgtccaattggcacatgagcaccagatgacaattattgaacgcccgaaagtgtgccccgccacgaaaaaaaaggaaatgtgacaagggaaacaaacgggcgtgccttgaaataaagtcctatgaagcagagctggcttgctaaatggacaaatagctagttgctccagtgatgatgggtctgcatccactggttgttatggtatgcagcatggcccgaaaactcgccactgagaggggaagattgttccgttgagccacgaagagccggatctattatatcttgttccccgccctgagcgtaggaatacgaatcccattggtgcattgatgctggattcgagacacttgaatatcctcctgaataatgatcatgacccgaatattggtaatctggccagctgttagtagaagctctcgccaattgaaaagagaagacgtctcatgtattagcatcattaatgaaagtgcttgaatgatgcatgatgaatcggagtgataacaaaaaaaaccgaccttgattataactgtacgagtcgtggatgggcggaaggtggtgagtaaattggctggtgccgtgattgacgacacctatgtcatggcttgagttgagatagtcggttgacgggagagaacgatcagtgctaacgctggacaacgaggaggagccaagaccatctggcgtagctggctcatgcccagcgtgatggccctcgtcagaaataggtgcatctggcgatttcgaagcatttccgttggtgtcgtgcgagatgcgttggtgtcgagtcaagagatcccgacgagagaaagccgacccgcactcacagatatatggcttttctttagtgtctataatgaggatcagcccgg

SEQ ID NO: 7673 - DNA, 972 bp, Muscodor strobelii
  misc_feature: SGI cDNA ID NO. 562327
  misc_feature: Encodes the peptide sequence at SEQ ID NO 7674
atgtccaaacaatacctgaccacgcataccgtggacaatgctcatataaccgacatcttcgcccttgcggcaacacccacctccctcatctctgccagcggctcctcgaccatccacgtccacagcacgaaccagccctccttccctctatcacagtccctctctgccgcccacaaacttggctgccaccacctcgccgtgtcccgtaccggtcgtattgccgcctccgtcggatttggtggtgaggttaagatatggcaggttgctgagtcgggcgaatgggaactgctgggtgagctccagccaggcaagagctccgacaacagcaagaaggccgctgccggtgaaatctgggccattgcgctgagcgaggatggccagtacctagcgtctacgacctacgatggccgcatcaacgtttgggatgttgtcggtgaccgcagcgccacgatccgagagtacgaaactggtagtgccggctctggtagcttcggactttgcgtcgatttgagtcgcgatggaaaactcactgctagtggacatgagagcggtgctgtctacgtcttcaacaacgacactggacgcctacagtacacactagccggactcgtcaaacctgtccgggcgatcgctttctcccccgccggcacgcgcttggccgctgctggcgactcgggcatcatagccatatacgacacaaagcacggcgagcacgtgggaaacttgactggacacacggcctggattacctctatcgactggagtgatacgggcgagtatctgctcagcggcgcttttgacggcaaggccaaagtatggtccgtcgagcgatccgcctgcgtcgctacgcatagcgagacggacaaggcgctctgggccgtccgatggctgcccaaaaccgtgcgcaatgagatgttcgttaccgcgggtgcaaacagaagtctcaccttctaccgagaagctacgggttga

SEQ ID NO: 7674 - protein, 323 aa, Muscodor strobelii
  misc_feature: SGI Peptide ID NO. 562327
  misc_feature (236)..(274): Pfam Id: PF00400 Pfam Desc: WD domain, G-beta repeat
  misc_feature (194)..(232): Pfam Id: PF00400 Pfam Desc: WD domain, G-beta repeat
  misc_feature (104)..(142): Pfam Id: PF00400 Pfam Desc: WD domain, G-beta repeat
  misc_feature (9)..(323): NCBI GI: 261357006 Blast Desc: meiotic recombination protein rec14 [Verticillium albo-atrum VaMs.102]
  misc_feature (1)..(323): NCBI GI: 46123311 Blast Desc: FG06033.1 [Gibberella zeae PH-1]
  misc_feature (1)..(323): NCBI GI: 256733003 Blast Desc: [Nectria haematococca mpVI 77-13-4]
  misc_feature (1)..(323): NCBI GI: 116199799 Blast Desc: CHGG_08055 [Chaetomium globosum CBS 148.51] gi|88179334|gb|EAQ86802.1| CHGG_08055 [Chaetomium globosum CBS 148.51]
  misc_feature (1)..(323): NCBI GI: 156043649 Blast Desc: SS1G_10828 [Sclerotinia sclerotiorum 1980] gi|154695215|gb|EDN94953.1| SS1G_10828 [Sclerotinia sclerotiorum 1980]
  misc_feature (1)..(323): NCBI GI: 16944544 Blast Desc: related to GTP-binding protein beta subunit-like protein [Neurospora crassa]
  misc_feature (1)..(323): NCBI GI: 212543275 Blast Desc: meiotic recombination protein Ski8/Rec14, [Penicillium marneffei ATCC 18224] gi|210066699|gb|EEA20792.1| meiotic recombination protein Ski8/Rec14, [Penicillium marneffei ATCC
  misc_feature (1)..(323): NCBI GI: 189195658 Blast Desc: WD repeat containing protein 61 [Pyrenophora tritici-repentis Pt-1C-BFP] gi|187980046|gb|EDU46672.1| WD repeat containing protein 61 [Pyrenophora tritici-repentis Pt-1C-BFP]
  misc_feature (1)..(323): NCBI GI: 145239011 Blast Desc: An08g00340 [Aspergillus niger] gi|134076655|emb|CAK45186.1| protein product [Aspergillus niger]
  misc_feature (3)..(323): NCBI GI: 242786146 Blast Desc: meiotic recombination protein Ski8/Rec14, [Talaromyces stipitatus ATCC 10500] gi|218720893|gb|EED20312.1| meiotic recombination protein Ski8/Rec14, [Talaromyces stipitatus ATCC
  misc_feature (65)..(275): SWISSPROT Homolog: EC 2.7.11.1 Non-specific serine/threonine protein kinase
MSKQYLTTHTVDNAHITDIFALAATPTSLISASGSSTIHVHSTNQPSFPLSQSLSAAHKLGCHHLAVSRTGRIAASVGFGGEVKIWQVAESGEWELLGELQPGKSSDNSKKAAAGEIWAIALSEDGQYLASTTYDGRINVWDVVGDRSATIREYETGSAGSGSFGLCVDLSRDGKLTASGHESGAVYVFNNDTGRLQYTLAGLVKPVRAIAFSPAGTRLAAAGDSGIIAIYDTKHGEHVGNLTGHTAWITSIDWSDTGEYLLSGAFDGKAKVWSVERSACVATHSETDKALWAVRWLPKTVRNEMFVTAGANRSLTFYREATG

SEQ ID NO: 7675 - DNA, 1482 bp, Muscodor strobelii
  misc_feature: SGI EST ID NO. CUFF.19179.3
  misc_feature: Variant of the nucleotide sequence at SEQ ID NO 7673
caaagatgaagctgtcattcctccagcaccattgtccgatttcaagcaaaccacacatataagtgtgcaaatggactggcgaccatgtccaaacaatacctgaccacgcataccgtggacaatgctcatataaccgacatcttcgcccttgcggcaacacccacctccctcatctctgccagcggctcctcgaccatccacgtccacagcacgaaccagccctccttccctctatcacagtccctctctgccgcccacaaacttggctgccaccacctcgccgtgtcccgtaccggtcgtattgccgcctccgtcggatttggtggtgaggttaagatatggcaggttgctgagtcgggcgaatgggaactgctgggtgagctccagccaggcaagagctccgacaacagcaagaaggccgctgccggtgaaatctgggccattgcgctgagcgaggatggccagtacctagcgtctacgacctacgatggccgcatcaacgtttgggatgttgtcggtgaccgcagcgccacgatccgagagtacgaaactggtagtgccggctctggtagcttcggactttgcgtcgatttgagtcgcgatggaaaactcactgctagtggacatgagagcggtgctgtctacgtcttcaacaacgacactggacgcctacagtacacactagccggactcgtcaaacctgtccgggcgatcgctttctcccccgccggcacgcgcttggccgctgctggcgactcgggcatcatagccatatacgacacaaagcacggcgagcacgtgggaaacttgactggacacacggcctggattacctctatcgactggagtgatacgggcgagtatctgctcagcggcgcttttgacggcaaggccaaagtatggtccgtcgagcgatccgcctgcgtcgctacgcatagcgagacggacaaggcgctctgggccgtccgatggctgcccaaaaccgtgcgcaatgagatgttcgttaccgcgggtgcaaacagaagtctcaccttctaccgagaagctacgggttgatgatcttaatcctaccgatagagcatcgcatagagacacgtgtgtagtggtagagcatagagatggtgtgggcatggcaatatggcatctagcatctgcgtgacacggaatggcgttatggtgagggatacggaaaaggtgtttgtccaggagcaaatcgctacggaagcatgatggcacgtatttcataacgatgatgactgcttgtagcttttgctttagaagagaggatagatggcaaatgaacaaaagaaggtcagagatctatacctcacttcacatcaacatcgcactagaatcgagtcatagccatcacgagctccagggctagcaaaataatgcctgtggctcaggaaccgccccggcgtgagggtgtgcataagccagattacccattttccgcatcaccgcaaggaatgccttgag

SEQ ID NO: 7676 - DNA, 456 bp, Muscodor strobelii
  misc_feature: SGI cDNA ID NO. 562328
  misc_feature: Reduced expression when VOC is produced
  misc_feature: Encodes the peptide sequence at SEQ ID NO 7677
atggctgctatccagcaattgcgaatggcctcggccttatcaagcctcgtaccgcgcttttcgacgccggtatttgcctcctcattccgatcagccattctctcgtcccaacagttgcgacagttcccatccgttcccgcactcgccatcgccatccccgctgccatctccaatatcccctcgttactcggtgacatatgggagggcatactgagggccgtgcccaagaagaagacatcacacatgaagaagcgacacaggcagatggctggcaaggctctcaaggatgttacgaatttgaacagatgcccgggctgcggagggatcaagaaaatgcacaccttgtgccccttatgtctgagtagaatatcaggcatgctgggctccgataaagacatgcgtgcagccaagaagtccgaagaggcagcgatcgaggcggaggcaaagaaagcatga

SEQ ID NO: 7677 - protein, 151 aa, Muscodor strobelii
  misc_feature: SGI Peptide ID NO. 562328
  misc_feature (73)..(125): Pfam Id: PF01783 Pfam Desc: Ribosomal L32p protein family
  misc_feature (73)..(119): Pfam Id: PF01783 Pfam Desc: Ribosomal L32p protein family
  misc_feature (10)..(127): NCBI GI: 154316857 Blast Desc: BC1G_03846 [Botryotinia fuckeliana B05.10] gi|150845458|gb|EDN20651.1| BC1G_03846 [Botryotinia fuckeliana B05.10]
  misc_feature (3)..(127): NCBI GI: 39977685 Blast Desc: MGG_06727 [Magnaporthe grisea 70-15] gi|145013756|gb|EDJ98397.1| MGG_06727 [Magnaporthe grisea 70-15]
  misc_feature (31)..(130): NCBI GI: 85076046 Blast Desc: NCU03516 [Neurospora crassa OR74A] gi|16944545|emb|CAC09397.2| related to ribosomal protein YmL32 precursor (mitochondrial) [Neurospora crassa] conserved crassa
  misc_feature (14)..(127): NCBI GI: 171688868 Blast Desc: protein product [Podospora anserina] gi|170944396|emb|CAP70506.1| protein product [Podospora anserina]
  misc_feature (1)..(121): NCBI GI: 156043651 Blast Desc: SS1G_10829 [Sclerotinia sclerotiorum 1980] gi|154695216|gb|EDN94954.1| SS1G_10829 [Sclerotinia sclerotiorum 1980]
  misc_feature (10)..(127): NCBI GI: 261356983 Blast Desc: conserved [Verticillium albo-atrum VaMs.102]
  misc_feature (20)..(123): NCBI GI: 255939582 Blast Desc: Pc16g01860 [Penicillium chrysogenum Wisconsin 54-1255] gi|211585183|emb|CAP92856.1| Pc16g01860 [Penicillium chrysogenum Wisconsin 54-1255]
  misc_feature (1)..(123): NCBI GI: 226280429 Blast Desc: WD domain-containing protein [Paracoccidioides brasiliensis Pb01]
  misc_feature (38)..(124): NCBI GI: 115402031 Blast Desc: ATEG_08506 [Aspergillus terreus NIH2624] gi|114188938|gb|EAU30638.1| ATEG_08506 [Aspergillus terreus NIH2624]
  misc_feature (7)..(128): NCBI GI: 67521872 Blast Desc: AN1393.2 [Aspergillus nidulans FGSC A4] gi|40746067|gb|EAA65223.1| AN1393.2 [Aspergillus nidulans FGSC A4] gi|259488268|tpe|CBF87585.1| TPA: conserved [Aspergillus FGSC
  misc_feature: Useful for introducing or modulating the production of volatile compounds
MAAIQQLRMASALSSLVPRFSTPVFASSFRSAILSSQQLRQFPSVPALAIAIPAAISNIPSLLGDIWEGILRAVPKKKTSHMKKRHRQMAGKALKDVTNLNRCPGCGGIKKMHTLCPLCLSRISGMLGSDKDMRAAKKSEEAAIEAEAKKA

SEQ ID NO: 7678 - DNA, 1141 bp, Muscodor strobelii
  misc_feature: SGI EST ID NO. CUFF.19182.0
  misc_feature: Variant of the nucleotide sequence at SEQ ID NO 7676
cgaagcttgagtttggcggctcgagcttcgagatttttcgagctgtctccagactcaccagcaacctaagatatcccaattgccagaacctaatatcagaacttggaacagcccagtccatatagacctgcgtataatactacaccgggaacgcaagtgcaaatcgtccattgtggttgttgagcctggcgcacgtcgttgctgccatcctccgtgcatggcccgaaacgagcgccatctttagacgatacagaaacagtcgcgatggctgctatccagcaattgcgaatggcctcggccttatcaagcctcgtaccgcgcttttcgacgccggtatttgcctcctcattccgatcagccattctctcgtcccaacagttgcgacagttcccatccgttcccgcactcgccatcgccatccccgctgccatctccaatatcccctcgttactcggtgacatatgggagggcatactgagggccgtgcccaagaagaagacatcacacatgaagaagcgacacaggcagatggctggcaaggctctcaaggatgttacgaatttgaacagatgcccgggctgcggagggatcaagaaaatgcacaccttgtgccccttatgtctgagtagaatatcaggcatgctgggctccgataaagacatgcgtgcagccaagaagtccgaagaggcagcgatcgaggcggaggcaaagaaagcatgatcgacctattgatatggaaaagggagccgacacgcagcctttacagacatatgtttgcattttgctcaggcgttgggaattggcatagagggggcgacactagcaacaaatacgggcggtcaagctgcttatcagtgtatatgtgttgtaaaacattgtaaaacatcaggatataccgatcaaggaagctacactggattcgggctctattgcgcaaatagtgccatgcaatagtttgtacagcccgtaaggtacatggccaatgttcccatgtggaattgaggaaactacggcatgagcgtctgcgacgatatttatatcgctgtccagaaatcttattgaacctctatgcggatctagtccacacgtgagcattataagttgcattcatgacaagagtgtatcatattgcacatggttg

SEQ ID NO: 7679 - DNA, 1005 bp, Muscodor strobelii
  misc_feature: SGI cDNA ID NO. 562329
  misc_feature: Reduced expression when VOC is produced
  misc_feature: Encodes the peptide sequence at SEQ ID NO 7680
atggccactcctaccgtctatcccaacagccatgtcggattcgatagtatcacctctcagattgagcgcaaacttctgaagaggggtttccagttcaacgttatctgtgtcggccagacgggcttgggaaagtctacattgatcaacaccatcttcgcctctcatctcatcgactccaagggtcgtatgctgcccgacgagcagatccgatccaccaccgagatccacccggtatcacacatcattgaggagaatggtgtccgcctacgcctgaacatcgtcgacacacccggctacggtgacctggtcaacaacgaccgctgctgggacgctatcgtcaagtatatcaaggatcagcactcggcctacttgcgcaaggaactcaccgctcagcgtgagcgttacatccaggacacccgcatccactgctgtctgttctttatccagccttccggccactcgctgaagcccattgacatcgttgtcctgaagaagctgtccgatgtcgtcaacgtggttcctgtcattgccaaggccgactccctgaccttggaagagagacaagccttcaaggagcgcatcaaggaggagtttgctttccacaacctcaagatgtacccttacgacaacgatgagcttgatgacgaggagcgctccaccaaccagcagatcaagagccttgtgcctttcgctgttgtcggatccgagaagtcgatcattgtcgacggcaagcaagtccgtggtcgccagaaccgatggggtgtgatcaacgtcgaggacgagaaccactgcgaatttgtctacttgcgcaacttcctcctccgaacgcatctccaggacctcatcgagacgacatcgcagatccactacgagaccttccgtgctaaacaacttctcgcgctcaaggagagtagtgctcagggacacggcagccgacccattagtcctgctgcggatcgcgagattagcagaagctctcagcggatgactatgaacggctactaa

SEQ ID NO: 7680 - protein, 334 aa, Muscodor strobelii
  misc_feature: SGI Peptide ID NO. 562329
  misc_feature (28)..(307): Pfam Id: PF00735 Pfam Desc: Septin
  misc_feature (1)..(334): NCBI GI: 85076041 Blast Desc: cell division control protein 10 [Neurospora crassa OR74A] gi|10241488|emb|CAC09398.1| CELL DIVISION CONTROL PROTEIN 10 [Neurospora crassa] gi|28916896|gb|EAA26635.1| cell division
  misc_feature (1)..(334): NCBI GI: 116199797 Blast Desc: CHGG_08054 [Chaetomium globosum CBS 148.51] gi|88179333|gb|EAQ86801.1| CHGG_08054 [Chaetomium globosum CBS 148.51]
  misc_feature (1)..(334): NCBI GI: 171688870 Blast Desc: protein product [Podospora anserina] gi|170944397|emb|CAP70507.1| protein product [Podospora anserina]
  misc_feature (1)..(334): NCBI GI: 39977683 Blast Desc: MGG_06726 [Magnaporthe grisea 70-15] gi|145013757|gb|EDJ98398.1| MGG_06726 [Magnaporthe grisea 70-15]
  misc_feature (2)..(334): NCBI GI: 240110018 Blast Desc: septin 3, [Coccidioides posadasii C735 delta SOWgp]
  misc_feature (3)..(333): NCBI GI: 238838847 Blast Desc: cell division control protein 10 [Microsporum canis CBS 113480]
  misc_feature (1)..(334): NCBI GI: 261188270 Blast Desc: cell division control protein 10 [Ajellomyces dermatitidis SLH14081] gi|239593298|gb|EEQ75879.1| cell division control protein 10 [Ajellomyces dermatitidis SLH14081] cell 10
  misc_feature (2)..(334): NCBI GI: 119184891 Blast Desc: CIMG_07196 [Coccidioides immitis RS]
  misc_feature (2)..(334): NCBI GI: 154705475 Blast Desc: septin-3 [Paracoccidioides brasiliensis] gi|225678237|gb|EEH16521.1| neuronal-specific septin-3 [Paracoccidioides brasiliensis Pb03] gi|226280428|gb|EEH35994.1|
  misc_feature (5)..(334): NCBI GI: 256732561 Blast Desc: [Nectria haematococca mpVI 77-13-4]
  misc_feature: Useful for introducing or modulating the production of volatile compounds
MATPTVYPNSHVGFDSITSQIERKLLKRGFQFNVICVGQTGLGKSTLINTIFASHLIDSKGRMLPDEQIRSTTEIHPVSHIIEENGVRLRLNIVDTPGYGDLVNNDRCWDAIVKYIKDQHSAYLRKELTAQRERYIQDTRIHCCLFFIQPSGHSLKPIDIVVLKKLSDVVNVVPVIAKADSLTLEERQAFKERIKEEFAFHNLKMYPYDNDELDDEERSTNQQIKSLVPFAVVGSEKSIIVDGKQVRGRQNRWGVINVEDENHCEFVYLRNFLLRTHLQDLIETTSQIHYETFRAKQLLALKESSAQGHGSRPISPAADREISRSSQRMTMNGY

SEQ ID NO: 7681 - DNA, 1827 bp, Muscodor strobelii
  misc_feature: SGI EST ID NO. CUFF.19115.0
  misc_feature: Variant of the nucleotide sequence at SEQ ID NO 7679
caaacacgagccagagatcccttcactgccaaaaaaaatcccaaccaccacatcgccgccttatctcctgcctctcccactgtcattcccatcaaacaccagcatttgcatcgccgaactctgcggcttgcaagtgattgattcccccaattgtcacgcgcgcccacctgatcctacctctttccaacagccgcccgggctcctttttggaataggatccaagcaccgatagaccgccatctttagagcaatccagccaacgtcgcagcaatggccactcctaccgtctatcccaacagccatgtcggattcgatagtatcacctctcagattgagcgcaaacttctgaagaggggtttccagttcaacgttatctgtgtcggccagacgggcttgggaaagtctacattgatcaacaccatcttcgcctctcatctcatcgactccaagggtcgtatgctgcccgacgagcagatccgatccaccaccgagatccacccggtatcacacatcattgaggagaatggtgtccgcctacgcctgaacatcgtcgacacacccggctacggtgacctggtcaacaacgaccgctgctgggacgctatcgtcaagtatatcaaggatcagcactcggcctacttgcgcaaggaactcaccgctcagcgtgagcgttacatccaggacacccgcatccactgctgtctgttctttatccagccttccggccactcgctgaagcccattgacatcgttgtcctgaagaagctgtccgatgtcgtcaacgtggttcctgtcattgccaaggccgactccctgaccttggaagagagacaagccttcaaggagcgcatcaaggaggagtttgctttccacaacctcaagatgtacccttacgacaacgatgagcttgatgacgaggagcgctccaccaaccagcagatcaagagccttgtgcctttcgctgttgtcggatccgagaagtcgatcattgtcgacggcaagcaagtccgtggtcgccagaaccgatggggtgtgatcaacgtcgaggacgagaaccactgcgaatttgtctacttgcgcaacttcctcctccgaacgcatctccaggacctcatcgagacgacatcgcagatccactacgagaccttccgtgctaaacaacttctcgcgctcaaggagagtagtgctcagggacacggcagccgacccattagtcctgctgcggatcgcgagattagcagaagctctcagcggatgactatgaacggctactaattaggcccttgatttcgggtttttatcatgctgtctgtgtggcgtactggagcgctcgatttctccacgatagccggcgatgtgtcgacagtctcgatccgtgcaatcacgaccggcacccttcccacaaggcgggtgacggagaatagtgatagggccatccactaggttggtggtttccgtcatgcgcatgagacccggaaaagtttgatttgaaaccgataccaaatattctaaatggctagtaatgagcggttggcaatctggggctgaggagcagagctcttcatgataccatggtcgagagagttgacggatggccccaggacctttgttatgtgtatgtgcgaattgatggatcagcaagcagagcagagttttcgtcaggatgtctgacgattcggatgttcctcttatttccttttagtattcccccgcgagagctctgttcgtctttcaaaaaagctcatcgacgaccgagccttgcgctgtaccgttagtagtcggcttcgatacctaatgacattaaatatgagacttgtgtgtccaagg

SEQ ID NO: 7682 - DNA, 591 bp, Muscodor strobelii
  misc_feature: SGI cDNA ID NO. 562330
  misc_feature: Reduced expression when VOC is produced
  misc_feature: Encodes the peptide sequence at SEQ ID NO 7683
atggcgccgacctcgacaccgcccgccgaccggcggcccctcgtcgtctccggcccctcaggcgtcggcaaaggcactttgatcaaaaggttatttgccgagcacccggatacattcacattctccgtatcgcacacctctcgggccccgcggccaggcgaggcgcacggcgtcgactatttctacgtcaccatgcaggaattcgaggacctgatcgccgccgacggcttcgtggagcacgccaagttcggcagtaaccggtacggcacgagcaaagcaaccatcagcgagcagacagccaagggcaaggtcgtcgtgctcgacatcgagatggagggcgtgaaacaaatccgaaaatccagcatagacgcacgcttcatcttcgtcaaacccccctccttcgaggatctagagaaacgtctccggggccgaggcaccgaaacagaggactcgatgaacaagcgcctgaaccaagctaaagtcgaactagaatacgccgacacgccgggcgtccacgacatcatcatcgtcaacgacgatctcgacgccgcttacaaggagctcgaggatttcgtctacaagtcgacgtaa

SEQ ID NO: 7683 - protein, 196 aa, Muscodor strobelii
  misc_feature: SGI Peptide ID NO. 562330
  misc_feature (47)..(151): Pfam Id: PF00625 Pfam Desc: Guanylate kinase
  misc_feature (48)..(151): Pfam Id: PF00625 Pfam Desc: Guanylate kinase
  misc_feature (4)..(194): NCBI GI: 39977759 Blast Desc: MGG_06764 [Magnaporthe grisea 70-15] gi|145013717|gb|EDJ98358.1| MGG_06764 [Magnaporthe grisea 70-15]
  misc_feature (1)..(193): NCBI GI: 116195446 Blast Desc: conserved [Chaetomium globosum CBS 148.51] gi|88180234|gb|EAQ87702.1| conserved [Chaetomium globosum CBS 148.51]
  misc_feature (1)..(193): NCBI GI: 85108393 Blast Desc: guanylate kinase [Neurospora crassa OR74A] gi|28924171|gb|EAA33326.1| guanylate kinase [Neurospora crassa OR74A]
  misc_feature (7)..(193): NCBI GI: 171691516 Blast Desc: protein product [Podospora anserina] gi|170945706|emb|CAP71819.1| protein product [Podospora anserina]
  misc_feature (8)..(196): NCBI GI: 256731080 Blast Desc: NECHADRAFT_105366 [Nectria haematococca mpVI 77-13-4]
  misc_feature (4)..(193): NCBI GI: 46123157 Blast Desc: FG05956.1 [Gibberella zeae PH-1]
  misc_feature (12)..(192): NCBI GI: 67521876 Blast Desc: AN1395.2 [Aspergillus nidulans FGSC A4] gi|40746069|gb|EAA65225.1| AN1395.2 [Aspergillus nidulans FGSC A4]
  misc_feature (1)..(192): NCBI GI: 169768148 Blast Desc: [Aspergillus oryzae RIB40] gi|83766400|dbj|BAE56543.1| protein product [Aspergillus oryzae]
  misc_feature (12)..(192): NCBI GI: 259488266 Blast Desc: TPA: similar to guanylate kinase (Broad) [Aspergillus nidulans FGSC A4]
  misc_feature (12)..(192): NCBI GI: 70994950 Blast Desc: guanylate kinase [Aspergillus fumigatus Af293] gi|66849886|gb|EAL90213.1| guanylate kinase [Aspergillus fumigatus Af293] gi|159131006|gb|EDP56119.1| guanylate kinase
  misc_feature (12)..(193): SWISSPROT Homolog: EC 2.7.4.8 Guanylate kinase
  misc_feature: Useful for introducing or modulating the production of volatile compounds
MAPTSTPPADRRPLVVSGPSGVGKGTLIKRLFAEHPDTFTFSVSHTSRAPRPGEAHGVDYFYVTMQEFEDLIAADGFVEHAKFGSNRYGTSKATISEQTAKGKVVVLDIEMEGVKQIRKSSIDARFIFVKPPSFEDLEKRLRGRGTETEDSMNKRLNQAKVELEYADTPGVHDIIIVNDDLDAAYKELEDFVYKST

SEQ ID NO: 7684 - DNA, 1229 bp, Muscodor strobelii
  misc_feature: SGI EST ID NO. CUFF.19098.0
  misc_feature: Variant of the nucleotide sequence at SEQ ID NO 7682
tcctcatcagcctcagatgcctgcgcattgttcgacaacggaaatggcttgactcgcattccgattcaccgccttgtggcgcatacattgagccagagattcttgagttaggatattgaattctgccgtgcgctatgctgtgtcatagtatgccggccatcccacttttgcgcctccagctcgccagcgaagcttaatagaaatattggtctgagtaaaaaaaaaatagaggaaagactggtcggccgctctccaccgcggccccgatctccatccttacatgaacactctgcgccacttcgtgacaagtccgcgactatctcttccccgagcctccacacctagcagcatccgacggttcgcaaactccatggcgccgacctcgacaccgcccgccgaccggcggcccctcgtcgtctccggcccctcaggcgtcggcaaaggcactttgatcaaaaggttatttgccgagcacccggatacattcacattctccgtatcgcacacctctcgggccccgcggccaggcgaggcgcacggcgtcgactatttctacgtcaccatgcaggaattcgaggacctgatcgccgccgacggcttcgtggagcacgccaagttcggcagtaaccggtacggcacgagcaaagcaaccatcagcgagcagacagccaagggcaaggtcgtcgtgctcgacatcgagatggagggcgtgaaacaaatccgaaaatccagcatagacgcacgcttcatcttcgtcaaacccccctccttcgaggatctagagaaacgtctccggggccgaggcaccgaaacagaggactcgatgaacaagcgcctgaaccaagctaaagtcgaactagaatacgccgacacgccgggcgtccacgacatcatcatcgtcaacgacgatctcgacgccgcttacaaggagctcgaggatttcgtctacaagtcgacgtaagtctcatcttggcagagagaagatagtttggggaaacggacaagcgacaattggaatatgagtgagatgtgccctgcgaccaataagatactgaaagctgtttcctgttgcatggcttaatagggtaaaaacgaagcgactgtatatcccgtgaagatgagctactatagcgcgtagatctagacaagacaagattggcggctagatagagaaaatacgcatagaagagagagcaaagacgatacccataataaattgataatagagt

SEQ ID NO: 7685 - DNA, 1431 bp, Muscodor strobelii
  misc_feature: SGI cDNA ID NO. 562331
  misc_feature: Encodes the peptide sequence at SEQ ID NO 7686
atgatcttccgcggtgccgtcgctgcgctgagcgctgcggcctccgtggctgctgtcaccaccctcgaggtccaagactctcgattcgtgaaccccaagaccaacgaggaattccagatcataggcatggcctaccagatcggcggcagtgccggctaccagcccgacaagggcaaagatcccctctcagacggcgctgtttgtctgcgtgacgcggctttgggccagatgctgggcatcaacaccatccgtgtctacaatctggaccccgatctgaaccacgacgaatgtgccagcatcttcaatgctgctggtatctacatgctcatcgacgtcaactcccctctcgttggcgagtctctgaacagcgacgagccctggactacatacacccagccctacctgaaccgcactttcgccatcgtcgagaacttcaagaactacgacaacttgctaggcttcttctccgggaacgaggttatcaataacattaagaatggcgaatttgctcccccctacgtccgcgccgtcactcgcgacctgaagaactacatcaagaacaacgcagaccgcaagatccccgtcggctactcggctgctgatgtccgcgacgtcctcgccgacagctacaactacttcacctgtgcgctcgacggcgaagacgacaacgagtcgggtgccgacatgtttgccctcaacagctactcgtggtgcggcgacagcagcttcaccaaggccggttacgaccaactcgttactatcttcaacaagaccagtgttcccgtcttcttttccgagttcggctgcaacacccctgctccgcgtatcttcaccgagatccaggccatctacgactccgagatgaccgacgtcttctccggtggtgttgtctacgagtatggtcaggagaagaacaactatggactcgccactgtcaacgacgatcagtccgttgagctgcttgcagacttccgcaccctccagaatcagtacaagaaggttgactggacatccgttcagtctgtcaaatacacttccaagaccgcggccactgtccccaagtgcaagtccagcctaatcaccgagaaaggttttaacaacaacttcactcttcctgctctgcttccgggtgtgcaaacgtggatcaccaacggtatccccaagaagctcaacggcaagatcatcgatatctctgactacaaggtctctcaaaccgtcaaggacagcgatggacagaccctgactggcctagcggtcaaggctctgagctccgatcagtccaacgttcctggaacagacagctccgacggctcatcgactactgacaacgccagccctcggttggcacccatgggctccggctcgggattcatcttcgccattcccgccgtcgtcgccacgttctttgctatcggtatcacgttagtatag

SEQ ID NO: 7686 - protein, 476 aa, Muscodor strobelii
  misc_feature: SGI Peptide ID NO. 562331
  misc_feature (6)..(335): Pfam Id: PF03198 Pfam Desc: Glycolipid anchored surface protein (GAS1)
  misc_feature (1)..(441): NCBI GI: 116205081 Blast Desc: CHGG_10424 [Chaetomium globosum CBS 148.51] gi|88176552|gb|EAQ84020.1| CHGG_10424 [Chaetomium globosum CBS 148.51]
  misc_feature (1)..(440): NCBI GI: 39977675 Blast Desc: MGG_06722 [Magnaporthe grisea 70-15] gi|145013761|gb|EDJ98402.1| MGG_06722 [Magnaporthe grisea 70-15]
  misc_feature (1)..(436): NCBI GI: 171689600 Blast Desc: protein product [Podospora anserina] gi|170944762|emb|CAP70873.1| protein product [Podospora anserina]
  misc_feature (1)..(441): NCBI GI: 256732562 Blast Desc: NECHADRAFT_123323 [Nectria haematococca mpVI 77-13-4]
  misc_feature (1)..(435): NCBI GI: 85110768 Blast Desc: NCU06781 [Neurospora crassa OR74A] gi|18376009|emb|CAD21216.1| beta (1-3) glucanosyltransferase [Neurospora crassa] gi|28925308|gb|EAA34386.1| NCU06781 crassa
  misc_feature (7)..(435): NCBI GI: 156060463 Blast Desc: SS1G_02370 [Sclerotinia sclerotiorum 1980] gi|154699778|gb|EDN99516.1| SS1G_02370 [Sclerotinia sclerotiorum 1980]
  misc_feature (1)..(443): NCBI GI: 46123319 Blast Desc: FG06037.1 [Gibberella zeae PH-1]
  misc_feature (1)..(439): NCBI GI: 261356981 Blast Desc: 1,3-beta-glucanosyltransferase gel2 [Verticillium albo-atrum VaMs.102]
  misc_feature (14)..(457): NCBI GI: 238840463 Blast Desc: 1,3-beta-glucanosyltransferase [Microsporum canis CBS 113480]
  misc_feature (14)..(441): NCBI GI: 119176109 Blast Desc: CIMG_09801 [Coccidioides immitis RS] gi|240108776|gb|EER26945.1| Glycolipid anchored surface protein, [Coccidioides posadasii C735 delta SOWgp]
MIFRGAVAALSAAASVAAVTTLEVQDSRFVNPKTNEEFQIIGMAYQIGGSAGYQPDKGKDPLSDGAVCLRDAALGQMLGINTIRVYNLDPDLNHDECASIFNAAGIYMLIDVNSPLVGESLNSDEPWTTYTQPYLNRTFAIVENFKNYDNLLGFFSGNEVINNIKNGEFAPPYVRAVTRDLKNYIKNNADRKIPVGYSAADVRDVLADSYNYFTCALDGEDDNESGADMFALNSYSWCGDSSFTKAGYDQLVTIFNKTSVPVFFSEFGCNTPAPRIFTEIQAIYDSEMTDVFSGGVVYEYGQEKNNYGLATVNDDQSVELLADFRTLQNQYKKVDWTSVQSVKYTSKTAATVPKCKSSLITEKGFNNNFTLPALLPGVQTWITNGIPKKLNGKIIDISDYKVSQTVKDSDGQTLTGLAVKALSSDQSNVPGTDSSDGSSTTDNASPRLAPMGSGSGFIFAIPAVVATFFAIGITLV

SEQ ID NO: 7687 - DNA, 2146 bp, Muscodor strobelii
  misc_feature: SGI EST ID NO. CUFF.19230.0
  misc_feature: Variant of the nucleotide sequence at SEQ ID NO 7685
gcctctcgtacctcacctccctcgcctcgtctgcccgctgtctcccactccatgattcttacttaattgaggcgaccgtagttgcgtgtttctgcgttgcgccgcgttcgttgttaactctttcccagtcactctttgatcaacacttgccaaatctctttgcgctcgctcgtcttcgattccgccaggccgatcgcatcagctcccgccccatcactctctctgggacttcgaccatataattcgctctactaccactactactaccaccaccaccatgatcttccgcggtgccgtcgctgcgctgagcgctgcggcctccgtggctgctgtcaccaccctcgaggtccaagactctcgattcgtgaaccccaagaccaacgaggaattccagatcataggcatggcctaccagatcggcggcagtgccggctaccagcccgacaagggcaaagatcccctctcagacggcgctgtttgtctgcgtgacgcggctttgggccagatgctgggcatcaacaccatccgtgtctacaatctggaccccgatctgaaccacgacgaatgtgccagcatcttcaatgctgctggtatctacatgctcatcgacgtcaactcccctctcgttggcgagtctctgaacagcgacgagccctggactacatacacccagccctacctgaaccgcactttcgccatcgtcgagaacttcaagaactacgacaacttgctaggcttcttctccgggaacgaggttatcaataacattaagaatggcgaatttgctcccccctacgtccgcgccgtcactcgcgacctgaagaactacatcaagaacaacgcagaccgcaagatccccgtcggctactcggctgctgatgtccgcgacgtcctcgccgacagctacaactacttcacctgtgcgctcgacggcgaagacgacaacgagtcgggtgccgacatgtttgccctcaacagctactcgtggtgcggcgacagcagcttcaccaaggccggttacgaccaactcgttactatcttcaacaagaccagtgttcccgtcttcttttccgagttcggctgcaacacccctgctccgcgtatcttcaccgagatccaggccatctacgactccgagatgaccgacgtcttctccggtggtgttgtctacgagtatggtcaggagaagaacaactatggactcgccactgtcaacgacgatcagtccgttgagctgcttgcagacttccgcaccctccagaatcagtacaagaaggttgactggacatccgttcagtctgtcaaatacacttccaagaccgcggccactgtccccaagtgcaagtccagcctaatcaccgagaaaggttttaacaacaacttcactcttcctgctctgcttccgggtgtgcaaacgtggatcaccaacggtatccccaagaagctcaacggcaagatcatcgatatctctgactacaaggtctctcaaaccgtcaaggacagcgatggacagaccctgactggcctagcggtcaaggctctgagctccgatcagtccaacgttcctggaacagacagctccgacggctcatcgactactgacaacgccagccctcggttggcacccatgggctccggctcgggattcatcttcgccattcccgccgtcgtcgccacgttctttgctatcggtatcacgttagtatagacggtagcgaagtgatagacgatgaatatgctttttttttcagcgggttgtggttaaaacgaaaacgtggtgttgattgattcccccatttgcatattacttcggccagagatgatacaggctctttattcggtggcgtcctttttttagatgtatacatttgcaccacgtggattggaaaataccaccactggatacttgtatgatacatcccttcagctttgtctgcctggcgtgtgttttgacctgtaaatacttcgatgtacgctggatgctcaggttgtccacgtacaatgagacgcgcttagatgtagtcaattgacttctcgattacaatgatgatttcgcgacagctttgccatcatagatatgatttgttccgtaaagactcggacatgatcctacatgttgtaatgtgccttggtctctacacgttcg

SEQ ID NO: 7688 - DNA, 678 bp, Muscodor strobelii
  misc_feature: SGI cDNA ID NO. 562332
  misc_feature: Encodes the peptide sequence at SEQ ID NO 7689
atgtcttgtctcgacgcattcggctcgccagacgagctaatctacaacagaacttcacgaatctccaacatcacgcgactatcagacaagatcgacattctagtcgacaacatgaaagtcggattcgacacgtacatcaacacggttcctccggtcgtggcctacgcacgctccgccatcgagcttcgcaagcaggagctcaagcttaattcactgaagctccgtctgcagtccgagaccgagctccaggatgcgctccaacaaatgggcgaacccaccctttggtccagcaagcaattcatcgctaccaacatcgccgcagaagaagcccaattcaacctcctaaaagccaaacaagaccagaaaatcgaagacgtcatcacacacctagagtacaaccacccggagccattcgacgccgtaacaatggtccgagaccagaccaagggcatcatcaaggaacttttcgaggtcatggatcagccgctgcctgacggtatcttcgaccctctcttcgaggaactcgagcgctataatctggagactggtttcactggccatgaggagcattctgagactgttagcgttgagcttggtgaggaggctgaggatgagaaggaagcagatgatgtgcctgagccttgggttgatgtccaggttaagaaggacgagtattga

SEQ ID NO: 7689 - protein, 225 aa, Muscodor strobelii
  misc_feature: SGI Peptide ID NO. 562332
MSCLDAFGSPDELIYNRTSRISNITRLSDKIDILVDNMKVGFDTYINTVPPVVAYARSAIELRKQELKLNSLKLRLQSETELQDALQQMGEPTLWSSKQFIATNIAAEEAQFNLLKAKQDQKIEDVITHLEYNHPEPFDAVTMVRDQTKGIIKELFEVMDQPLPDGIFDPLFEELERYNLETGFTGHEEHSETVSVELGEEAEDEKEADDVPEPWVDVQVKKDEY

SEQ ID NO: 7690 - DNA, 900 bp, Muscodor strobelii
  misc_feature: SGI cDNA ID NO. 562333
  misc_feature: Reduced expression when VOC is produced
  misc_feature: Encodes the peptide sequence at SEQ ID NO 7691
atgactaccatcaagagagttgccatagctggggctacaggaaatctagggccttccatagttactcagttaatcaaggctggattcgaagtaactgcattgaccagacagaacagcaccagcaaccttccagagtccgtcaaagtcaaagcagtcgactatgactctgtcgattccttatcgagcgctcttgagaatcagcatgctgttatttcgacccttggatcttcagcattttcgaaacagttgaatttagttcaggctgcgattaatgcgaaagtcgatcgatttattccttctgaattcgggtctgataccggcaacccgaaggcatcaaagttcccagtctttgcggataaggtcgcagttgcggatgctctcaccaaagaagctgagaagggaaacattacttacactcttattcgaaccggacctttcttcgattgggcaatgaaagttggtcttctcttgaacattcccgagaagagcatcgctctatacgatggtggagaccgtctgttcagtaccacaactctcgagactattgggaaagcagtggtcggcatactgaagaacccggaggccactaaaaatcgtggtgtgtacgtccatgatactgccatcaatctgaaacagcttcactcgtgggctgagaatgccacaggtgcctcgtggagcaccaaagtagtgtctattgagaatgatatacttccgcctgcatgggctgagatgaagagcgagaaaccggatccccacaaggctgcatttccgttcatcattgccgccgtgtggggcgaaggatacggtggccatttcgagaaggtcgacaatgagctccttggcttcgaggagttgacggaggctgaggctgaggctgtcgtgatcgccaacttgaaatag

SEQ ID NO: 7691 - protein, 299 aa, Muscodor strobelii
  misc_feature: SGI Peptide ID NO. 562333
  misc_feature (7)..(227): Pfam Id: PF05368 Pfam Desc: NmrA-like family
  misc_feature (7)..(147): Pfam Id: PF05368 Pfam Desc: NmrA-like family
  misc_feature (1)..(294): NCBI GI: 154320313 Blast Desc: BC1G_02137 [Botryotinia fuckeliana B05.10] gi|150854876|gb|EDN30068.1| BC1G_02137 [Botryotinia fuckeliana B05.10]
  misc_feature (4)..(294): NCBI GI: 171682686 Blast Desc: protein product [Podospora anserina] gi|170941302|emb|CAP66952.1| protein product [Podospora anserina]
  misc_feature (1)..(293): NCBI GI: 255932939 Blast Desc: Pc12g11220 [Penicillium chrysogenum Wisconsin 54-1255] gi|211582559|emb|CAP80749.1| Pc12g11220 [Penicillium chrysogenum Wisconsin 54-1255]
  misc_feature (1)..(294): NCBI GI: 238488299 Blast Desc: oxidoreductase CipA-like, [Aspergillus flavus NRRL3357] gi|220697775|gb|EED54115.1| oxidoreductase CipA-like, [Aspergillus flavus NRRL3357]
  misc_feature (6)..(294): NCBI GI: 70995720 Blast Desc: oxidoreductase CipA-like [Aspergillus fumigatus Af293] gi|41581323|emb|CAE47972.1| isoflavone reductase, [Aspergillus fumigatus] gi|66850250|gb|EAL90577.1| oxidoreductase CipA-like,
  misc_feature (1)..(298): NCBI GI: 256734969 Blast Desc: NECHADRAFT_75760 [Nectria haematococca mpVI 77-13-4]
  misc_feature (1)..(294): NCBI GI: 156040832 Blast Desc: SS1G_11394 [Sclerotinia sclerotiorum 1980] gi|154695778|gb|EDN95516.1| SS1G_11394 [Sclerotinia sclerotiorum 1980]
  misc_feature (1)..(289): NCBI GI: 156052331 Blast Desc: SS1G_06331 [Sclerotinia sclerotiorum 1980] gi|154704111|gb|EDO03850.1| SS1G_06331 [Sclerotinia sclerotiorum 1980]
  misc_feature (6)..(294): NCBI GI: 119495464 Blast Desc: NmrA-like family protein [Neosartorya fischeri NRRL 181] gi|119412678|gb|EAW22619.1| NmrA-like family protein [Neosartorya fischeri NRRL 181]
  misc_feature (12)..(294): NCBI GI: 255954093 Blast Desc: Pc21g07590 [Penicillium chrysogenum Wisconsin 54-1255] gi|211589510|emb|CAP95656.1| Pc21g07590 [Penicillium chrysogenum Wisconsin 54-1255]
  misc_feature: Useful for introducing or modulating the production of volatile compounds
MTTIKRVAIAGATGNLGPSIVTQLIKAGFEVTALTRQNSTSNLPESVKVKAVDYDSVDSLSSALENQHAVISTLGSSAFSKQLNLVQAAINAKVDRFIPSEFGSDTGNPKASKFPVFADKVAVADALTKEAEKGNITYTLIRTGPFFDWAMKVGLLLNIPEKSIALYDGGDRLFSTTTLETIGKAVVGILKNPEATKNRGVYVHDTAINLKQLHSWAENATGASWSTKVVSIENDILPPAWAEMKSEKPDPHKAAFPFIIAAVWGEGYGGHFEKVDNELLGFEELTEAEAEAVVIANLK

SEQ ID NO: 7692 - DNA, 1374 bp, Muscodor strobelii
  misc_feature: SGI EST ID NO. CUFF.19118.0
  misc_feature: Variant of the nucleotide sequence at SEQ ID NO 7690
caaaggtcgaacggcaactgaagcggctcttagcttccgatgcggcaaaatatgcctcttttggttagaaagattatacaggtccctgtgtatgctattagctcggagttctagagatgtcggctcggacattatccaaatcatgtcaacaacattgttacgtgatcaccaggcaaagtggtcgttcaaagacctcaattaatcagtcaatgcatgacgagatgtgtcgcaatacatgtctactcgagacttttatgttagataaatttcgtataaaatagaccgatgcagctgcttagggtttgaaaatgcatcactatcagtctcattccaagaatcctaagtcacattgcctcttataggaatatcagactagtccagattcccgaaatccatcatgactaccatcaagagagttgccatagctggggctacaggaaatctagggccttccatagttactcagttaatcaaggctggattcgaagtaactgcattgaccagacagaacagcaccagcaaccttccagagtccgtcaaagtcaaagcagtcgactatgactctgtcgattccttatcgagcgctcttgagaatcagcatgctgttatttcgacccttggatcttcagcattttcgaaacagttgaatttagttcaggctgcgattaatgcgaaagtcgatcgatttattccttctgaattcgggtctgataccggcaacccgaaggcatcaaagttcccagtctttgcggataaggtcgcagttgcggatgctctcaccaaagaagctgagaagggaaacattacttacactcttattcgaaccggacctttcttcgattgggcaatgaaagttggtcttctcttgaacattcccgagaagagcatcgctctatacgatggtggagaccgtctgttcagtaccacaactctcgagactattgggaaagcagtggtcggcatactgaagaacccggaggccactaaaaatcgtggtgtgtacgtccatgatactgccatcaatctgaaacagcttcactcgtgggctgagaatgccacaggtgcctcgtggagcaccaaagtagtgtctattgagaatgatatacttccgcctgcatgggctgagatgaagagcgagaaaccggatccccacaaggctgcatttccgttcatcattgccgccgtgtggggcgaaggatacggtggccatttcgagaaggtcgacaatgagctccttggcttcgaggagttgacggaggctgaggctgaggctgtcgtgatcgccaacttgaaatagaatatggcgagatctcagatatctgactgaaaaggacacacacattcatttccaagactggagtgcgtagccggaaa

SEQ ID NO: 7693 - DNA, 1035 bp, Muscodor strobelii
  misc_feature: SGI cDNA ID NO. 562334
  misc_feature: Encodes the peptide sequence at SEQ ID NO 7694
atgtctcaacgaattctcattgtcggctccggcttcgctggattctgggcagctttagctgcccgccgcttaatcagctcgagcgccgaagaaggcaaccttgcggcaactaacatcgaggtagtcgtgatcgcaccagatgcccgacttgttatgcggccaagactctacgagccagaacccgaaaagtataatgcaccagttgatgacgtgtatttggcatgcggtgtcaagtttgttcacgggatcgttgatcaaatccacgccgagaagaaagaaatcgagttattagatcgtgcgggtacgcgtagcacgatgtcttacgacagattagtcttggcagctgggagccgagtcgtccatccgaagatccctggcctcagcgaacatgccttctccgtggaccagttggaggacgcagttaagctggaaagacatctgcaaagccttgcctctaagcccgtcagtaagggtcgaaataccgtcgtcgtttgtggcgccgggttcacaggagttgagctcgcaaccgagctcccaactcgtctacgtgcaatcttcggatctgatcaagatattcgcgttatcgctgttgagcgagcctcggtcgttggtcccgagctcggtgctaccactcgtcccttcatccacaccgcatttgaggagcttggcgtcgaggtgaaactcaacaccagtgtcacagcgatcgatgatggaggagtgatgctttcctcaggcgagcgcatcgaaacatcaacagcgatctggacggcgggtgtcgttgggagtcatttagctcagcaggtgcctggcgagaaggatcagatgggtcgtctcagggttgggcaggatcttcgcgttccctcaactcccagcatcttagcgactggagacgcagcccatgtcgcagcagacgaccttggtcactgcgctaagatgtcatgtcaacacgctctcccgctcgggaagtttgcggggcataacgctgccgcagatcttctgcaacttcctacgctgtcttattctcagcctatctat

SEQ ID NO: 7694 - protein, 345 aa, Muscodor strobelii
  misc_feature: SGI Peptide ID NO. 562334
  misc_feature (161)..(258): Pfam Id: PF00070 Pfam Desc: Pyridine nucleotide-disulphide oxidoreductase
  misc_feature (4)..(303): Pfam Id: PF07992 Pfam Desc: Pyridine nucleotide-disulphide oxidoreductase
  misc_feature (90)..(303): Pfam Id: PF07992 Pfam Desc: Pyridine nucleotide-disulphide oxidoreductase
  misc_feature (4)..(24): Pfam Id: PF07992 Pfam Desc: Pyridine nucleotide-disulphide oxidoreductase
  misc_feature (3)..(345): NCBI GI: 116200574 Blast Desc: CHGG_10832 [Chaetomium globosum CBS 148.51] gi|88175546|gb|EAQ83014.1| CHGG_10832 [Chaetomium globosum CBS 148.51]
  misc_feature (1)..(345): NCBI GI: 78063783 Blast Desc: FAD-dependent pyridine nucleotide-disulphide oxidoreductase [Burkholderia sp. 383] gi|77971668|gb|ABB13047.1| FAD-dependent pyridine nucleotide-disulphide oxidoreductase sp.
  misc_feature (3)..(345): NCBI GI: 169777879 Blast Desc: [Aspergillus oryzae RIB40] gi|83772142|dbj|BAE62272.1| protein product [Aspergillus oryzae]
  misc_feature (1)..(345): NCBI GI: 115376132 Blast Desc: FAD-dependent pyridine nucleotide-disulphide oxidoreductase [Stigmatella aurantiaca DW4/3-1] gi|115366855|gb|EAU65846.1| FAD-dependent pyridine oxidoreductase
  misc_feature (1)..(345): NCBI GI: 256723216 Blast Desc: NECHADRAFT_51665 [Nectria haematococca mpVI 77-13-4]
  misc_feature (1)..(345): NCBI GI: 94313236 Blast Desc: FAD-dependent pyridine nucleotide-disulphide oxidoreductase [Ralstonia metallidurans CH34] gi|93357088|gb|ABF11176.1| FAD-dependent pyridine oxidoreductase
  misc_feature (1)..(345): NCBI GI: 152983080 Blast Desc: FAD-dependent pyridine nucleotide-disulphide oxidoreductase [Janthinobacterium sp. Marseille] gi|151283157|gb|ABR91567.1| FAD-dependent pyridine oxidoreductase
  misc_feature (1)..(345): NCBI GI: 46137971 Blast Desc: FG10500.1 [Gibberella zeae PH-1]
  misc_feature (1)..(345): NCBI GI: 113867756 Blast Desc: dehydrogenase, oxidoreductase FAD flavoprotein [Ralstonia eutropha H16] gi|113526532|emb|CAJ92877.1| dehydrogenase, oxidoreductase FAD flavoprotein [Ralstonia H16]
  misc_feature (1)..(345): NCBI GI: 124268158 Blast Desc: NADH dehydrogenase [Methylibium petroleiphilum PM1] gi|124260933|gb|ABM95927.1| NADH dehydrogenase [Methylibium petroleiphilum PM1]
  misc_feature (51)..(299): SWISSPROT Homolog: EC 1.6.99.3 NADH dehydrogenase
MSQRILIVGSGFAGFWAALAARRLISSSAEEGNLAATNIEVVVIAPDARLVMRPRLYEPEPEKYNAPVDDVYLACGVKFVHGIVDQIHAEKKEIELLDRAGTRSTMSYDRLVLAAGSRVVHPKIPGLSEHAFSVDQLEDAVKLERHLQSLASKPVSKGRNTVVVCGAGFTGVELATELPTRLRAIFGSDQDIRVIAVERASVVGPELGATTRPFIHTAFEELGVEVKLNTSVTAIDDGGVMLSSGERIETSTAIWTAGVVGSHLAQQVPGEKDQMGRLRVGQDLRVPSTPSILATGDAAHVAADDLGHCAKMSCQHALPLGKFAGHNAAADLLQLPTLSYSQPIY

SEQ ID NO: 7695 - DNA, 1421 bp, Muscodor strobelii
  misc_feature: SGI EST ID NO. CUFF.19121.0
  misc_feature: Variant of the nucleotide sequence at SEQ ID NO 7693
gcaatatttgccggcgactgggctagacttagcgcgacaagagtcaacccttttactaacttgcaacgattgaacgcgactccgagtatagggcgagtacccgttttctgtcgctcaccagtattgtcaaggcggtttagctttcgacaaagtccagaatacgggtcgccgcggacatgacatcaatggcaaacgaagatgaggctattcacgatggcgagtcagagcataaggtgagctcgcaacgtcctctgagacatataagacttcaagcaaacccaagttggacctgggaaggaaagtgaagcgacaggcatctacaagcacatcatcaatcatcaatcgccacttcaacaaggaacaacacaactcagatattcatcgcaatgtctcaacgaattctcattgtcggctccggcttcgctggattctgggcagctttagctgcccgccgcttaatcagctcgagcgccgaagaaggcaaccttgcggcaactaacatcgaggtagtcgtgatcgcaccagatgcccgacttgttatgcggccaagactctacgagccagaacccgaaaagtataatgcaccagttgatgacgtgtatttggcatgcggtgtcaagtttgttcacgggatcgttgatcaaatccacgccgagaagaaagaaatcgagttattagatcgtgcgggtacgcgtagcacgatgtcttacgacagattagtcttggcagctgggagccgagtcgtccatccgaagatccctggcctcagcgaacatgccttctccgtggaccagttggaggacgcagttaagctggaaagacatctgcaaagccttgcctctaagcccgtcagtaagggtcgaaataccgtcgtcgtttgtggcgccgggttcacaggagttgagctcgcaaccgagctcccaactcgtctacgtgcaatcttcggatctgatcaagatattcgcgttatcgctgttgagcgagcctcggtcgttggtcccgagctcggtgctaccactcgtcccttcatccacaccgcatttgaggagcttggcgtcgaggtgaaactcaacaccagtgtcacagcgatcgatgatggaggagtgatgctttcctcaggcgagcgcatcgaaacatcaacagcgatctggacggcgggtgtcgttgggagtcatttagctcagcaggtgcctggcgagaaggatcagatgggtcgtctcagggttgggcaggatcttcgcgttccctcaactcccagcatcttagcgactggagacgcagcccatgtcgcagcagacgaccttggtcactgcgctaagatgtcatgtcaacacgctctcccgctcgggaagtttgcggggcataacgctgccgcagatcttctgcaacttcctacgctgtcttattctcagcctatctat

SEQ ID NO: 7696 - DNA, 2034 bp, Muscodor strobelii
  misc_feature: SGI cDNA ID NO. 562335
  misc_feature: Encodes the peptide sequence at SEQ ID NO 7697
atgccgggcgcaaaacggctacccgagtacccggttccccgttatgaccctctaactgtcaccaagatccggcaatcgacgcaacgtctcgagcggctcgatatcctcatcatacttactagcctatcgaaagtagacgctgtaatggattcagctgatttgtctgctaccaaaggcggcggtggtgcgcgtgtttcattggcctgcgtgccctgtaggcggagacatgttcgctgcgacgctcagcaaccgatctgcattcgctgttcgagcgaaagtaggacatgtgaatatgtgaaatcaaaaagaggcggattggatcgagcaagactcgcggagcatcgtcgtaggcgcgaacttgcaaatgggtcgccgaccgacacaagtcccgactctagaccaccaaggccagcaatagctcccgggagacctaggtcaaaatccggcgacagtcgttcgaccggttcaatcgatcataatctctggtctactgaatcggagacgagcgaccgtgaagtggctttcggctcgccgaattcgacgctattcaatcctaccctggacatccaattctcaaatgttaataacgatccgtttatcaaactttactacaagaactttcatagaaatcatccctgcgtccttccgcagaagaaacttcaacaaatcttcgaaaggaatccgcatcaagagagtcttgtcctcttgatatccgtcctccgtttgataggatctctatactcatgccaagacctgtccgcgtttctacgagacaaagtcgctgagggcatacgtaacgcacatcagctcaagccagatccctacctagcgcaatgtcatctcctttactccatatccgtgtattggcatggcgacaaaactcaagcgcgcgagcatatcgatgctgctacccgtatcgtaatggacttgcggatgaatgaacggcaatatgcttatgagaatggacagggcgatcgtgtcatacaggagtgctggaggcgaacatggtggcaaatagacgcatactacgcggctatcaaacgatcgcctgtcttcccactctccgcagttgagacagatgtcgaattaccctgcgaagaagacgagtacgaatcaggttcaataccgacgccgaaaactctggacgagttcgaattacgagaattcgcacacgagaatcagactttctcttcgttcgcatatctcattggagctacaaggagcatctcgctagctctatcagctattccgcaggaaacgtcaaattggtcttcgcctcagatcatcgcagaggtcgatgcaatcatcgacggctggtttctgttgctgccgaagtcgaagaaagaagtcctgagcgagggcaatgtggtcgacgagcttatgttccaagcccagctggctgtccatgcaaatcttatcacattgcatcggcctttctcaaagctcccgtttcatcctctagaagggatatcaacatgtcttggcgagcccccagatcgcctaccagcaaaggaggaagaaatagttcatacccaacgttgccttcggtcaattgaagcccagatccggctattagtcttacctgttccgccgtttcggcgatgcccattcacaatatgtatgaccgcagcagggaccacaacactacttgctgcgatcaaggttctattttcaggacgacaactcgcggtcgcgcgacatcaactgcgtctcgtcgtcggcttcctcaaagcgcttgcgaaagtgtggcagcagggctgcaaaaacacagaagagatccaaacaattgcgcaagaggttctaagtactaaaccacaaccacgcgcatcgcagaaacagccagcgcccgagcagggcgtcctcacagcgctcggtccgccagcagctgaggatgcaccatgtattgatgcggtagacagctgggacagtccaacattcggtctgaatttcgatgcgcagaacagtttcgaaccgttttggaacgtcaactatgatttccaagcagatatgcctctgtggttcagttcttactaa

SEQ ID NO: 7697 - protein, 677 aa, Muscodor strobelii
  misc_feature: SGI Peptide ID NO. 562335
  misc_feature (67)..(105): Pfam Id: PF00172 Pfam Desc: Fungal Zn(2)-Cys(6) binuclear cluster domain
  misc_feature (62)..(673): NCBI GI: 256723304 Blast Desc: NECHADRAFT_51686 [Nectria haematococca mpVI 77-13-4]
  misc_feature (64)..(620): NCBI GI: 119490831 Blast Desc: C6 zinc finger domain protein [Neosartorya fischeri NRRL 181] gi|119411272|gb|EAW21215.1| C6 zinc finger domain protein [Neosartorya fischeri NRRL 181]
  misc_feature (64)..(603): NCBI GI: 70999085 Blast Desc: C6 transcription factor [Aspergillus fumigatus Af293] gi|66851901|gb|EAL92226.1| C6 transcription factor, [Aspergillus fumigatus Af293] gi|159127281|gb|EDP52396.1| C6 transcription
  misc_feature (54)..(602): NCBI GI: 212546327 Blast Desc: C6 transcription factor, [Penicillium marneffei ATCC 18224] gi|210064837|gb|EEA18932.1| C6 transcription factor, [Penicillium marneffei ATCC 18224]
  misc_feature (63)..(610): NCBI GI: 242795182 Blast Desc: C6 transcription factor, [Talaromyces stipitatus ATCC 10500] gi|218719116|gb|EED18536.1| C6 transcription factor, [Talaromyces stipitatus ATCC 10500]
  misc_feature (49)..(647): NCBI GI: 169773305 Blast Desc: [Aspergillus oryzae RIB40] gi|83768982|dbj|BAE59119.1| protein product [Aspergillus oryzae]
  misc_feature (59)..(673): NCBI GI: 261352804 Blast Desc: C6 zinc finger domain-containing protein [Verticillium albo-atrum VaMs.102]
  misc_feature (49)..(610): NCBI GI: 238491268 Blast Desc: C6 transcription factor, [Aspergillus flavus NRRL3357] gi|220697284|gb|EED53625.1| C6 transcription factor, [Aspergillus flavus NRRL3357]
  misc_feature (64)..(602): NCBI GI: 116200576 Blast Desc: CHGG_10833 [Chaetomium globosum CBS 148.51] gi|88175547|gb|EAQ83015.1| CHGG_10833 [Chaetomium globosum CBS 148.51]
  misc_feature (189)..(602): NCBI GI: 115385220 Blast Desc: conserved [Aspergillus terreus NIH2624] gi|114196849|gb|EAU38549.1| conserved [Aspergillus terreus NIH2624]
MPGAKRLPEYPVPRYDPLTVTKIRQSTQRLERLDILIILTSLSKVDAVMDSADLSATKGGGGARVSLACVPCRRRHVRCDAQQPICIRCSSESRTCEYVKSKRGGLDRARLAEHRRRRELANGSPTDTSPDSRPPRPAIAPGRPRSKSGDSRSTGSIDHNLWSTESETSDREVAFGSPNSTLFNPTLDIQFSNVNNDPFIKLYYKNFHRNHPCVLPQKKLQQIFERNPHQESLVLLISVLRLIGSLYSCQDLSAFLRDKVAEGIRNAHQLKPDPYLAQCHLLYSISVYWHGDKTQAREHIDAATRIVMDLRMNERQYAYENGQGDRVIQECWRRTWWQIDAYYAAIKRSPVFPLSAVETDVELPCEEDEYESGSIPTPKTLDEFELREFAHENQTFSSFAYLIGATRSISLALSAIPQETSNWSSPQIIAEVDAIIDGWFLLLPKSKKEVLSEGNVVDELMFQAQLAVHANLITLHRPFSKLPFHPLEGISTCLGEPPDRLPAKEEEIVHTQRCLRSIEAQIRLLVLPVPPFRRCPFTICMTAAGTTTLLAAIKVLFSGRQLAVARHQLRLVVGFLKALAKVWQQGCKNTEEIQTIAQEVLSTKPQPRASQKQPAPEQGVLTALGPPAAEDAPCIDAVDSWDSPTFGLNFDAQNSFEPFWNVNYDFQADMPLWFSSY

SEQ ID NO: 7698 - DNA, 1567 bp, Muscodor strobelii
  misc_feature: SGI EST ID NO. CUFF.19172.0
  misc_feature: Variant of the nucleotide sequence at SEQ ID NO 7696
cttttttgtaatagacgcatactacgcggctatcaaacgatcgcctgtcttcccactctccgcagttgagacagatgtcgaattaccctgcgaagaagacgagtacgaatcaggttcaataccgacgccgaaaactctggacgagttcgaattacgagaattcgcacacgagaatcagactttctcttcgttcgcatatctcattggagctacaaggagcatctcgctagctctatcagctattccgcaggaaacgtcaaattggtcttcgcctcagatcatcgcagaggtcgatgcaatcatcgacggctggtttctgttgctgccgaagtcgaagaaagaagtcctgagcgagggcaatgtggtcgacgagcttatgttccaagcccagctggctgtccatgcaaatcttatcacattgcatcggcctttctcaaagctcccgtttcatcctctagaagggatatcaacatgtcttggcgagcccccagatcgcctaccagcaaaggaggaagaaatagttcatacccaacgttgccttcggtcaattgaagcccagatccggctattagtcttacctgttccgccgtttcggcgatgcccattcacaatatgtatgaccgcagcagggaccacaacactacttgctgcgatcaaggttctattttcaggacgacaactcgcggtcgcgcgacatcaactgcgtctcgtcgtcggcttcctcaaagcgcttgcgaaagtgtggcagcagggctgcaaaaacacagaagagatccaaacaattgcgcaagaggttctaagtactaaaccacaaccacgcgcatcgcagaaacagccagcgcccgagcagggcgtcctcacagcgctcggtccgccagcagctgaggatgcaccatgtattgatgcggtagacagctgggacagtccaacattcggtctgaatttcgatgcgcagaacagtttcgaaccgttttggaacgtcaactatgatttccaagcagatatgcctctgtggttcagttcttactaaaaagcgcccggggtctgtgccatcagctgatgccttaataatgagtcccgaattccagcgtgggtatacacagtattggttgagcccacacacatcaactttatgcgaaatccaatttagtctattcccgagagaaattgtacttatagtgacggactagaatgtaaaaattctctactcaaaagagcaacacggccgacgctcggtcgagcgccccggtcggattgcctaggcggtgttgcttcgtgccgtgtcttacaaatccccagccattgtggggagtatttgcatgcagctttgtcggtcacactttgtaccgatacgaggcaagagagacgcacccaatcagatatgatgaatgagtcgattgatagttaatatcactaaatgttgggtgtaatgcatttccgttgtcaattttgatagttgattgagtagagggtcgagagaccgataaccccgcctagcgtcactggggataacggcgtggatttcttccgatgtgagattgtacggtcactgatgttttgagacagc

SEQ ID NO: 7699 - DNA, 678 bp, Muscodor strobelii
  misc_feature: SGI cDNA ID NO. 562336
  misc_feature: Encodes the peptide sequence at SEQ ID NO 7700
atgtcttcgatcaagccggtcaagctctacggccacggtgggcctaacccgatcaaagtgctcatcatcctcgaagagctgggtatcccatatgaggtggaggaggttgccttcgccgacgtgaagggcgattactacacggcgatcaaccccaatggtcgtctaccggccattgatgaccctaacaccggtctgagactctgggaatctggtcccattattgagtatttgatagagaagtacgatactgagcggaagttgtcttttgtacccggttcagatgaatactggcacgcgagacaatacatggccttccagatctccggtcagggtccctattttggaaacgctgtcttcttcaccaagtacgccgacccaccaaacaaggaagcaattgcacgcttcgtgaaggagattcatcgtgtgcactcagtgattgagcgaatcctgggagacgagaagaagaagaactcaagtggagatggcccttggctcgtcggaaacaagatgtcatacgccgatcttgctttctcagtgtggtctggactactttctcagatgtggcctaaggaagatcatgatatcgaccaatatccgctcaccaaggaatggcttggaaagatgtcgtcgcgcaagtcgtgggtcgacataatggccaaacacggacagcagaaatag

SEQ ID NO: 7700 - protein, 225 aa, Muscodor strobelii
  misc_feature: SGI Peptide ID NO. 562336
  misc_feature (5)..(79): Pfam Id: PF02798 Pfam Desc: Glutathione S-transferase, N-terminal domain
  misc_feature (127)..(212): Pfam Id: PF00043 Pfam Desc: Glutathione S-transferase, C-terminal domain
  misc_feature (3)..(219): NCBI GI: 116179510 Blast Desc: CHGG_00383 [Chaetomium globosum CBS 148.51] gi|88184680|gb|EAQ92148.1| CHGG_00383 [Chaetomium globosum CBS 148.51]
  misc_feature (2)..(218): NCBI GI: 85095248 Blast Desc: NCU05780 [Neurospora crassa OR74A] gi|28921499|gb|EAA30804.1| NCU05780 [Neurospora crassa OR74A]
  misc_feature (2)..(213): NCBI GI: 115398221 Blast Desc: ATEG_05524 [Aspergillus terreus NIH2624] gi|114192893|gb|EAU34593.1| ATEG_05524 [Aspergillus terreus NIH2624]
  misc_feature (2)..(224): NCBI GI: 255933730 Blast Desc: Pc12g14390 [Penicillium chrysogenum Wisconsin 54-1255] gi|211582863|emb|CAP81066.1| Pc12g14390 [Penicillium chrysogenum Wisconsin 54-1255]
  misc_feature (1)..(212): NCBI GI: 115433877 Blast Desc: ATEG_08454 [Aspergillus terreus NIH2624] gi|114189927|gb|EAU31627.1| ATEG_08454 [Aspergillus terreus NIH2624]
  misc_feature (4)..(223): NCBI GI: 145233877 Blast Desc: An02g11830 [Aspergillus niger] gi|134057249|emb|CAK96412.1| protein product [Aspergillus niger]
  misc_feature (2)..(212): NCBI GI: 169772887 Blast Desc: [Aspergillus oryzae RIB40] gi|83768773|dbj|BAE58910.1| protein product [Aspergillus oryzae]
  misc_feature (3)..(213): NCBI GI: 169609038 Blast Desc: SNOG_07604 [Phaeosphaeria nodorum SN15] gi|111063950|gb|EAT85070.1| SNOG_07604 [Phaeosphaeria nodorum SN15]
  misc_feature (2)..(212): NCBI GI: 238490794 Blast Desc: glutathione S-transferase Ure2-like, [Aspergillus flavus NRRL3357] gi|220697047|gb|EED53388.1| glutathione S-transferase Ure2-like, [Aspergillus flavus NRRL3357]
  misc_feature (2)..(221): NCBI GI: 242796440 Blast Desc: glutathione S-transferase Ure2-like, [Talaromyces stipitatus ATCC 10500] gi|218719389|gb|EED18809.1| glutathione S-transferase Ure2-like, [Talaromyces stipitatus ATCC 10500]
  misc_feature (9)..(211): SWISSPROT Homolog: EC 2.5.1.18 Glutathione transferase
MSSIKPVKLYGHGGPNPIKVLIILEELGIPYEVEEVAFADVKGDYYTAINPNGRLPAIDDPNTGLRLWESGPIIEYLIEKYDTERKLSFVPGSDEYWHARQYMAFQISGQGPYFGNAVFFTKYADPPNKEAIARFVKEIHRVHSVIERILGDEKKKNSSGDGPWLVGNKMSYADLAFSVWSGLLSQMWPKEDHDIDQYPLTKEWLGKMSSRKSWVDIMAKHGQQK

SEQ ID NO: 7701 - DNA, 994 bp, Muscodor strobelii
  misc_feature: SGI EST ID NO. CUFF.19130.0
  misc_feature: Variant of the nucleotide sequence at SEQ ID NO 7699
cgggcacgcgcaagtattaaagatggctgtctcccgctggaaagctcaagtaaagtttgacactgacatcacaatacatcatcctctctccttaaccagtctcgatactcgcatctcttaaaatcaccatgtcttcgatcaagccggtcaagctctacggccacggtgggcctaacccgatcaaagtgctcatcatcctcgaagagctgggtatcccatatgaggtggaggaggttgccttcgccgacgtgaagggcgattactacacggcgatcaaccccaatggtcgtctaccggccattgatgaccctaacaccggtctgagactctgggaatctggtcccattattgagtatttgatagagaagtacgatactgagcggaagttgtcttttgtacccggttcagatgaatactggcacgcgagacaatacatggccttccagatctccggtcagggtccctattttggaaacgctgtcttcttcaccaagtacgccgacccaccaaacaaggaagcaattgcacgcttcgtgaaggagattcatcgtgtgcactcagtgattgagcgaatcctgggagacgagaagaagaagaactcaagtggagatggcccttggctcgtcggaaacaagatgtcatacgccgatcttgctttctcagtgtggtctggactactttctcagatgtggcctaaggaagatcatgatatcgaccaatatccgctcaccaaggaatggcttggaaagatgtcgtcgcgcaagtcgtgggtcgacataatggccaaacacggacagcagaaatagtttctcatggaggtgagagggcagtggtcgtggaatccgtgggtagtactgtagacgcagatgtagaaagtagaattaatgggatctctgtagctcaactaccgaatagactggcgtatgacgccagcatatgcatgcacctaaatcctgacattacgaatgacctcttggaggaagctgaaaatgtg

SEQ ID NO: 7702 - DNA, 1608 bp, Muscodor strobelii
  misc_feature: SGI cDNA ID NO. 562337
  misc_feature: Encodes the peptide sequence at SEQ ID NO 7703
atggctcctaattcgaagtcgagcaatcgagtcactcgaaattatcacggccagttgtataagacaatacccttcggtgtgtctgagtgcgaagacatagaagaatatcgacccggcggctttgcacctgtacaaattggagacactctcggagaagggagattcgaagtctttcgtaaacttggtttcggtggcattgccattgtctggctatgctgggaaatcgaaactgcgaaatggcgggccgtcaagatcaatgccgccagtcattcacatagcgatcgcggtgattcgaaggctatgagaatctgggaagatcatggcgttgacatagatcaactcgacgagaatcacctattcgtcccactggaaatctttttcgagaacacgtcaaatggaaggcatctttgcacagtaatgcctgttcttggaccttcgttagatcaatggcggaagaacagcataaaagaaaacccagaccgcgtcaacagaatatgttatcaactagttaaaggactcgagttcatgcaccgccatggtctctgccatggagacttccgaccgcagaacatcctcacgaagctcaagccaaatgctctagatctgatttcaaaggacatgatgtcaacaatgcttgacaagccgaggtatgccagtattcgcacaattgatggaaggcgaagtcctcatgcgcctgcgagagtatcgacagctgtttctggaaatccattcaatgatgttgtgctggatgacgccgtcgtcgtagacttcggtgaagcttacttgccaagtaatccgccttcttggtttggaattcctcatatgtatcaaagcccagagatattattcagcaacaagtcatccggtttcgcaagtgacgtctggtctttgggtgtaacattgttggaattgagattggacgagtaccctccaaacaccatttccgttatcatcaggaatatggaacgcttgattggcccgattccacaagtctatcgccttggtgcgcaacgtaagctcgccgaagagctaggtatagatctagaggatgagagcgaactctttggaacaggatcggacgacggcaatcaatttttaatggggccggcggatgtgcctcaaggagaacgagagaaacgagagtcccgtagtgtccattttaccgacagattggagatgaaaattgcatcggaacggcggtcttacggccaggagtgggatcacgaacaccctgatggggccaaagacacattgtttctcgtaaaatacttcttacagcatgatgaggtgcgacagctgagcaacttggtacgcaaattacttaagtatgaccccaaggacagaatgtcggttcgtcaagttttgcaacatccatggttcaagaagcagtatcccaaaaagtcgatagcttgctggaagtattggctgttgggatatcttctcgtacttcttgtttcgctgctcttcatcttacacgaccgtgtgccaacaaaccatctcaccggattaaagtcggaggtcgttgaatgctcaagctctgacatccaactaatctatcttacatcatatcaatcagccaataataaaactcaaatcttattagattga

SEQ ID NO: 7703 - protein, 535 aa, Muscodor strobelii
  misc_feature: SGI Peptide ID NO. 562337
  misc_feature (436)..(460): Pfam Id: PF00069 Pfam Desc: Protein kinase domain
  misc_feature (276)..(310): Pfam Id: PF00069 Pfam Desc: Protein kinase domain
  misc_feature (3)..(461): NCBI GI: 85109105 Blast Desc: NCU05658 [Neurospora crassa OR74A] gi|28924372|gb|EAA33510.1| [Neurospora crassa OR74A]
  misc_feature (26)..(460): NCBI GI: 116191345 Blast Desc: CHGG_05390 [Chaetomium globosum CBS 148.51] gi|88181303|gb|EAQ88771.1| CHGG_05390 [Chaetomium globosum CBS 148.51]
  misc_feature (14)..(461): NCBI GI: 85089807 Blast Desc: NCU10004 [Neurospora crassa OR74A] gi|28919443|gb|EAA28883.1| [Neurospora crassa OR74A]
  misc_feature (13)..(462): NCBI GI: 70982656 Blast Desc: protein kinase [Aspergillus fumigatus Af293] gi|66844480|gb|EAL84818.1| protein kinase, [Aspergillus fumigatus Af293]
  misc_feature (24)..(461): NCBI GI: 121709688 Blast Desc: protein kinase, [Aspergillus clavatus NRRL 1] gi|119400639|gb|EAW11064.1| protein kinase, [Aspergillus clavatus NRRL 1]
  misc_feature (23)..(467): NCBI GI: 85109099 Blast Desc: NCU05655 [Neurospora crassa OR74A] gi|28924369|gb|EAA33507.1| [Neurospora crassa OR74A]
  misc_feature (13)..(462): NCBI GI: 159122901 Blast Desc: protein kinase, [Aspergillus fumigatus A1163]
  misc_feature (27)..(464): NCBI GI: 85091840 Blast Desc: NCU09189 [Neurospora crassa OR74A] gi|28920497|gb|EAA29863.1| [Neurospora crassa OR74A]
  misc_feature (29)..(461): NCBI GI: 256721211 Blast Desc: NECHADRAFT_82323 [Nectria haematococca mpVI 77-13-4]
  misc_feature (21)..(460): NCBI GI: 170092717 Blast Desc: [Laccaria bicolor S238N-H82] gi|164647439|gb|EDR11683.1| [Laccaria bicolor S238N-H82]
MAPNSKSSNRVTRNYHGQLYKTIPFGVSECEDIEEYRPGGFAPVQIGDTLGEGRFEVFRKLGFGGIAIVWLCWEIETAKWRAVKINAASHSHSDRGDSKAMRIWEDHGVDIDQLDENHLFVPLEIFFENTSNGRHLCTVMPVLGPSLDQWRKNSIKENPDRVNRICYQLVKGLEFMHRHGLCHGDFRPQNILTKLKPNALDLISKDMMSTMLDKPRYASIRTIDGRRSPHAPARVSTAVSGNPFNDVVLDDAVVVDFGEAYLPSNPPSWFGIPHMYQSPEILFSNKSSGFASDVWSLGVTLLELRLDEYPPNTISVIIRNMERLIGPIPQVYRLGAQRKLAEELGIDLEDESELFGTGSDDGNQFLMGPADVPQGEREKRESRSVHFTDRLEMKIASERRSYGQEWDHEHPDGAKDTLFLVKYFLQHDEVRQLSNLVRKLLKYDPKDRMSVRQVLQHPWFKKQYPKKSIACWKYWLLGYLLVLLVSLLFILHDRVPTNHLTGLKSEVVECSSSDIQLIYLTSYQSANNKTQILLD

SEQ ID NO: 7704 - DNA, 219 bp, Muscodor strobelii
  misc_feature: SGI EST ID NO. CUFF.19133.0
  misc_feature: Variant of the nucleotide sequence at SEQ ID NO 7702
gacgtcgaggaacaaagacattgactttttagactggcgtgcgacagtcaattttgaaaagaactgaataacgagatcatggtgtattctatattgggtgagctgaaatggctcctaattcgaagtcgagcaatcgagtcactcgaaattatcacggccagttgtataagacaatacccttcggtgtgtctgagtgcgaagacatagaagaatatcgac

SEQ ID NO: 7705 - DNA, 435 bp, Muscodor strobelii
  misc_feature: SGI cDNA ID NO. 562338
  misc_feature: Encodes the peptide sequence at SEQ ID NO 7706
atgaagtccatcattgcccctctcgtcgccatcttcgccgtcgcaaccgcagcaccagatctcagcgcccgtgactcctgtggcatcttaggcgtcatgaacgtagatctcgccaacttaccagcgaacattgaccagtctgcgatccgtcaatgcgctgaacatcctcttcgcgtgatctccacacgagatagagaggatgatagcccgctcacaaaacgctactgctacaaagactcccgattcgggtgtaccaacggttactgttggagaacgtgttctccagacggcaacagctgggatggagagtggtgctggactgcaaagaatggcggcgtgggcgattgggagacatgctccaagaacacagactgtaacgatgacatggcgtgtggtgagggtggctgcgctgactgtgggtgcagctgccactag

SEQ ID NO: 7706 - protein, 144 aa, Muscodor strobelii
  misc_feature: SGI Peptide ID NO. 562338
  misc_feature (1)..(143): NCBI GI: 256725416 Blast Desc: NECHADRAFT_83022 [Nectria haematococca mpVI 77-13-4]
  misc_feature (1)..(143): NCBI GI: 256731214 Blast Desc: NECHADRAFT_106389 [Nectria haematococca mpVI 77-13-4]
  misc_feature (3)..(143): NCBI GI: 171680006 Blast Desc: protein product [Podospora anserina] gi|51950580|gb|AAN39691.2| IDI-2 precursor [Podospora anserina] gi|51950703|gb|AAC24120.2| IDI-2 precursor [Podospora anserina]
  misc_feature (5)..(130): NCBI GI: 67902676 Blast Desc: AN8325.2 [Aspergillus nidulans FGSC A4] gi|40747792|gb|EAA66948.1| AN8325.2 [Aspergillus nidulans FGSC A4] gi|259484249|tpe|CBF80309.1| TPA: conserved [Aspergillus FGSC
  misc_feature (4)..(132): NCBI GI: 255954661 Blast Desc: Pc21g10480 [Penicillium chrysogenum Wisconsin 54-1255] gi|211589794|emb|CAP95945.1| Pc21g10480 [Penicillium chrysogenum Wisconsin 54-1255]
  misc_feature (1)..(143): NCBI GI: 156481664 Blast Desc: victoriocin [Cochliobolus victoriae]
  misc_feature (76)..(143): NCBI GI: 169767590 Blast Desc: [Aspergillus oryzae RIB40] gi|83766121|dbj|BAE56264.1| protein product [Aspergillus oryzae]
  misc_feature (71)..(143): NCBI GI: 238484497 Blast Desc: conserved [Aspergillus flavus NRRL3357] gi|220701537|gb|EED57875.1| conserved [Aspergillus flavus NRRL3357]
  misc_feature (23)..(94): NCBI GI: 121712281 Blast Desc: conserved [Aspergillus clavatus NRRL 1] gi|119401904|gb|EAW12326.1| conserved [Aspergillus clavatus NRRL 1]
  misc_feature (3)..(144): NCBI GI: 169614257 Blast Desc: SNOG_10266 [Phaeosphaeria nodorum SN15] gi|111061481|gb|EAT82601.1| SNOG_10266 [Phaeosphaeria nodorum SN15]
MKSIIAPLVAIFAVATAAPDLSARDSCGILGVMNVDLANLPANIDQSAIRQCAEHPLRVISTRDREDDSPLTKRYCYKDSRFGCTNGYCWRTCSPDGNSWDGEWCWTAKNGGVGDWETCSKNTDCNDDMACGEGGCADCGCSCH

SEQ ID NO: 7707 - DNA, 159 bp, Muscodor strobelii
  misc_feature: SGI EST ID NO. CUFF.19139.0
  misc_feature: Variant of the nucleotide sequence at SEQ ID NO 7705
tctgcagtcgcgtagccgagatcacaaagaatcaaatcccaacagcaaacatcacgaagcaaaattgcacattatcacgcgacaaacaaacacatttcactatcctatcaacaatcctcgcttaagagtcccattcgactctatcaatcatgaagtcca

SEQ ID NO: 7708 - DNA, 783 bp, Muscodor strobelii
  misc_feature: SGI cDNA ID NO. 562339
  misc_feature: Encodes the peptide sequence at SEQ ID NO 7709
atgattcaaaactcagatcgacaaagcactgatctcattctcgacaagagcgggaagaagatcgacatatcattcatgtccttgggagaacttatcaacagtgcctttgatggaggcatagatgacccatggataacccacgaggcccaagaatcaaagcgtctaaatagcaaggcatggcaatcattcaagagatatgaagacgaacgatgggcgagaaatatgcggtcagattataatagcggaaaagagatgcttcttcatacaaatagtaacgacgttgttactgggctgtgcgtcgtatcgaaggaaactcgagctggtatcgtggaagctaacgagttgatcccagttttggagaaaagacttttagactcgcgcaaggcgtcggatcctccggtctctatcgacgactttcttcagcacccagtaggtagtggattgtacgaacacaagctcaaccgttgggggactaactttgaggtgaggatacccattcaaatttcctacatcagtgctaagatggaacatatcctggaggaagagctctacgagattaaacttttagcggtcgcgcctgattctcaacgacagggaattggagcgacactcattgatgatgcgaagaagtttgcaatgaaagacggactgccgctctatgtactggcagagccgaaagcattaggcttttataagaaacagggattcaaatgtcatggctggcacggagatggaagggttgctaacccagacatcgttatgaagtgggaggcgggatcttga

SEQ ID NO: 7709 - protein, 260 aa, Muscodor strobelii
  misc_feature: SGI Peptide ID NO. 562339
  misc_feature (164)..(237): Pfam Id: PF00583 Pfam Desc: Acetyltransferase (GNAT) family
  misc_feature (168)..(237): Pfam Id: PF00583 Pfam Desc: Acetyltransferase (GNAT) family
  misc_feature (175)..(237): NCBI GI: 115402665 Blast Desc: conserved [Aspergillus terreus NIH2624] gi|114189255|gb|EAU30955.1| conserved [Aspergillus terreus NIH2624]
  misc_feature (186)..(258): NCBI GI: 220935770 Blast Desc: acetyltransferase [Thioalkalivibrio sp. HL-EbGR7] gi|219997080|gb|ACL73682.1| acetyltransferase [Thioalkalivibrio sp. HL-EbGR7]
  misc_feature (167)..(240): NCBI GI: 238844759 Blast Desc: conserved [Microsporum canis CBS 113480]
MIQNSDRQSTDLILDKSGKKIDISFMSLGELINSAFDGGIDDPWITHEAQESKRLNSKAWQSFKRYEDERWARNMRSDYNSGKEMLLHTNSNDVVTGLCVVSKETRAGIVEANELIPVLEKRLLDSRKASDPPVSIDDFLQHPVGSGLYEHKLNRWGTNFEVRIPIQISYISAKMEHILEEELYEIKLLAVAPDSQRQGIGATLIDDAKKFAMKDGLPLYVLAEPKALGFYKKQGFKCHGWHGDGRVANPDIVMKWEAGS

SEQ ID NO: 7710 - DNA, 744 bp, Muscodor strobelii
  misc_feature: SGI cDNA ID NO. 562340
  misc_feature: Encodes the peptide sequence at SEQ ID NO 7711
atgaacgcacgctcgcctatcactctaactacagagaatgtagccattcttgatcggctctcacagaacttgcgaaactcagggaagctcaagagcttggtagctgtcgtggagcctgaggcagagttcgaagaggaacagccagcagacacgattctacctctaacagaagacaatctttcgcttttagagcttttagaagagactacgaagcactcggtcaatggcgatggtgccgaggtggaattagagaatgaacaacaagttaccgtcgaccaagttcgagaaggcaagcgagccgcagatgagaccagggccacggcagaaagaacccagccttattactcaagctctcccactcgccgtgctatcgcgcaacatctcaggcgtcgtcgccccgagcgcgttccgaaggccggagaaaggcccctatcccccagcccttcgaaacctcttgagaaccccccacctcgagcagcacctagccacagagcgttgccattgggcacctatcgtattgacaacatggctgcacttatcatgaaccaccagaatcaaatcgagcgtcgccgcgctcaagactccaagaaccgtcgcaagaacaagggaaatcgctcccatcgcttctcctccccgctctcaacgtatcacgaagacatctccttcaacgacaatgaaggcaagcagatgaacagaagccaagcggacgatacagaccgaaacacagatatggtagacgtttga

SEQ ID NO: 7711 - protein, 247 aa, Muscodor strobelii
  misc_feature: SGI Peptide ID NO. 562340
MNARSPITLTTENVAILDRLSQNLRNSGKLKSLVAVVEPEAEFEEEQPADTILPLTEDNLSLLELLEETTKHSVNGDGAEVELENEQQVTVDQVREGKRAADETRATAERTQPYYSSSPTRRAIAQHLRRRRPERVPKAGERPLSPSPSKPLENPPPRAAPSHRALPLGTYRIDNMAALIMNHQNQIERRRAQDSKNRRKNKGNRSHRFSSPLSTYHEDISFNDNEGKQMNRSQADDTDRNTDMVDV

SEQ ID NO: 7712 - DNA, 1035 bp, Muscodor strobelii
  misc_feature: SGI cDNA ID NO. 562341
  misc_feature: Encodes the peptide sequence at SEQ ID NO 7713
atgaccgataacaccaacaatcccccggctactaatagctctgacaacactgctcagcagcttgcaaagaacatcgtcacaaagcaggatatttctggcggagtcttaattgccaagcagaggctcaatcaattcatcgaaagcgatatttacgattatgttaaacgcgctgaatgggcaggagaagtcgctagacttaagacaccggtcgcggctcagtatctgggcaacggtattcatttgatgtgttctgagtatggaattcacacagcaacgccaaaggttccatggtacagatccggaaagcggatcgcggacaagccgccgatggctgaccatcccatcgaggtctatgacgatggtcagtttgcagaaaagctgaagcaagatttggagcgcctatttcagtccgctcttccggaagcacccgaacttaaactatgcgcatataaatatcccctcggtgtaaaagaaaggcacaatgcactcctttggtttctgcaacgtactgtctcatgtaatgatatgatacctatggtcaccgatcttggaatccgcaccaaaacccacaattatagcccactcgaggtcgaagagctcgtggaatgggttcagtccaacgtactcgatcccgaaaaggctagcaacctcctggagaatgccaaggctgcaaacggcccatgtcgaactaaactgaattgcttctcgggaaaagtgagattgttctactgccagatgaagaacataccgagtcaaacgttatctctgatgatgaaatcgcctgagatagcagagtttgagggaacaaaaatcccagaaaactccgtatctcaatgtgagaatcccaagatcttccttaacttcattgtttggagtttcaaactctacaagacccacaggattatgtctgtgaccgcccttggggttagttttatattatttcagaagacgacggccctcaatcagctctgttggtacttccagaatgaagacgaagccaggcaaatagcacattcgaatggaggctctcaataa

SEQ ID NO: 7713 - protein, 344 aa, Muscodor strobelii
  misc_feature: SGI Peptide ID NO. 562341
MTDNTNNPPATNSSDNTAQQLAKNIVTKQDISGGVLIAKQRLNQFIESDIYDYVKRAEWAGEVARLKTPVAAQYLGNGIHLMCSEYGIHTATPKVPWYRSGKRIADKPPMADHPIEVYDDGQFAEKLKQDLERLFQSALPEAPELKLCAYKYPLGVKERHNALLWFLQRTVSCNDMIPMVTDLGIRTKTHNYSPLEVEELVEWVQSNVLDPEKASNLLENAKAANGPCRTKLNCFSGKVRLFYCQMKNIPSQTLSLMMKSPEIAEFEGTKIPENSVSQCENPKIFLNFIVWSFKLYKTHRIMSVTALGVSFILFQKTTALNQLCWYFQNEDEARQIAHSNGGSQ

SEQ ID NO: 7714 - DNA, 487 bp, Muscodor strobelii
  misc_feature: SGI EST ID NO. CUFF.19155.0
  misc_feature: Variant of the nucleotide sequence at SEQ ID NO 7712
gtgagaatcccaagatcttccttaacttcattgtttggagtttcaaactctacaagacccacaggattatgtctgtgaccgcccttggggttagttttatattatttcagaagacgacggccctcaatcagctctgttggtacttccagaatgaagacgaagccaggcaaatagcacattcgaatggaggctctcaataatggttcgatacactcaaatcagaaggtggagccaatttgggtgcttcattttgtctcgcctgtatgcagttggtatacaatagcatatctcagccttcgttgagcaaggatggtatatcatgctcgttattttgacaagccttgatctatgttttttgggtttcggcggtttcggcgttgtttttgtatttggcgttattcttaagactgtttctctcataaggggcgcttttgtgccagtcactcgttatggcgggacggactgtctcttacttattcaacacaag

SEQ ID NO: 7715 - DNA, 213 bp, Muscodor strobelii
  misc_feature: SGI cDNA ID NO. 562342
  misc_feature: Encodes the peptide sequence at SEQ ID NO 7716
atgaagaactccgctgctgtcctcgctctgatcgcaacaagcgttattgcggctccggccactgacgccaaccaagctcgcgggccagttccatgtgcctcgtccctgggcaaggaactgtgggacctttgcgtgtccgcgtactgcccgattactcccgatttcccctattgccactgtgctgagacttgggatccctactggtgcatttaa

SEQ ID NO: 7716 - protein, 70 aa, Muscodor strobelii
  misc_feature: SGI Peptide ID NO. 562342
MKNSAAVLALIATSVIAAPATDANQARGPVPCASSLGKELWDLCVSAYCPITPDFPYCHCAETWDPYWCI

SEQ ID NO: 7717 - DNA, 488 bp, Muscodor strobelii
  misc_feature: SGI EST ID NO. CUFF.19161.0
  misc_feature: Variant of the nucleotide sequence at SEQ ID NO 7715
cttgtgtaacagtttcttggatcgaaaagctataaagacagtctacgttccaacatcacaactcctatcgacctctcaaagcatcgcgcccttccgtcccaatgtcaaagcatctgctacacaacaccggaaatactcgactacaaaacatcttcaaacatttaaacttggtctccgagctaaaatgaagaactccgctgctgtcctcgctctgatcgcaacaagcgttattgcggctccggccactgacgccaaccaagctcgcgggccagttccatgtgcctcgtccctgggcaaggaactgtgggacctttgcgtgtccgcgtactgcccgattactcccgatttcccctattgccactgtgctgagacttgggatccctactggtgcatttaatcgccgagtctgagggtatgtctcctgccgctcggagacactctgattgatgaagtcggcggtatgcggtggatctcgatgtgaatatttg

SEQ ID NO: 7718 - DNA, 2004 bp, Muscodor strobelii
  misc_feature: SGI cDNA ID NO. 562343
  misc_feature: Encodes the peptide sequence at SEQ ID NO 7719
atggccatccccagggatcctcctgcaaaaacacgagtccgcgccgtctccgacgacgcatgggcaactctacccacctacacgtacaaaccgctaacctcaccgcaacacacgcgcgtcatcatactgtcccgtcaaacttccgcgcacggcgactcggcccctttgagcttcgccctagaagagatattcatacccacaaactcagggtcctccggcattgctagcgatgatgtcccctttcctccctcatcttccttctcctcatcgcctctttctccttctcctcctatctgcagcaaaccctatcgtgccctgtcctacacctggggcgggcagacgcccgatcgcccagcgatatgcgacggccggcgaatgctaatcacacggaacgcggaggccgcgattcagcgactcgcgcacccctcgtggggtccgggctggtgggatcgaagagggtatcgtcgtcgattgtgggtagacgcgatctgcatcgatcaggcgtccggtgtcgagaagagcgcacaggtggcgcgcatggcggacatctaccgcggggcgtcagaggtggcagtgtggctgggcggcgacagcgaaggaggtgagcacgatgctggtgacgagaataaaaccgtctccggtggtggtggtggcatcgtgacccagtggtggaaggggacaaccgcatacgcacgtctcctggctttgcatcgccggcacaatcttgaccggtttggccaggagctcataatacgccatccgtactggacgcgcatctggacagtgcaggagatggcggtgatgacgtcgacgcggtcctgctgccggatttacgcgtactgcgggaccggggacgagaaatcgaacggtatccctatcccgatgccgtcgattccagcccgagccctagaaaggatgaaccagggttggtcgatgaatcatcacctaatcggcggcaggggcccgatcctcagtgacgcggcgatgctggtggacgcactgctgagaaagagcgccagcgagccgcgggattacatcttcggcatgcgcgaggtgtacccggctatcctgggcggggtgcgagtcgactacgggcgtgacgtggcggacgtgtatgtagaggccgggcgacgaatcgtggccgtgggcggatgggcacttctatacgcggctgtgcacccagagaaggggacgaggtggcgaacgccgacggcagggggaccagagctgcccacgtgggtgccggactggagctcaccgggcaagacggcttggatgttgaagggtcacgagctcctacccctgggggagggtccaccgctgaccgacaaagaggtagacgaaatgttctcggccgattccagggtgatttctctgcggggtatcgcgttgggcgtagtggtggacgcgagtccgctgtactttgatcaccgaaaacgctgccatgacggaccgcggaaaggggatgcagaggaaagtggcgagaagctctgcggcccggactgcctcgaccgcgtccgggaccagatcaagtcgtggttggcggcatgcgaggccgccaagggagtctctcggcaccaaaaagactacgaggaccagctcgtggcgattctatgctcgttgtcgagcgggcccgtgtgcaccaagcgcgagtaccttgacaacctccttcacacgcaaccagttcccgcgagacaagacccgcaggacaggcgcacgagggagggatttgagcgcatggtaatggagctcagagactggctttccattcgacatttcttcctctgcagcgacggcaagatgggcacgagcctgtatacggagggcctgcggccaggagacatcgtggtgcatcttctgcaggccggcgacgactccgcgctccgaccccggcataacaccgtcgagacgtattatgagttcttggggagagttcagttcgaaggacatgagggacccattgagtttgaaaaagacagggtggaggtatttaaaatcgtatga

SEQ ID NO: 7719 - protein, 667 aa, Muscodor strobelii
  misc_feature: SGI Peptide ID NO. 562343
  misc_feature (103)..(264): Pfam Id: PF06985 Pfam Desc: Heterokaryon incompatibility protein (HET)
  misc_feature (103)..(216): Pfam Id: PF06985 Pfam Desc: Heterokaryon incompatibility protein (HET)
  misc_feature (26)..(418): NCBI GI: 46112797 Blast Desc: FG02900.1 [Gibberella zeae PH-1]
  misc_feature (100)..(468): NCBI GI: 261352562 Blast Desc: HET domain-containing protein [Verticillium albo-atrum VaMs.102]
  misc_feature (103)..(470): NCBI GI: 256733343 Blast Desc: NECHADRAFT_77319 [Nectria haematococca mpVI 77-13-4]
  misc_feature (27)..(420): NCBI GI: 169614059 Blast Desc: SNOG_10164 [Phaeosphaeria nodorum SN15] gi|111061379|gb|EAT82499.1| SNOG_10164 [Phaeosphaeria nodorum SN15]
  misc_feature (67)..(473): NCBI GI: 39974569 Blast Desc: MGG_00569 [Magnaporthe grisea 70-15] gi|145018530|gb|EDK02809.1| MGG_00569 [Magnaporthe grisea 70-15]
  misc_feature (24)..(426): NCBI GI: 256723257 Blast Desc: NECHADRAFT_102011 [Nectria haematococca mpVI 77-13-4]
  misc_feature (103)..(431): NCBI GI: 169622599 Blast Desc: SNOG_14524 [Phaeosphaeria nodorum SN15] gi|111056944|gb|EAT78064.1| SNOG_14524 [Phaeosphaeria nodorum SN15]
  misc_feature (78)..(417): NCBI GI: 46109348 Blast Desc: FG01556.1 [Gibberella zeae PH-1]
  misc_feature (103)..(468): NCBI GI: 256724252 Blast Desc: NECHADRAFT_87550 [Nectria haematococca mpVI 77-13-4]
  misc_feature (81)..(421): NCBI GI: 156061881 Blast Desc: SS1G_03086 [Sclerotinia sclerotiorum 1980] gi|154700487|gb|EDO00226.1| SS1G_03086 [Sclerotinia sclerotiorum 1980]
MAIPRDPPAKTRVRAVSDDAWATLPTYTYKPLTSPQHTRVIILSRQTSAHGDSAPLSFALEEIFIPTNSGSSGIASDDVPFPPSSSFSSSPLSPSPPICSKPYRALSYTWGGQTPDRPAICDGRRMLITRNAEAAIQRLAHPSWGPGWWDRRGYRRRLWVDAICIDQASGVEKSAQVARMADIYRGASEVAVWLGGDSEGGEHDAGDENKTVSGGGGGIVTQWWKGTTAYARLLALHRRHNLDRFGQELIIRHPYWTRIWTVQEMAVMTSTRSCCRIYAYCGTGDEKSNGIPIPMPSIPARALERMNQGWSMNHHLIGGRGPILSDAAMLVDALLRKSASEPRDYIFGMREVYPAILGGVRVDYGRDVADVYVEAGRRIVAVGGWALLYAAVHPEKGTRWRTPTAGGPELPTWVPDWSSPGKTAWMLKGHELLPLGEGPPLTDKEVDEMFSADSRVISLRGIALGVVVDASPLYFDHRKRCHDGPRKGDAEESGEKLCGPDCLDRVRDQIKSWLAACEAAKGVSRHQKDYEDQLVAILCSLSSGPVCTKREYLDNLLHTQPVPARQDPQDRRTREGFERMVMELRDWLSIRHFFLCSDGKMGTSLYTEGLRPGDIVVHLLQAGDDSALRPRHNTVETYYEFLGRVQFEGHEGPIEFEKDRVEVFKIV

SEQ ID NO: 7720 - DNA, 2876 bp, Muscodor strobelii
  misc_feature: SGI EST ID NO. CUFF.19163.0
  misc_feature: Variant of the nucleotide sequence at SEQ ID NO 7718
cacgatacgatgttggagttagaatgtcggatggtaaaggcacagatgatatcctatcagaggtacggtatgagcgtctcgacgcagaaatggcggaattggcggaaatgacagatatggcagaactgatgggacaggcagaggaagcaggacaataacttgtgctggactcttctggcagcaaattatattacataggcgacttgatattcatttttgagccttcgtgagagtccggctaattactcggcggaccatccagctggaaatcgattggaaaatgctgtgtcccaatggattgaatttgcgaggcttcaaaatcctagctgagttgaggtgggaaagggattccagaattcagctccaccaatcgttctcaatcggttgcctcagctgaaaatagagcacctcccgtcatcccgccattttgactcccagatccaaaccattcacaacgagcgagcgcgttttgataaacattgcgtcaagacactcacggctacgagtcaccttgatattctacgaacatgatatgatgaagatgatagagtgcccatggccatccccagggatcctcctgcaaaaacacgagtccgcgccgtctccgacgacgcatgggcaactctacccacctacacgtacaaaccgctaacctcaccgcaacacacgcgcgtcatcatactgtcccgtcaaacttccgcgcacggcgactcggcccctttgagcttcgccctagaagagatattcatacccacaaactcagggtcctccggcattgctagcgatgatgtcccctttcctccctcatcttccttctcctcatcgcctctttctccttctcctcctatctgcagcaaaccctatcgtgccctgtcctacacctggggcgggcagacgcccgatcgcccagcgatatgcgacggccggcgaatgctaatcacacggaacgcggaggccgcgattcagcgactcgcgcacccctcgtggggtccgggctggtgggatcgaagagggtatcgtcgtcgattgtgggtagacgcgatctgcatcgatcaggcgtccggtgtcgagaagagcgcacaggtggcgcgcatggcggacatctaccgcggggcgtcagaggtggcagtgtggctgggcggcgacagcgaaggaggtgagcacgatgctggtgacgagaataaaaccgtctccggtggtggtggtggcatcgtgacccagtggtggaaggggacaaccgcatacgcacgtctcctggctttgcatcgccggcacaatcttgaccggtttggccaggagctcataatacgccatccgtactggacgcgcatctggacagtgcaggagatggcggtgatgacgtcgacgcggtcctgctgccggatttacgcgtactgcgggaccggggacgagaaatcgaacggtatccctatcccgatgccgtcgattccagcccgagccctagaaaggatgaaccagggttggtcgatgaatcatcacctaatcggcggcaggggcccgatcctcagtgacgcggcgatgctggtggacgcactgctgagaaagagcgccagcgagccgcgggattacatcttcggcatgcgcgaggtgtacccggctatcctgggcggggtgcgagtcgactacgggcgtgacgtggcggacgtgtatgtagaggccgggcgacgaatcgtggccgtgggcggatgggcacttctatacgcggctgtgcacccagagaaggggacgaggtggcgaacgccgacggcagggggaccagagctgcccacgtgggtgccggactggagctcaccgggcaagacggcttggatgttgaagggtcacgagctcctacccctgggggagggtccaccgctgaccgacaaagaggtagacgaaatgttctcggccgattccagggtgatttctctgcggggtatcgcgttgggcgtagtggtggacgcgagtccgctgtactttgatcaccgaaaacgctgccatgacggaccgcggaaaggggatgcagaggaaagtggcgagaagctctgcggcccggactgcctcgaccgcgtccgggaccagatcaagtcgtggttggcggcatgcgaggccgccaagggagtctctcggcaccaaaaagactacgaggaccagctcgtggcgattctatgctcgttgtcgagcgggcccgtgtgcaccaagcgcgagtaccttgacaacctccttcacacgcaaccagttcccgcgagacaagacccgcaggacaggcgcacgagggagggatttgagcgcatggtaatggagctcagagactggctttccattcgacatttcttcctctgcagcgacggcaagatgggcacgagcctgtatacggagggcctgcggccaggagacatcgtggtgcatcttctgcaggccggcgacgactccgcgctccgaccccggcataacaccgtcgagacgtattatgagttcttggggagagttcagttcgaaggacatgagggacccattgagtttgaaaaagacagggtggaggtatttaaaatcgtatgattgggaaagcttccttttccaggtcaaattcagagcattattcctaacgggtactgtctcggcaacccggcaacattcttaaactgttggaatgtgtttagaccctgatattcactcttgactcgcggtgcgacaaccggtgtaacgataggtgatgcaatagtgccatatgaaagtagaatgctatctccttctaccaccaagcttccggcactttcaggcactccgcaaagtctatactttgaatagtcgatctgttgctaattttagcaacaatcaatacttgagacaactttcgggaactttcaaccttggcg

SEQ ID NO: 7721 - DNA, 1968 bp, Muscodor strobelii
  misc_feature: SGI cDNA ID NO. 562344
  misc_feature: Encodes the peptide sequence at SEQ ID NO 7722
atgtctagccgacgggtcccgctctcctccaaccagaacatcgccaactcgcctctccgcaacaatggcctcaagcagaagcgaacctgggtccagctgcagcgcgaggagcactacggccaaccgccaccggccaagaagcagatcatcgacgccgccacacaacgggtagtcaagtcaccttcgcagcagccacaaccacaacaacagtctcgtatccctaccaagagtcagatccccgtccagcaacggcgaaccgccagcaactatgacaccaagggggctgcgagggctgagaaagagacattctcagccaaggatatcgagggcatccacaattggcagattcaccaccgggctagattccccaagtgtctgttctacttcgaccaggtccccaccgaccaggcccataccttcaagaagcaggtcaacgccctaggcggtcgtgtgagccccttcttctccatcgaagtcacccacgtcgttacctctcgtgccatccctgctgccacggccaaccgcgagaatgataagaacgctcggcccgagaaggaggcttcggcagcaccgaccaagcaggaccaagaagacaccatcaacccttctctactaactaggttcaacgccgacacttctatcaagcgaagattattcgatgccgatttacgtgctcgtgcccaacgcataccccagccacaggatcaaacccaggcattgaaagtgcagaagaagagcgtggatatcttggaccgggcaaacgagatgaagaagaagatctggtccgtcgacaagttgtcccgcatgacggcattgctgctcgagacggaccccttgcggagcgccgagatggcctacggaacgtcccacacagctcgcactacgcagaatgattcccgaggccccgaggaccgaaatctcatgcgcatgctgcagatcgagcgagtcaacggtccgtcagatcgcgaccccagcgttcattcccgcgagatggtccacttcaagggcccccacatctacatctgggacatcgaggagaagcaaaagcccatcatggtcaaggagtatcccaaggttgctgacaaaacagacggcgagtggccccaattccagagtgcctctttgggacgctgcccctttgtcgaggactccgaggcacgcgaagccagagaagcgaaaaaggcaaaggccagagccaaggcaagagccgcaatggcgccacccaagcccgtcattggcaagagaaccattagtgagatggagttgggccatggtcgccagtcgagcgtgacgtcagttgacttccccaacctgtcacgcagttttgagggtggtagtgcggccttggcgcggaaggccttcgcaagtcacgcggctgcgggccgagtgcttggtggcgtcgagcctgtcgcatctggtgtacagccatccaacgtcacctccgctatccgatcccagatggtctcctccacagctgcaacgcccggtgtcattactggtttgagcaaagaggttcacggtctgcagcgccaggtgctcaagagacagacatccgcaactgcttcccaagatccgagctcccgacgccctagtgaggcaagcattcgcgaggagagctctttcaagaaggctgccactcttggacgcacatcgagccgccaactggaacaagtcgacgtcgccactatcgagaagaatgatgcagaagaggcgacgaaacagactatcttgaagaaagtacgagagccgaagcgtgagcggaaacctggttactgtgaaaactgtgccgagaagtacgccgacttcgacgatcatatcgagtccaaaaagcatcgcaagtttgccgacaaccctgagaactggcttgatctggacgatttactggcgcagctcgaacgcatgcctaaacgacggccgtggaaggcgtctccgtcctggagccactctccggagcatgacgagtattga

SEQ ID NO: 7722 - protein, 655 aa, Muscodor strobelii
  misc_feature: SGI Peptide ID NO. 562344
  misc_feature (247)..(383): Pfam Id: PF08630 Pfam Desc: Dfp1/Him1, central region
  misc_feature (585)..(633): Pfam Id: PF07535 Pfam Desc: DBF zinc finger
  misc_feature (117)..(179): Pfam Id: PF00533 Pfam Desc: BRCA1 C Terminus (BRCT) domain
  misc_feature (1)..(639): NCBI GI: 46134923 Blast Desc: FG09310.1 [Gibberella zeae PH-1]
  misc_feature (1)..(639): NCBI GI: 256727134 Blast Desc: NECHADRAFT_91312 [Nectria haematococca mpVI 77-13-4]
  misc_feature (2)..(638): NCBI GI: 171682286 Blast Desc: protein product [Podospora anserina] gi|170941102|emb|CAP66752.1| protein product [Podospora anserina]
  misc_feature (1)..(633): NCBI GI: 156060273 Blast Desc: SS1G_02275 [Sclerotinia sclerotiorum 1980] gi|154699683|gb|EDN99421.1| SS1G_02275 [Sclerotinia sclerotiorum 1980]
  misc_feature (1)..(635): NCBI GI: 39974513 Blast Desc: MGG_00597 [Magnaporthe grisea 70-15] gi|145018499|gb|EDK02778.1| MGG_00597 [Magnaporthe grisea 70-15]
  misc_feature (1)..(635): NCBI GI: 116202407 Blast Desc: CHGG_09088 [Chaetomium globosum CBS 148.51] gi|88177606|gb|EAQ85074.1| CHGG_09088 [Chaetomium globosum CBS 148.51]
  misc_feature (1)..(633): NCBI GI: 70991915 Blast Desc: G1/S regulator NimO [Aspergillus fumigatus Af293] gi|66848439|gb|EAL88768.1| G1/S regulator NimO, [Aspergillus fumigatus Af293]
  misc_feature (2)..(503): NCBI GI: 261359630 Blast Desc: DBF zinc finger domain-containing protein [Verticillium albo-atrum VaMs.102]
  misc_feature (1)..(633): NCBI GI: 159124369 Blast Desc: G1/S regulator NimO, [Aspergillus fumigatus A1163]
  misc_feature (1)..(633): NCBI GI: 115400531 Blast Desc: ATEG_06676 [Aspergillus terreus NIH2624] gi|114191520|gb|EAU33220.1| ATEG_06676 [Aspergillus terreus NIH2624]
MSSRRVPLSSNQNIANSPLRNNGLKQKRTWVQLQREEHYGQPPPAKKQIIDAATQRVVKSPSQQPQPQQQSRIPTKSQIPVQQRRTASNYDTKGAARAEKETFSAKDIEGIHNWQIHHRARFPKCLFYFDQVPTDQAHTFKKQVNALGGRVSPFFSIEVTHVVTSRAIPAATANRENDKNARPEKEASAAPTKQDQEDTINPSLLTRFNADTSIKRRLFDADLRARAQRIPQPQDQTQALKVQKKSVDILDRANEMKKKIWSVDKLSRMTALLLETDPLRSAEMAYGTSHTARTTQNDSRGPEDRNLMRMLQIERVNGPSDRDPSVHSREMVHFKGPHIYIWDIEEKQKPIMVKEYPKVADKTDGEWPQFQSASLGRCPFVEDSEAREAREAKKAKARAKARAAMAPPKPVIGKRTISEMELGHGRQSSVTSVDFPNLSRSFEGGSAALARKAFASHAAAGRVLGGVEPVASGVQPSNVTSAIRSQMVSSTAATPGVITGLSKEVHGLQRQVLKRQTSATASQDPSSRRPSEASIREESSFKKAATLGRTSSRQLEQVDVATIEKNDAEEATKQTILKKVREPKRERKPGYCENCAEKYADFDDHIESKKHRKFADNPENWLDLDDLLAQLERMPKRRPWKASPSWSHSPEHDEY

SEQ ID NO: 7723 - DNA, 5744 bp, Muscodor strobelii
  misc_feature: SGI EST ID NO. CUFF.19450.2
  misc_feature: Variant of the nucleotide sequence at SEQ ID NO 7721
cttgttcatacgactggatcgtacattttgtttgcttacataccatatacgcattttgccactatatacaccatcgccacggtcattcttgttcatacaatcatatcatacaaactctctactcgctaatctctaagcgcctcaatatcaacaacctccttaacagcctcagtagtcaagacaagggggttatcatcccccacacaaacactatcctcaatcctgaccgctaaccccctaaaatgctctgggaatctgtcgtcgtccggtacgtaaacacccggttcaatcgcaatacagtgtccttccttgaggatagtattcctaggatatccaggcgtatcatggacatcgagcccaacatagtgtccgacatggtgagggaacagtgcatccatcattccagcgcctagctcaaaacctaggtctacgagctgggcgcgaagtcctcgctcggttatgttgtgtagttggtctagcgtcatgtttgctgaggcacgacaaagagacacaacggatcgttggacggacaggacggcgttatacagatcgcgctgcggaggggtgaatttgcccgagaggggccagactctagttatgtctgcgatgtaggagccgtattcgccgcctgcgtctacgagtatggtttcggagttatgtggtgtcagagaggagttgttgtggacgtagtggattagagaacctcggcttccgcctgctacgacggggatgtaggctgagccgtcgagtcctgtggtttggtatgtgtactctagaaaggcggcgagttccttttcggtgctccaggagccggacatggctgctgttagggcgcggccggagagctggccggcgcggcgcatggcggcgacttcggcggtggactttatggcgcggagggcgttgatgtggggtttcaggggcgagtatgaggtgattgatggcgcggctgaagaaaggagggagccgaaggaggtgggttgggagtattttgttcgttcggcgtcggtgtatatatgctctactccttccaatgcctcagcgagcagagttcgagaagaggatatatcgcccacgacgtcggcgttgaatatgtccctcgctgcgtctagcccactccatggtccgccccagagctcggccctggggtctttgggtcggcagaggagggtgaactcgtagtcgtcgtctgtcttgcggaggatggcgagggactcgggctcgcaccagccggtgaggtagaggaagtttgtttcttggcgaaaggcatggaatacggcaccgctgcggtagacgatagaggaggaagggagaatgacggccgagttggcggggagggaagagaggagagcagcgcggcgggagtggtattcttgggccgttatgcccggtgtgaggtctcctgccgcgaggatgtgtggatgtgtttcgtgaacgggttggccgaagagaagtgtcgaggccgagactggtgtcgagtaatgccttgtacatatattcggtctttgggggcgagacgggaacttggtcgctattgatctggtgtggagagtatacgataggttttgctgctgcttcaagcaatggcgaagttgccgtataggcaatcgattggccttcatcttgcagttggagcgacgttataatcgtgtgtctttttgcatcatggacatcatcagactgggatttatagcacaatacgtcgggctatcggcacaattggccagtcgcgtacagagggaaatgatcgtcttgaaacgaaagtcgaataacgagttggtataaaagtacagtcgcaatagaatagctaatacatgggacgttgaagtgctgaggagatgacgttggtgaggtccctcgaattgaggcgcaccatggtgaaagcctcaaaagctccgagtccagaggctggagacaccgctgttaggtaaggtagcccgttcgggaatggctgtactagctgctctcgctagttggggaaaggcgttaggccgttgctgtgcagcagtctagcgtggatcgcccgtcgcggtgtttctcgctggaccgcgctcgtggtggggtagagaggccaaggccatgctctgtctattggctgtattatgatgttgttgttgtgttatagccttttctggcaactgccctgacccactgcactgtgacccgtgcaccaccttacctgccgctcgttctctctgctgccaatttgcgtgcactgctgcttcacctggccatacgctgccaataccaacccatacttccacagctctcaccttaagctgtcgtgcactcgcccttattgccccttcgcgtcccttctcggtgtagctgtcgtgtctttggagtcaatggtcatctacgaagcttcatgacatttttctgcctgtcaatgtcaccctaacgcccctcacacctcgcgtcgagtcgtcaggtcgccctcttgctgtgtcacgcttctgccctcgcgtgccacagctttctgaggaactgcaaagtttaggctctgcttgtgaacttgatttttctgactttgttgtcagcaattcgagtctacataaccccctgcagccaactacatcatcatcatcaccttccccagccacccataataatacacaatacatccaatacaaccagtacaaccatatcctcacacctcacttccaactgagcatggtcacacgttatttatatggcagcagtatccctatctcccacccccttggacctctccgccatgtctagccgacgggtcccgctctcctccaaccagaacatcgccaactcgcctctccgcaacaatggcctcaagcagaagcgaacctgggtccagctgcagcgcgaggagcactacggccaaccgccaccggccaagaagcagatcatcgacgccgccacacaacgggtagtcaagtcaccttcgcagcagccacaaccacaacaacagtctcgtatccctaccaagagtcagatccccgtccagcaacggcgaaccgccagcaactatgacaccaagggggctgcgagggctgagaaagagacattctcagccaaggatatcgagggcatccacaattggcagattcaccaccgggctagattccccaagtgtctgttctacttcgaccaggtccccaccgaccaggcccataccttcaagaagcaggtcaacgccctaggcggtcgtgtgagccccttcttctccatcgaagtcacccacgtcgttacctctcgtgccatccctgctgccacggccaaccgcgagaatgataagaacgctcggcccgagaaggaggcttcggcagcaccgaccaagcaggaccaagaagacaccatcaacccttctctactaactaggttcaacgccgacacttctatcaagcgaagattattcgatgccgatttacgtgctcgtgcccaacgcataccccagccacaggatcaaacccaggcattgaaagtgcagaagaagagcgtggatatcttggaccgggcaaacgagatgaagaagaagatctggtccgtcgacaagttgtcccgcatgacggcattgctgctcgagacggaccccttgcggagcgccgagatggcctacggaacgtcccacacagctcgcactacgcagaatgattcccgaggccccgaggaccgaaatctcatgcgcatgctgcagatcgagcgagtcaacggtccgtcagatcgcgaccccagcgttcattcccgcgagatggtccacttcaagggcccccacatctacatctgggacatcgaggagaagcaaaagcccatcatggtcaaggagtatcccaaggttgctgacaaaacagacggcgagtggccccaattccagagtgcctctttgggacgctgcccctttgtcgaggactccgaggcacgcgaagccagagaagcgaaaaaggcaaaggccagagccaaggcaagagccgcagtagagagcagcgaaaatgtgaacgacgcgaagcctgttctccaacccccaagatggcgccacccaagcccgtcattggcaagagaaccattagtgagatggagttgggccatggtcgccagtcgagcgtgacgtcagttgacttccccaacctgtcacgcagttttgagggtggtagtgcggccttggcgcggaaggccttcgcaagtcacgcggctgcgggccgagtgcttggtggcgtcgagcctgtcgcatctggtgtacagccatccaacgtcacctccgctatccgatcccagatggtctcctccacagctgcaacgcccggtgtcattactggtttgagcaaagaggttcacggtctgcagcgccaggtgctcaagagacagacatccgcaactgcttcccaagatccgagctcccgacgccctagtgaggcaagcattcgcgaggagagctctttcaagaaggctgccactcttggacgcacatcgagccgccaactggaacaagtcgacgtcgccactatcgagaagaatgatgcagaagaggcgacgaaacagactatcttgaagaaagtacgagagccgaagcgtgagcggaaacctggttactgtgaaaactgtgccgagaagtacgccgacttcgacgatcatatcgagtccaaaaagcatcgcaagtttgccgacaaccctgagaactggcttgatctggacgatttactggcgcagctcgaacgcatgcctaaacgacggccgtggaaggcgtctccgtcctggagccactctccggagcatgacgagtattgatgacgccttatctaataatcgtcctacgaaagatcccgtgcatcgtcggcccgcctgtcgtgatctatgacttcaacttgaagcttacctcccagcccggactctcctatacgattgacattcgcacttaaaacccgtccaaccgttcttcgaaagaagttgcagagtgatgatacccgtcctccataattctctaatgactactctccaaccctcacatcatcggactcttgacgaatgagttcgctcacggcaaggcatggcgcggagtattgtgaatattgttttttcctgtccccggcgacaggcttttcttttccaaagcatcggcggcgaagcggcgtgtactacttcattttctatattgacattcttttcgtttcacacggccggagtctacatactagacagggtggcggtggtggtgcatggacaaggtctcggaaggcaggctgccctcgctgagccaggacaccggctcgcgggcatgaccgactacctgatgatggaacataaacatgagcttgttggagtaaatcaatgttggtgaagatggggcgtgatggatgacatgagacgtcgtataacattgctgaaggcaagcgactgtggcgatacgtatccatatgtgttggcagtttcggtttgcatgtgtataatccaaacaaatatgttgagaaagagagcatactgaagcgaaagctatggaataggaatggaatggatgatttgtgattgggcattacgtgcgatcatatgtgtgactaggctgtggcacaaatgtgacctggatgtcgctagggagccccctgttacttgtcaacggggaatgcgagtctgtcgaggaacaaaccttcttggcctacagatcacctcagcaccctggtaagtatcatatagtaagacaagcggtcaagatcaatggcgagcatctctctcaacacgatggcaaactttagggaatgctaactgtcgcactaatctct

SEQ ID NO: 7724 - DNA, 1497 bp, Muscodor strobelii
  misc_feature: SGI cDNA ID NO. 562345
  misc_feature: Reduced expression when VOC is produced
  misc_feature: Encodes the peptide sequence at SEQ ID NO 7725
atgaaggccaatcgattgcctatacggcaacttcgccattgcttgaagcagcagcaaaacctatcgtatactctccacaccagatcaatagcgaccaagttcccgtctcgcccccaaagaccgaatatatgtacaaggcattactcgacaccagtctcggcctcgacacttctcttcggccaacccgttcacgaaacacatccacacatcctcgcggcaggagacctcacaccgggcataacggcccaagaataccactcccgccgcgctgctctcctctcttccctccccgccaactcggccgtcattctcccttcctcctctatcgtctaccgcagcggtgccgtattccatgcctttcgccaagaaacaaacttcctctacctcaccggctggtgcgagcccgagtccctcgccatcctccgcaagacagacgacgactacgagttcaccctcctctgccgacccaaagaccccagggccgagctctggggcggaccatggagtgggctagacgcagcgagggacatattcaacgccgacgtcgtgggcgatatatcctcttctcgaactctgctcgctgaggcattggaaggagtagagcatatatacaccgacgccgaacgaacaaaatactcccaacccacctccttcggctccctcctttcttcagccgcgccatcaatcacctcatactcgcccctgaaaccccacatcaacgccctccgcgccataaagtccaccgccgaagtcgccgccatgcgccgcgccggccagctctccggccgcgccctaacagcagccatgtccggctcctggagcaccgaaaaggaactcgccgcctttctagagtacacataccaaaccacaggactcgacggctcagcctacatccccgtcgtagcaggcggaagccgaggttctctaatccactacgtccacaacaactcctctctgacaccacataactccgaaaccatactcgtagacgcaggcggcgaatacggctcctacatcgcagacataactagagtctggcccctctcgggcaaattcacccctccgcagcgcgatctgtataacgccgtcctgtccgtccaacgatccgttgtgtctctttgtcgtgcctcagcaaacatgacgctagaccaactacacaacataaccgagcgaggacttcgcgcccagctcgtagacctaggttttgagctaggcgctggaatgatggatgcactgttccctcaccatgtcggacactatgttgggctcgatgtccatgatacgcctggatatcctaggaatactatcctcaaggaaggacactgtattgcgattgaaccgggtgtttacgtaccggacgacgacagattcccagagcattttagggggttagcggtcaggattgaggatagtgtttgtgtgggggatgataacccccttgtcttgactactgaggctgttaaggaggttgttgatattgaggcgcttagagattag

SEQ ID NO: 7725 - protein, 498 aa, Muscodor strobelii
  misc_feature: SGI Peptide ID NO. 562345
  misc_feature (80)..(214): Pfam Id: PF05195 Pfam Desc: Aminopeptidase P, N-terminal domain
  misc_feature (252)..(484): Pfam Id: PF00557 Pfam Desc: metallopeptidase family M24
  misc_feature (52)..(498): NCBI GI: 85089070 Blast Desc: NCU05971 [Neurospora crassa OR74A] gi|28919157|gb|EAA28656.1| NCU05971 [Neurospora crassa OR74A]
  misc_feature (38)..(497): NCBI GI: 145611194 Blast Desc: MGG_00596 [Magnaporthe grisea 70-15] gi|145018500|gb|EDK02779.1| MGG_00596 [Magnaporthe grisea 70-15]
  misc_feature (9)..(498): NCBI GI: 156060275 Blast Desc: SS1G_02276 [Sclerotinia sclerotiorum 1980] gi|154699684|gb|EDN99422.1| SS1G_02276 [Sclerotinia sclerotiorum 1980]
  misc_feature (1)..(497): NCBI GI: 256727710 Blast Desc: [Nectria haematococca mpVI 77-13-4]
  misc_feature (76)..(497): NCBI GI: 171682288 Blast Desc: protein product [Podospora anserina] gi|170941103|emb|CAP66753.1| protein product [Podospora anserina]
  misc_feature (27)..(497): NCBI GI: 46134921 Blast Desc: FG09309.1 [Gibberella zeae PH-1]
  misc_feature (46)..(498): NCBI GI: 119470467 Blast Desc: xaa-pro dipeptidase app(E.coli) [Neosartorya fischeri NRRL 181] gi|119406189|gb|EAW16140.1| xaa-pro dipeptidase app(E.coli) [Neosartorya fischeri NRRL 181]
  misc_feature (42)..(498): NCBI GI: 225681195 Blast Desc: metallopeptidase [Paracoccidioides brasiliensis Pb03]
  misc_feature (37)..(497): NCBI GI: 261205512 Blast Desc: xaa-pro dipeptidase app [Ajellomyces dermatitidis SLH14081] gi|239592552|gb|EEQ75133.1| xaa-pro dipeptidase app [Ajellomyces dermatitidis SLH14081]
  misc_feature (48)..(497): NCBI GI: 240278072 Blast Desc: dipeptidase [Ajellomyces capsulatus H143]
  misc_feature (59)..(496): SWISSPROT Homolog: EC 3.4.11.9 Xaa-Pro aminopeptidase
  misc_feature: Useful for introducing or modulating the production of volatile compounds
MKANRLPIRQLRHCLKQQQNLSYTLHTRSIATKFPSRPQRPNICTRHYSTPVSASTLLFGQPVHETHPHILAAGDLTPGITAQEYHSRRAALLSSLPANSAVILPSSSIVYRSGAVFHAFRQETNFLYLTGWCEPESLAILRKTDDDYEFTLLCRPKDPRAELWGGPWSGLDAARDIFNADVVGDISSSRTLLAEALEGVEHIYTDAERTKYSQPTSFGSLLSSAAPSITSYSPLKPHINALRAIKSTAEVAAMRRAGQLSGRALTAAMSGSWSTEKELAAFLEYTYQTTGLDGSAYIPVVAGGSRGSLIHYVHNNSSLTPHNSETILVDAGGEYGSYIADITRVWPLSGKFTPPQRDLYNAVLSVQRSVVSLCRASANMTLDQLHNITERGLRAQLVDLGFELGAGMMDALFPHHVGHYVGLDVHDTPGYPRNTILKEGHCIAIEPGVYVPDDDRFPEHFRGLAVRIEDSVCVGDDNPLVLTTEAVKEVVDIEALRD

SEQ ID NO: 7726 - DNA, 6427 bp, Muscodor strobelii
  misc_feature: SGI EST ID NO. CUFF.19449.0
  misc_feature: Variant of the nucleotide sequence at SEQ ID NO 7724
agagattagtgcgacagttagcattccctaaagtttgccatcgtgttgagagagatgctcgccattgatcttgaccgcttgtcttactatatgatacttaccagggtgctgaggtgatctgtaggccaagaaggtttgttcctcgacagactcgcattccccgttgacaagtaacagggggctccctagcgacatccaggtcacatttgtgccacagcctagtcacacatatgatcgcacgtaatgcccaatcacaaatcatccattccattcctattccatagctttcgcttcagtatgctctctttctcaacatatttgtttggattatacacatgcaaaccgaaactgccaacacatatggatacgtatcgccacagtcgcttgccttcagcaatgttatacgacgtctcatgtcatccatcacgccccatcttcaccaacattgatttactccaacaagctcatgtttatgttccatcatcaggtagtcggtcatgcccgcgagccggtgtcctggctcagcgagggcagcctgccttccgagaccttgtccatgcaccaccaccgccaccctgtctagtatgtagactccggccgtgtgaaacgaaaagaatgtcaatatagaaaatgaagtagtacacgccgcttcgccgccgatgctttggaaaagaaaagcctgtcgccggggacaggaaaaaacaatattcacaatactccgcgccatgccttgccgtgagcgaactcattcgtcaagagtccgatgatgtgagggttggagagtagtcattagagaattatggaggacgggtatcatcactctgcaacttctttcgaagaacggttggacgggttttaagtgcgaatgtcaatcgtataggagagtccgggctgggaggtaagcttcaagttgaagtcatagatcacgacaggcgggccgacgatgcacgggatctttcgtaggacgattattagataaggcgtcatcaatactcgtcatgctccggagagtggctccaggacggagacgccttccacggccgtcgtttaggcatgcgttcgagctgcgccagtaaatcgtccagatcaagccagttctcagggttgtcggcaaacttgcgatgctttttggactcgatatgctagattcagggtcagcgatgatactcgattagagagtgggcatgcttacatcgtcgaagtcggcgtacttctcggcacagttttcacagtaaccaggtttccgctcacgcttcggctctcgtactttcttcaagatagtctgtttcgtcgcctcttctgcatcattcttctcgatagtggcgacgtcgacttgttccagttggcggctcgatgtgcgtccaagagtggcagccttcttgaaagagctctcctcgcgaatgcttgcctcactagggcgtcgggagctcggatcttgggaagcagttgcggatgtctgtctcttgagcacctggcgctgcagaccgtgaacctctttgctcaaaccagtaatgacaccgggcgttgcagctgtggaggagaccatctgggatcggatagcggaggtgacgttggatggctgtacaccagatgcgacaggctcgacgccaccaagcactcggcccgcagccgcgtgacttgcgaaggccttccgcgccaaggccgcactaccaccctcaaaactgcgtgacaggttggggaagtcaactgacgtcacgctcgactggcgaccatggcccaactccatctcactaatggttctcttgccaatgacgggcttgggtggcgccatcttgggggttggagaacaggcttcgcgtcgttcacattttcgctgctctctactgcggctcttgccttggctctggcctttgcctttttcgcttctctggcttcgcgtgcctcggagtcctcgacaaaggggcagcgtcccaaagaggcactctggaattggggccactcgccgtctgttttgtcagcaaccttgggatactccttgaccatgatgggcttttgcttctcctcgatgtcccagatgtagatgtgggggcccttgaagtggaccatctcgcgggaatgaacgctggggtcgcgatctgacggaccgttgactcgctcgatctgcagcatgcgcatgagatttcggtcctcggggcctcgggaatcattctgcgtagtgcgagctgtgtgggacgttccgtaggccatctcggcgctccgcaaggggtccgtctcgagcagcaatgccgtcatgcgggacaacttgtcgacggaccagatcttcttcttcatctcgtttgcccggtccaagatatccacgctcttcttctgcactttcaatgcctgggtttgatcctgtggctggggtatgcgttgggcacgagcacgtaaatcggcatcgaataatcttcgcttgatagaagtgtcggcgttgaacctagttagtagagaagggttgatggtgtcttcttggtcctgcttggtcggtgctgccgaagcctccttctcgggccgagcgttcttatcattctcgcggttggccgtggcagcagggatggcacgagaggtaacgacgtgggtgacttcgatggagaagaaggggctcacacgctgttacgtatatgtcagccacagaagacacagacactcgacgaaccatgtcagccaacttacaccgcctagggcgttgacctgcttcttgaaggtatgggcctggtcggtggggacctggtcgaagtagaacagacacttggggaatctagcccggtggtgaatctgccaattgtggatgccctcgatatccttggctgagaatgtctctttctcagccctcgcagcccccttggtgtcatagttgctggcggttcgccgttgctggacggggatctgactcttggtagggatacgagactgttgttgtggttgtggctgctgcgaaggtgacttgactacccgttgtgtggcggcgtcgatgatctgcttcttggccggtggcggttggccgtagtgctcctcgcgctgcagctggacccaggttcgcttctgcttgaggccattgttgcggagaggcgagttggcgatgttctggttggaggagagcgggacccgtcggctagacatggcggagaggtccaagggggtgggagatagggatactgctgccatataaataacgtgtgaccatgctcagttggaagtgaggtgtgaggatatggttgtactggttgtattggatgtattgtgtattattatgggtggctggggaaggtgatgatgatgatgtagttggctgcagggggttatgtagactcgaattgctgacaacaaagtcagaaaaatcaagttcacaagcagagcctaaactttgcagttcctaattattgaagacatctaattagtatacagatatctgaaaaagcaatgttgtcttgtgttgagcggtcgttgtggttggaggggggcggctccatacctcagaaagctgtggcacgcgagggcagaagcgtgacacagcaagagggcgacctgacgactcgacgcgaggtgtgaggggcgttagggtgacattgacaggcagaaaaatgtcatgaagcttcgtagatgaccattgactccaaagacacgacagctacaccgagaagggacgcgaaggggcaataagggcgagtgcacgacagcttaaggtgagagctgtggaagtatgggttggtattggcagcgtatggccaggtgaagcagcagtgcacgcaaattggcagcagagagaacgagcggcaggtaaggtggtgcacgggtcacagtgcagtgggtcagggcagttgccagaaaaggctataacacaacaacaacatcataatacagccaatagacagagcatggccttggcctctctaccccaccacgagcgcggtccagcgagaaacaccgcgacgggcgatccacgctagactgctgcacagcaacggcctaacgcctttccccaactagcgagagcagctagtacagccattcccgaacgggctaccttacctaacagcggtgtctccagcctctggactcggagcttttgaggctttcaccatggtgcgcctcaattcgagggacctcaccaacgtcatctcctcagcacttcaacgtcccatgtattagctattctattgcgactgtacttttataccaactcgttattcgactttcgtttcaagacgatcatttccctctgtacgcgactggccaattgtgccgatagcccgacgtattgtgctataaatcccagtctgatgatgtccatgatgcaaaaagacacacgattataacgtcgctccaactgcaagatgaaggccaatcgattgcctatacggcaacttcgccattgcttgaagcagcagcaaaacctatcgtatactctccacaccagatcaatagcgaccaagttcccgtctcgcccccaaagaccgaatatatgtacaaggcattactcgacaccagtctcggcctcgacacttctcttcggccaacccgttcacgaaacacatccacacatcctcgcggcaggagacctcacaccgggcataacggcccaagaataccactcccgccgcgctgctctcctctcttccctccccgccaactcggccgtcattctcccttcctcctctatcgtctaccgcagcggtgccgtattccatgcctttcgccaagaaacaaacttcctctacctcaccggctggtgcgagcccgagtccctcgccatcctccgcaagacagacgacgactacgagttcaccctcctctgccgacccaaagaccccagggccgagctctggggcggaccatggagtgggctagacgcagcgagggacatattcaacgccgacgtcgtgggcgatatatcctcttctcgaactctgctcgctgaggcattggaaggagtagagcatatatacaccgacgccgaacgaacaaaatactcccaacccacctccttcggctccctcctttcttcagccgcgccatcaatcacctcatactcgcccctgaaaccccacatcaacgccctccgcgccataaagtccaccgccgaagtcgccgccatgcgccgcgccggccagctctccggccgcgccctaacagcagccatgtccggctcctggagcaccgaaaaggaactcgccgcctttctagagtacacataccaaaccacaggactcgacggctcagcctacatccccgtcgtagcaggcggaagccgaggttctctaatccactacgtccacaacaactcctctctgacaccacataactccgaaaccatactcgtagacgcaggcggcgaatacggctcctacatcgcagacataactagagtctggcccctctcgggcaaattcacccctccgcagcgcgatctgtataacgccgtcctgtccgtccaacgatccgttgtgtctctttgtcgtgcctcagcaaacatgacgctagaccaactacacaacataaccgagcgaggacttcgcgcccagctcgtagacctaggttttgagctaggcgctggaatgatggatgcactgttccctcaccatgtcggacactatgttgggctcgatgtccatgatacgcctggatatcctaggaatactatcctcaaggaaggacactgtattgcgattgaaccgggtgtttacgtaccggacgacgacagattcccagagcattttagggggttagcggtcaggattgaggatagtgtttgtgtgggggatgataacccccttgtcttgactactgaggctgttaaggaggttgttgatattgaggcgcttagagattagcgagtagagagtttgtatgatatgattgtatgaacaagaatgaccgtggcgatggtgtatatagtggcaaaatgcgtatatgacagcaagtaacacgtacatggccccaaaaggcatcactatatcgtttttctgaggtgtacatcaaatgaaaaaatgcaggtccgcagaagtggtacccgtcatccatatggggagtatggtaaaatagaatgaagtttctgtactggcaaacctgttcccgcggtctcacatcgtcgttaaagaccctcgctttgctcaccgcactcaccgctctactacctaaatcaaccataagatcatccaatcatttgttttgttttgatgaatatcgcaattaacagtacgcgaaagccaaacacgattaccatacttgacgcatcagccgtgatactttacaccgataattaccatcttaggtgcggactcgtaattatcgagtagaatccgtgtatttacaaaacgaattcgtacatacacgcacggctttgcttacaaattcgaccccccgtaatgacttacctacctagtcgctcttatacacgcaattgctgccacacacacggacaaagacc

SEQ ID NO: 7727 - DNA, 1428 bp, Muscodor strobelii
  misc_feature: SGI cDNA ID NO. 562346
  misc_feature: Reduced expression when VOC is produced
  misc_feature: Encodes the peptide sequence at SEQ ID NO 7728
atggacgctggtgttatgcaagatattgacgtctacccatctgccggtgttgatggtgccggaaacatattcgatagctctgctgatttcactcaacaatttgcttcaacaaacttttgggagacgttcgaggattcatctacttctagtttcgtaaactccactgcggcttcagtatctgttcagtctcccagcacatcagccaactcaccagattctaccgcatctgcggaatctaaaagcaaatcgaatcaccattcacacaagcaccacatctcgggaaagtctaagcctaagaagcgccggtgctccgaagagtcaaagcagtcaagccagttcattcaagatccatctacactcgactgttctgattactggcttcgctttgatagcgacagcgagaacttcgatcagtacttcgattatagccaacaggatacgaagaacgtaggtcccctcggttttgcagtgtcgtctagcggaagaatgggagcagatgatgttttgtcactgaacgtcgctgagttgtccgctgatgcacaggtcaggtcgccgaccctaagccgtcctcttcaaagagcaagccaggtcgggacagccggcaccgccatcaaagtggctcatccagcaacgacaagcgatctcatcgacgatagcgctcttgaccaagcgctttccgatgaggacgatctgttctctttggcattaggagacgaactagcaaagatcgacaacagacaggcaacaccagcgcaagcccaggaaagactttattctacgccgctcagttgggaacagccacgcccgggcttcggtatggattatgtgaatatggagacggtcatgactgacgccgaacgacaacgccttctggccattgcaatgggcacagggcagccacagcgccaggctcgaccaccaagcgtctccgagttccgcttcgagatgacgcacagcccttctgagacaacgaggaccacgccagagcctaaaggcaggggaacagcaacaagaccagctgggccgtcgcggaagaactctgcagagacggtagaaaagaaggacaagcccagaaataatgaccgagcggcgcacaacgacatcgaaagaaaataccgaaccaatctgaaggataagatcgctgaactgcgcgacgctgttccttctctgcgctcgatacccgaagacgaagatggaaattctcccaacagctcgtccaagaccgcccctaaggtcagtaagggcacggtattgaccaaagcaactgaatacatccaccaacttgagcgcagaaatcgatccatggtacagaagaacgacgaattagcacggagactgcaagcgtttgaacagcttgttggtgctccacccggaccaaattggcgaccacagggctatggtgctcctgtctacaatcaacgatattga

SEQ ID NO: 7728 - protein, 475 aa, Muscodor strobelii
  misc_feature: SGI Peptide ID NO. 562346
  misc_feature (361)..(429): Pfam Id: PF00010 Pfam Desc: Helix-loop-helix DNA-binding domain
  misc_feature (118)..(455): NCBI GI: 46134919 Blast Desc: FG09308.1 [Gibberella zeae PH-1]
  misc_feature (99)..(471): NCBI GI: 116202403 Blast Desc: CHGG_09086 [Chaetomium globosum CBS 148.51] gi|88177604|gb|EAQ85072.1| CHGG_09086 [Chaetomium globosum CBS 148.51]
  misc_feature (95)..(474): NCBI GI: 145611196 Blast Desc: MGG_00595 [Magnaporthe grisea 70-15] gi|145018501|gb|EDK02780.1| MGG_00595 [Magnaporthe grisea 70-15]
  misc_feature (95)..(455): NCBI GI: 256727133 Blast Desc: NECHADRAFT_99373 [Nectria haematococca mpVI 77-13-4]
  misc_feature (195)..(453): NCBI GI: 85089067 Blast Desc: NCU10284 [Neurospora crassa OR74A] gi|28919156|gb|EAA28655.1| [Neurospora crassa OR74A]
  misc_feature (326)..(473): NCBI GI: 171682290 Blast Desc: protein product [Podospora anserina] gi|170941104|emb|CAP66754.1| protein product [Podospora anserina]
  misc_feature (362)..(453): NCBI GI: 46111865 Blast Desc: FG02814.1 [Gibberella zeae PH-1]
  misc_feature (355)..(450): NCBI GI: 213403568 Blast Desc: sterol regulatory element binding protein Sre1 [Schizosaccharomyces japonicus yFS275] gi|212000603|gb|EEB06263.1| sterol regulatory element binding
  misc_feature (356)..(462): NCBI GI: 19112486 Blast Desc: sterol regulatory element binding protein Sre1 [Schizosaccharomyces pombe] gi|74626009|sp|Q9UUD1.1|SREBP_SCHPO RecName: Full=Sterol regulatory element-binding protein 1; sterol
  misc_feature (362)..(461): NCBI GI: 256721912 Blast Desc: NECHADRAFT_67823 [Nectria haematococca mpVI 77-13-4]
  misc_feature: Useful for introducing or modulating the production of volatile compounds
MDAGVMQDIDVYPSAGVDGAGNIFDSSADFTQQFASTNFWETFEDSSTSSFVNSTAASVSVQSPSTSANSPDSTASAESKSKSNHHSHKHHISGKSKPKKRRCSEESKQSSQFIQDPSTLDCSDYWLRFDSDSENFDQYFDYSQQDTKNVGPLGFAVSSSGRMGADDVLSLNVAELSADAQVRSPTLSRPLQRASQVGTAGTAIKVAHPATTSDLIDDSALDQALSDEDDLFSLALGDELAKIDNRQATPAQAQERLYSTPLSWEQPRPGFGMDYVNMETVMTDAERQRLLAIAMGTGQPQRQARPPSVSEFRFEMTHSPSETTRTTPEPKGRGTATRPAGPSRKNSAETVEKKDKPRNNDRAAHNDIERKYRTNLKDKIAELRDAVPSLRSIPEDEDGNSPNSSSKTAPKVSKGTVLTKATEYIHQLERRNRSMVQKNDELARRLQAFEQLVGAPPGPNWRPQGYGAPVYNQRY

SEQ ID NO: 7729 - DNA, 2815 bp, Muscodor strobelii
  misc_feature: SGI EST ID NO. CUFF.19429.0
  misc_feature: Variant of the nucleotide sequence at SEQ ID NO 7727
ttcgcatatctccaggcagtgctatttcggtccctgacaacattgtcccggacttcaatcccgctgtcaatacaggtcaggccattttaatcctcgtaaatgaccgttcgggcggtttcggcctactgttcaccatcgcctagtccaacatccctgctcacaacactctttcgagttgcaggtgatgtcgccttggcttgcacttactatcccttcgtatacacaattacaacccctctactgcgcaacccgaaaccttccggatcattgatgatactgtaactacaagaagacgtcgaatactcgttggtcactgcttgagacttcgcacacttcatgctctattgacatcaactactacgattatatgagccctcaagagttcaacactactatcacatctcagtctatctcatctcatcaacttgaagattgaaccacaaattagttggagacctttggctaaccacctttcctctccgaaacccaaagactatcagaccagtgactacaacccgaatagtcgccgaagtgctaatcgcaaagcccgaaatcaaatacacaatctcgaaattggggaacagaggacgatatctatctcgaccaagtaattacttacccaagctgactgcgggagtcgtcatggacgctggtgttatgcaagatattgacgtctacccatctgccggtgttgatggtgccggaaacatattcgatagctctgctgatttcactcaacaatttgcttcaacaaacttttgggagacgttcgaggattcatctacttctagtttcgtaaactccactgcggcttcagtatctgttcagtctcccagcacatcagccaactcaccagattctaccgcatctgcggaatctaaaagcaaatcgaatcaccattcacacaagcaccacatctcgggaaagtctaagcctaagaagcgccggtgctccgaagagtcaaagcagtcaagccagttcattcaagatccatctacactcgactgttctgattactggcttcgctttgatagcgacagcgagaacttcgatcagtacttcgattatagccaacaggatacgaagaacgtaggtcccctcggttttgcagtgtcgtctagcggaagaatgggagcagatgatgttttgtcactgaacgtcgctgagttgtccgctgatgcacaggtcaggtcgccgaccctaagccgtcctcttcaaagagcaagccaggtcgggacagccggcaccgccatcaaagtggctcatccagcaacgacaagcgatctcatcgacgatagcgctcttgaccaagcgctttccgatgaggacgatctgttctctttggcattaggagacgaactagcaaagatcgacaacagacaggcaacaccagcgcaagcccaggaaagactttattctacgccgctcagttgggaacagccacgcccgggcttcggtatggattatgtgaatatggagacggtcatgactgacgccgaacgacaacgccttctggccattgcaatgggcacagggcagccacagcgccaggctcgaccaccaagcgtctccgagttccgcttcgagatgacgcacagcccttctgagacaacgaggaccacgccagagcctaaaggcaggggaacagcaacaagaccagctgggccgtcgcggaagaactctgcagagacggtagaaaagaaggacaagcccagaaataatgaccgagcggcgcacaacgacatcgaaagaaaataccgaaccaatctgaaggataagatcgctgaactgcgcgacgctgttccttctctgcgctcgatacccgaagacgaagatggaaattctcccaacagctcgtccaagaccgcccctaaggtcagtaagggcacggtattgaccaaagcaactgaatacatccaccaacttgagcgcagaaatcgatccatggtacagaagaacgacgaattagcacggagactgcaagcgtttgaacagcttgttggtgctccacccggaccaaattggcgaccacagggctatggtgctcctgtctacaatcaacgatattgagtcttgcaacaaattgcgggacctcatatctcgtcatcgacgtcattcttctattttccactacgattgggacacatcccgttagtttacgctcataattgtttatgcggatcgacatggacggaaatcagaatgggcgtttcctgatttgtcttctcctcgtttttatcattttcatcggcgggccaaaataacggcagctcaatacccaactcatctcagctcacatcataccctatcatattatcaaagcatttacaatgacgaagacacgaagtaatgaacaccaaaaagaactgatcgggagtctggaatggcatcatcaaattcaaaattaggcgttgagcatcacatcacatcaacaatatcgaaggacaggaaaagcatgggctagcttagagctaagaaaaagccaaggagttggaaccggaatttcaatgggaatatgggaatgaataaatcggtgatggactcgagtaatctgttttagggggcctcaagcctttcctgtatgataccatctagactaccgtgagcataaggtagacacaagtgtcttcgtcactttttttttggcgggaaactgactagagagctgttagctatccaatcaagaggttataatcgatacgaggtttcattgcatgtgatagtaaatgacgatcacaaataccttgtcaagggccctgataaatagtccccatactattgaatgaggcaatgattattgatttccgtacggttg

SEQ ID NO: 7730 - DNA, 1551 bp, Muscodor strobelii
  misc_feature: SGI cDNA ID NO. 562347
  misc_feature: Encodes the peptide sequence at SEQ ID NO 7731
atgacgggtttcgaggccttgggcctaattgtcaaatataccattttcttagtcgttcccttgatttcggtctatgttgcgtactcttactttctgcatcctctcagcaaatatcccggcccatttctcggcacactcactgattggtttgctggcgcccatgctctccaccaagatcttcacctcgagatcttgcgacagcacgaaagacacggctcggtcgttcgacttgctccaaatcggctggtcttcaacacagcatccgcttatcagagcatctaccaaaacgaccgtatctccaaagcatttacgtatgcaaatagtgttcgaaacaacaatgataacatcttcacctcccgagataaagatctccatcggtccaaacggaagagaatcgcacccgccctcaatgatcgggccgtgagatccttcgagccgtcactcatgaaacatgtcgatatctatctacgacgactgcgcgaagcatcgcaaagatccgagcccgtgaatatgagcaagagcatcagctatctcgccttggacattgtcacggagctaagttttggctttcccctcaattcccagttgagcgaggagaatcgatgggtgccagacgcgctcgcaagtattctatatcgcggcaatgtctggcagcagctctttttcttgtcccggcctggcaatggagagactgtgtctaattggtacttcgctggacctaaagcgaactataccggcttactgcagaggatgataaaagatcgcgtagctagaggctctgtcaacggtgcacgtgatttctacgctttcatctccgaagagggaaatcttgacgaggaacagacccaggctctctggtgggatgcgcactttcttgtcatagctgggtctgacaccacttcgaccggcgcatgtgccgccttgttttacctttcgcgcaacaccgaatgctacgaaaagctagcccacgagatccgctcctccttcacgagtgcagaggacatcaagtccggaccgcagctggcgggctgccggtatctccgagcctgtatagacgaagccctccgaatgtcaccgccggttcccggtgtgctctggagaagtcaagacccgtccgatactcaaccactcgtcattgatggctatgttatcccgaaagacacgctttttggagtttgcgcatatgcccttcaccacaacgaggaacactttccggactcgttcgcatacaggccagagcgctggctaaactcgcagaattcactcgtagttaatagtgcctttgctgcgttctctacaggctctcgtgcctgtgcaggaaaggccatggcgtatctcgagagtagtctcatcctcgcgaagactatgtggttctttgacttcgaggtcgcgcctgggctcctaggatcaattggcggaggtagcaatggcagcccacatggtagggagaaggatggagaatatcaactcgatgacatcttgaccgccgcgcatgatgggccatatctaatgttccgctcacggattagtgctggcgaagatgtatcctag

SEQ ID NO: 7731 - protein, 516 aa, Muscodor strobelii
  misc_feature: SGI Peptide ID NO. 562347
  misc_feature (34)..(485): Pfam Id: PF00067 Pfam Desc: Cytochrome P450
  misc_feature (294)..(466): Pfam Id: PF00067 Pfam Desc: Cytochrome P450
  misc_feature (3)..(508): NCBI GI: 85092131 Blast Desc: NCU06895 [Neurospora crassa OR74A] gi|28920645|gb|EAA30006.1| conserved [Neurospora crassa OR74A]
  misc_feature (7)..(508): NCBI GI: 145608110 Blast Desc: MGG_03375 [Magnaporthe grisea 70-15] gi|145015610|gb|EDK00100.1| MGG_03375 [Magnaporthe grisea 70-15]
  misc_feature (26)..(508): NCBI GI: 255954725 Blast Desc: Pc21g10830 [Penicillium chrysogenum Wisconsin 54-1255] gi|211589826|emb|CAP95980.1| Pc21g10830 [Penicillium chrysogenum Wisconsin 54-1255]
  misc_feature (7)..(508): NCBI GI: 145256217 Blast Desc: An10g00660 [Aspergillus niger CBS 513.88] gi|134078632|emb|CAK40505.1| protein product [Aspergillus niger]
  misc_feature (13)..(508): NCBI GI: 169782556 Blast Desc: [Aspergillus oryzae RIB40] gi|83774484|dbj|BAE64607.1| protein product [Aspergillus oryzae]
  misc_feature (26)..(511): NCBI GI: 256733020 Blast Desc: [Nectria haematococca mpVI 77-13-4]
  misc_feature (1)..(509): NCBI GI: 121710976 Blast Desc: benzoate 4-monooxygenase cytochrome P450 [Aspergillus clavatus NRRL 1] gi|119401254|gb|EAW11678.1| benzoate 4-monooxygenase cytochrome P450 [Aspergillus clavatus NRRL 1]
  misc_feature (26)..(507): NCBI GI: 46123381 Blast Desc: FG06068.1 [Gibberella zeae PH-1]
  misc_feature (13)..(508): NCBI GI: 238492179 Blast Desc: cytochrome P450, [Aspergillus flavus NRRL3357] gi|220695820|gb|EED52162.1| cytochrome P450, [Aspergillus flavus NRRL3357]
  misc_feature (23)..(508): NCBI GI: 171678814 Blast Desc: protein product [Podospora anserina] gi|170937477|emb|CAP62135.1| protein product [Podospora anserina]
  misc_feature (35)..(463): SWISSPROT Homolog: EC 1.14.13.12 Benzoate 4-monooxygenase
MTGFEALGLIVKYTIFLVVPLISVYVAYSYFLHPLSKYPGPFLGTLTDWFAGAHALHQDLHLEILRQHERHGSVVRLAPNRLVFNTASAYQSIYQNDRISKAFTYANSVRNNNDNIFTSRDKDLHRSKRKRIAPALNDRAVRSFEPSLMKHVDIYLRRLREASQRSEPVNMSKSISYLALDIVTELSFGFPLNSQLSEENRWVPDALASILYRGNVWQQLFFLSRPGNGETVSNWYFAGPKANYTGLLQRMIKDRVARGSVNGARDFYAFISEEGNLDEEQTQALWWDAHFLVIAGSDTTSTGACAALFYLSRNTECYEKLAHEIRSSFTSAEDIKSGPQLAGCRYLRACIDEALRMSPPVPGVLWRSQDPSDTQPLVIDGYVIPKDTLFGVCAYALHHNEEHFPDSFAYRPERWLNSQNSLVVNSAFAAFSTGSRACAGKAMAYLESSLILAKTMWFFDFEVAPGLLGSIGGGSNGSPHGREKDGEYQLDDILTAAHDGPYLMFRSRISAGEDVS

SEQ ID NO: 7732 - DNA, 979 bp, Muscodor strobelii
  misc_feature: SGI EST ID NO. CUFF.19198.0
  misc_feature: Variant of the nucleotide sequence at SEQ ID NO 7730
gatcgcgtagctagaggctctgtcaacggtgcacgtgatttctacgctttcatctccgaagagggaaatcttgacgaggaacagacccaggctctctggtgggatgcgcactttcttgtcatagctgggtctgacaccacttcgaccggcgcatgtgccgccttgttttacctttcgcgcaacaccgaatgctacgaaaagctagcccacgagatccgctcctccttcacgagtgcagaggacatcaagtccggaccgcagctggcgggctgccggtatctccgagcctgtatagacgaagccctccgaatgtcaccgccggttcccggtgtgctctggagaagtcaagacccgtccgatactcaaccactcgtcattgatggctatgttatcccgaaagacacgctttttggagtttgcgcatatgcccttcaccacaacgaggaacactttccggactcgttcgcatacaggccagagcgctggctaaactcgcagaattcactcgtagttaatagtgcctttgctgcgttctctacaggctctcgtgcctgtgcaggaaaggccatggcgtatctcgagagtagtctcatcctcgcgaagactatgtggttctttgacttcgaggtcgcgcctgggctcctaggatcaattggcggaggtagcaatggcagcccacatggtagggagaaggatggagaatatcaactcgatgacatcttgaccgccgcgcatgatgggccatatctaatgttccgctcacggattagtgctggcgaagatgtatcctagctttgcctcctcagaagcgcctacggccgctcgcccccatctgcgtatacagtgaaggatatacaattcggtgacaatttgtgattgagaacattcgttagctactgtctccgaaactagatcttatgatccattgtttcaaatacttagcatagctatctagagcgatagcatgtatgattgcaag

SEQ ID NO: 7733 - DNA, 552 bp, Muscodor strobelii
  misc_feature: SGI cDNA ID NO. 562348
  misc_feature: Reduced expression when VOC is produced
  misc_feature: Encodes the peptide sequence at SEQ ID NO 7734
atgtccaaagagttcacatttggcggcgtgacatatccctcgccgctgaccggttttgaagatcttccacctttgggagaggagcgcacagaggacgggaagagtttcgtgaacccgaaaaacgacaaactgagcagtgcatacgaccaatttacggatccagtcgagaagggtcgtcgagcgggcttcgatatacacatctattatttttccaacgacaaagcccaaacggagtacgctcgagctctttgggagcgcattaggcgagaattcccggagctccgcatctatcgattctgggacaagcctgtaggcccacatgcggtgaccatgtttgaagttaatgtctttacaccactgcagttcggagcgtttgtctcgtggcttgtagtatggcgcggaccactatcggtgttaatacaccctaacaccgtagaaaatcatctcaaagaaggcgagaaagaagcattgaatcactccacacgtgctacttggatgggcgagcggcttccggtgaatgtggatatgctgaggtccatcggctctgtttga

SEQ ID NO: 7734 - protein, 183 aa, Muscodor strobelii
  misc_feature: SGI Peptide ID NO. 562348
  misc_feature (63)..(177): Pfam Id: PF08883 Pfam Desc: Dopa 4,5-dioxygenase family
  misc_feature (11)..(177): NCBI GI: 256728823 Blast Desc: NECHADRAFT_68905 [Nectria haematococca mpVI 77-13-4]
  misc_feature (1)..(178): NCBI GI: 67537272 Blast Desc: AN4806.2 [Aspergillus nidulans FGSC A4] gi|40741186|gb|EAA60376.1| AN4806.2 [Aspergillus nidulans FGSC A4] gi|259482347|tpe|CBF76743.1| TPA: conserved [Aspergillus FGSC
  misc_feature (12)..(178): NCBI GI: 116202295 Blast Desc: CHGG_09032 [Chaetomium globosum CBS 148.51] gi|88177550|gb|EAQ85018.1| CHGG_09032 [Chaetomium globosum CBS 148.51]
  misc_feature (1)..(181): NCBI GI: 39951249 Blast Desc: MGG_01293 [Magnaporthe grisea 70-15] gi|145020893|gb|EDK05022.1| MGG_01293 [Magnaporthe grisea 70-15]
  misc_feature (1)..(178): NCBI GI: 145234282 Blast Desc: An02g13810 [Aspergillus niger] gi|134057457|emb|CAK37965.1| protein product [Aspergillus niger]
  misc_feature (1)..(178): NCBI GI: 121704910 Blast Desc: conserved [Aspergillus clavatus NRRL 1] gi|119398864|gb|EAW09292.1| conserved [Aspergillus clavatus NRRL 1]
  misc_feature (1)..(174): NCBI GI: 226286346 Blast Desc: conserved [Paracoccidioides brasiliensis Pb01]
  misc_feature (11)..(180): NCBI GI: 171682328 Blast Desc: protein product [Podospora anserina] gi|170941123|emb|CAP66773.1| protein product [Podospora anserina]
  misc_feature (1)..(178): NCBI GI: 255944115 Blast Desc: Pc20g02710 [Penicillium chrysogenum Wisconsin 54-1255] gi|211587560|emb|CAP85600.1| Pc20g02710 [Penicillium chrysogenum Wisconsin 54-1255]
  misc_feature (1)..(180): NCBI GI: 226291805 Blast Desc: conserved [Paracoccidioides brasiliensis Pb18]
  misc_feature: Useful for introducing or modulating the production of volatile compounds
MSKEFTFGGVTYPSPLTGFEDLPPLGEERTEDGKSFVNPKNDKLSSAYDQFTDPVEKGRRAGFDIHIYYFSNDKAQTEYARALWERIRREFPELRIYRFWDKPVGPHAVTMFEVNVFTPLQFGAFVSWLVVWRGPLSVLIHPNTVENHLKEGEKEALNHSTRATWMGERLPVNVDMLRSIGSV

SEQ ID NO: 7735 - DNA, 911 bp, Muscodor strobelii
  misc_feature: SGI EST ID NO. CUFF.19339.0
  misc_feature: Variant of the nucleotide sequence at SEQ ID NO 7733
atttcttcatcgaaacgattttgccgaacccgacttctcagcgtctgatgcactggcatctctcacaaacccatcatgtccaaagagttcacatttggcggcgtgacatatccctcgccgctgaccggttttgaagatcttccacctttgggagaggagcgcacagaggacgggaagagtttcgtgaacccgaaaaacgacaaactgagcagtgcatacgaccaatttacggatccagtcgagaagggtcgtcgagcgggcttcgatatacacatctattatttttccaacgacaaagcccaaacggagtacgctcgagctctttgggagcgcattaggcgagaatgtgagccatttctattttacgactgaaccgactcccgagccgtttagctaacgtcaattcagtcccggagctccgcatctatcgattctgggacaagcctgtaggcccacatgcggtgaccatgtttgaagttaatgtctttacaccactgcagttcggagcgtttgtctcgtggcttgtagtatggcgcggaccactatcggtgttaatacaccctaacaccgtagaaaatcatctcaaagaaggcgagaaagaagcattgaatcactccacacgtgctacttggatgggcgagcggcttccggtgaatgtggatatgctgaggtccatcggctctgtttgattggaggacatagcttccgggacgatgatgagctggctcggaacattcaactcttattagggctctttatgtaaaactcgcctcgagataacatagaaagtcttgcaattcagatagctttaacccaaaatacggctaaacaattattacaaaaaagcagagcccttaatgctttaacataaaactttaaaaaatgattaaataaaaaaagattaccgtcgg

SEQ ID NO: 7736 - DNA, 1203 bp, Muscodor strobelii
  misc_feature: SGI cDNA ID NO. 562349
  misc_feature: Encodes the peptide sequence at SEQ ID NO 7737
atgcctggacgcaagaagaatcgcaatcgccgccagcgcgaccgcggccagcgagctgcgcgtgacaacactggcactggcgccgatgccgacaccagtggtggtgatggtcagactgaagctatcgtcgagactgctccctccacttcagcagccggtccttccgtcacggccactaccctgacctcaatcggcacttcaattgctggcccttcgtccaccacgactggctccggtagggatcccagaatcctgcgtctattcagcttggccgtttatcataacacggttttcacttcgttccttcgagagtacaccaatgcacccaacgagattgaggagggatgtcgccagctcgctcgggatattccacgtctgcagcaacttatacgcaccaccgcgtccgatggtgacattctcttgcaattggcggattgcgtcgctgactgccaagacctcgttaacaagatgactgaattcaaggcagaatctcaggctggcgagacgagcaacactgctgccctagaggccgatgtcaccgctgccgatgcaggcaatgcgtcagcacccgaggaacctgattctgacaacaacgatgacgcatcagacggtgtggacttatatgatgcaactccacgtgcccagagtccaaacctcgatggtacgaaacacccacaaccgtccaacaacgtggccgatactaacactagagaagagggtgttgttgacgctactgaagctaccgttgagcccgcagccacagagaccgttaccgatgtcgccagtaccgatgtaaatgctgccaatgttgacgctaccgatgatgccgctgttaacgttaccaacgacaccgatatcactactactggtgtgaccagtacaaacgctgccggtaacacccacatcaacgctcacgaggagatcaatatgagcatcgtcatccaagctcttgaacgagctacgaacgacatcgccatgtctagcgagctggctagcgacattgccacactccttgataccttggctgaacaggttcgacattccgagcgccttggaggcgacaccagtcatggcgacaattctctgcagagcgagcagccagaggaacatgaggagcgagttttcctctcccaccgtacgatcgtcgaggcccgagacgtcatgaaccaactcttagagctgctgaataaccgtcgcgattag

SEQ ID NO: 7737 - protein, 400 aa, Muscodor strobelii
  misc_feature: SGI Peptide ID NO. 562349
MPGRKKNRNRRQRDRGQRAARDNTGTGADADTSGGDGQTEAIVETAPSTSAAGPSVTATTLTSIGTSIAGPSSTTTGSGRDPRILRLFSLAVYHNTVFTSFLREYTNAPNEIEEGCRQLARDIPRLQQLIRTTASDGDILLQLADCVADCQDLVNKMTEFKAESQAGETSNTAALEADVTAADAGNASAPEEPDSDNNDDASDGVDLYDATPRAQSPNLDGTKHPQPSNNVADTNTREEGVVDATEATVEPAATETVTDVASTDVNAANVDATDDAAVNVTNDTDITTTGVTSTNAAGNTHINAHEEINMSIVIQALERATNDIAMSSELASDIATLLDTLAEQVRHSERLGGDTSHGDNSLQSEQPEEHEERVFLSHRTIVEARDVMNQLLELLNNRRD

SEQ ID NO: 7738 - DNA, 381 bp, Muscodor strobelii
  misc_feature: SGI cDNA ID NO. 562350
  misc_feature: Encodes the peptide sequence at SEQ ID NO 7739
atgtcaacaaataaagacagtcccttttcgggggcttcacagtttccggtgaccaaagaacagcgtcaagctcaagagttcattcaaaggtgctgtccgcacccgggctatcgccttccagctcacacaggcaacctcactaaaacgtatcacgaggtgatacggaagatgaagaagtaccccggggccccgcagcctgccgagtatttgctctacttgattcaagtcgctatcgaaaattggggtggtccttacgacaagcgcccaactacagaggacttgcttgaatcatactaccagacagtctacccggtaatgctcacagagatagaaaaggccatgcgcgaaggtgctgagaagcatgaaaaaactggaaagtag

SEQ ID NO: 7739 - protein, 126 aa, Muscodor strobelii
  misc_feature: SGI Peptide ID NO. 562350
MSTNKDSPFSGASQFPVTKEQRQAQEFIQRCCPHPGYRLPAHTGNLTKTYHEVIRKMKKYPGAPQPAEYLLYLIQVAIENWGGPYDKRPTTEDLLESYYQTVYPVMLTEIEKAMREGAEKHEKTGK

SEQ ID NO: 7740 - DNA, 2460 bp, Muscodor strobelii
  misc_feature: SGI cDNA ID NO. 562351
  misc_feature: Encodes the peptide sequence at SEQ ID NO 7741
atggagccgctcacgggtttgagccttgcatgcaatattctgcaacttgcagaagcagcaatgagtgtctggacgactggtgtacgaatctggaacacgggttcgactcaagagcatgatgaattggatgcaatatgtcaagaaattcagctttatttagttcggatccagctacctgtggtaccatctaaccaccgcctacctgataatgatcccatccgcgcactatgccggcagtgtgatgaagtcgcaagggagcttctcgagaaacttgagcagctcaagccaaaggtaaaagacgggaagctaagccgtacagataccatatataaggcattactcagcgtgtggacccagagtgaaatagataactcgcacaagcgtctccaggctattattgtgaatattgagagacgcctggcagccgaaagtcgtgaccgcctatttcagcgtctggatcagttggaatcacaaaaccgccgactagaagctcgccgcatagatgaaatgttgcagttgaagaaggtcttttatgatctgtttacagacttcggtcaacgcatgcagaatgacaaatctcgaaatgaaacggtgatcgctctgctacaggcatctacacaaggctctcgcctatcgatggaacaagtcatactacagcagatccgatttgataccattgaggatcgacacgattcaattcacgacgcccacgatcatacgttcaaatggctatttgacgacgcagggcagcatagcacagcaacttttaacgaatggctcgcgtcggaagatagaatctattggatttcaggcaagccaggatctgggaaatctaccctaatgaaattcttggcctcacacccacgtaccttcgaaacaataaaaagctgggcgggggagagcaagctcgtcagagccgatttcttcttctggaattccggaaaagacgttttgcagaagtcccaagagggtcttttgcgatcgatcctctatcagattctacgccagtgcccagatctcattcgcgtggcctatccaaatatctgggaaaggagccaggatcattttggcacatttggcaccctcttagaaagcagcaaagggcacattgtgtcactatcagaagccggtcttcgggataccctacaaaagatatcctcaaaggcaacagagtctcggattaaattctgctttttcattgatggtttagatgagtatcatggagaccctgcgaatgctattaagctaatggaagatctccggaacttgttcaatgcaaagatgtgtttatccagtcggccctggaatccatttgaggagaaattcggcaaaatggatacggcaaagctgtacatgcaggatttcaataccgtcgacatcactgcgtacatcaacgatacgtttgaaaatgatgataacttccaagaccttgaggacaaggacacagttggcgcagagcttatcaaggaaatggtggatgcatccaatggtgtgttcctatgggtttttctggttgtgcgttcgtttcaagatggtctgattaatggtgatcggatttcagacttgagacggcgactcgaagaattaccaaaagatctcaacgagtatttcggtaaaattctcgaatcggacgttgacgaattttatcacagtcaatcagccttactgttctttgttaccctcgaggcagcggaggagttacctctaatggcctattggttcatgctcgtcgaagatcctgaatacgccgtcaatcttgagaaaaaagcgctctccatgcaacaattgaacaagcgtatgaagcaaatgaggaaaggtctgaatgcttcgtgtaagggcctcttagaggttcaagatcaacactatcgcaatcaagaagacgccttgccctcaagtatttacttcaatcgcaaaatcaacttcttacatcgaactgtcagagactatctcaatttggaccagacaaggcagcttctacgccgatggtgcgcccagagtttcgatgcggatgagactatctgcaaggcgttagtagcccaaatcaaggcagggccagagggtattgagtatcagggcatgaacgatcgactattcagagtattcgagttacaccgagaacgagcgaagaaatcatcattcaataattactcaaatgtcacgatgctccgcaagcatctgcttcaggttcttcagccccaggaaattgaactgcaggaagactccgatgctagttttttgggcccagaaaaagagactagttctatcttccaaagcatggacagtgaaggcaaggcatcacgatcaaagaaagatcagctcatatctagatctgagacggatcaactgacatctcagtcaaagtcagatcaggtggcatcatatcaagaaggaagatctcggagattgctacgaaaaatggggcatttattctcgaagtcgaagatacaaggtttcggatag

SEQ ID NO: 7741 - protein, 819 aa, Muscodor strobelii
  misc_feature: SGI Peptide ID NO. 562351
  misc_feature (1)..(595): NCBI GI: 169606622 Blast Desc: SNOG_06357 [Phaeosphaeria nodorum SN15] gi|160707042|gb|EAT86188.2| SNOG_06357 [Phaeosphaeria nodorum SN15]
  misc_feature (1)..(683): NCBI GI: 225684243 Blast Desc: conserved [Paracoccidioides brasiliensis Pb03]
  misc_feature (1)..(683): NCBI GI: 226293863 Blast Desc: conserved [Paracoccidioides brasiliensis Pb18]
  misc_feature (1)..(683): NCBI GI: 261190024 Blast Desc: conserved [Ajellomyces dermatitidis SLH14081] gi|239591250|gb|EEQ73831.1| conserved [Ajellomyces dermatitidis SLH14081]
  misc_feature (2)..(685): NCBI GI: 255956529 Blast Desc: Pc21g20270 [Penicillium chrysogenum Wisconsin 54-1255] gi|211590728|emb|CAP96924.1| Pc21g20270 [Penicillium chrysogenum Wisconsin 54-1255]
  misc_feature (1)..(711): NCBI GI: 145252046 Blast Desc: An16g02230 [Aspergillus niger] gi|134083079|emb|CAL00447.1| protein product [Aspergillus niger]
  misc_feature (1)..(743): NCBI GI: 256725921 Blast Desc: NECHADRAFT_82115 [Nectria haematococca mpVI 77-13-4]
  misc_feature (1)..(679): NCBI GI: 46111055 Blast Desc: FG02409.1 [Gibberella zeae PH-1]
  misc_feature (2)..(616): NCBI GI: 169616506 Blast Desc: SNOG_11426 [Phaeosphaeria nodorum SN15] gi|160703200|gb|EAT81134.2| SNOG_11426 [Phaeosphaeria nodorum SN15]
  misc_feature (1)..(762): NCBI GI: 156048628 Blast Desc: SS1G_09046 [Sclerotinia sclerotiorum 1980] gi|154693442|gb|EDN93180.1| SS1G_09046 [Sclerotinia sclerotiorum 1980]
MEPLTGLSLACNILQLAEAAMSVWTTGVRIWNTGSTQEHDELDAICQEIQLYLVRIQLPVVPSNHRLPDNDPIRALCRQCDEVARELLEKLEQLKPKVKDGKLSRTDTIYKALLSVWTQSEIDNSHKRLQAIIVNIERRLAAESRDRLFQRLDQLESQNRRLEARRIDEMLQLKKVFYDLFTDFGQRMQNDKSRNETVIALLQASTQGSRLSMEQVILQQIRFDTIEDRHDSIHDAHDHTFKWLFDDAGQHSTATFNEWLASEDRIYWISGKPGSGKSTLMKFLASHPRTFETIKSWAGESKLVRADFFFWNSGKDVLQKSQEGLLRSILYQILRQCPDLIRVAYPNIWERSQDHFGTFGTLLESSKGHIVSLSEAGLRDTLQKISSKATESRIKFCFFIDGLDEYHGDPANAIKLMEDLRNLFNAKMCLSSRPWNPFEEKFGKMDTAKLYMQDFNTVDITAYINDTFENDDNFQDLEDKDTVGAELIKEMVDASNGVFLWVFLVVRSFQDGLINGDRISDLRRRLEELPKDLNEYFGKILESDVDEFYHSQSALLFFVTLEAAEELPLMAYWFMLVEDPEYAVNLEKKALSMQQLNKRMKQMRKGLNASCKGLLEVQDQHYRNQEDALPSSIYFNRKINFLHRTVRDYLNLDQTRQLLRRWCAQSFDADETICKALVAQIKAGPEGIEYQGMNDRLFRVFELHRERAKKSSFNNYSNVTMLRKHLLQVLQPQEIELQEDSDASFLGPEKETSSIFQSMDSEGKASRSKKDQLISRSETDQLTSQSKSDQVASYQEGRSRRLLRKMGHLFSKSKIQGFG

SEQ ID NO: 7742 - DNA, 1056 bp, Muscodor strobelii
  misc_feature: SGI EST ID NO. CUFF.19241.0
  misc_feature: Variant of the nucleotide sequence at SEQ ID NO 7740
ggttcatgctcgtcgaagatcctgaatacgccgtcaatcttgagaaaaaagcgctctccatgcaacaattgaacaagcgtatgaagcaaatgaggaaaggtctgaatgcttcgtgtaagggcctcttagaggttcaagatcaacactatcgcaatcaagaagacgccttgccctcaagtatttacttcaatcgcaaaatcaacttcttacatcgaactgtcagagactatctcaatttggaccagacaaggcagcttctacgccgatggtgcgcccagagtttcgatgcggatgagactatctgcaaggcgttagtagcccaaatcaaggcagggccagagggtattgagtatcagggcatgaacgatcgactattcagagtattcgagttacaccgagaacgagcgaagaaatcatcattcaataattactcaaatgtcacgatgctccgcaagcatctgcttcaggttcttcagccccaggaaattgaactgcaggaagactccgatgctagttttttgggcccagaaaaagagactagttctatcttccaaagcatggacagtgaaggcaaggcatcacgatcaaagaaagatcagctcatatctagatctgagacggatcaactgacatctcagtcaaagtcagatcaggtggcatcatatcaagaaggaagatctcggagattgctacgaaaaatggggcatttattctcgaagtcgaagatacaaggtttcggatagtgtttacaagattgttacggcacggcgcccattataaggaccataaaagggaaattactctatcgataaactattcaattaataaggcacaaaacttctactaaatatactgaaaaagaactcaatatagcataaatatacgaaaaatcaactagtcaggatgctggaagcagtcaatattgtctgatcacatggcaaaagtctgaaaaatcaggtctgaagtgtgtattctgcgtgctaagtaataaaaatcaacgaaatctaggccatttaagccagactatatgccctccaccgacttcgctgactaatc

SEQ ID NO: 7743 - DNA, 4083 bp, Muscodor strobelii
  misc_feature: SGI cDNA ID NO. 562352
  misc_feature: Encodes the peptide sequence at SEQ ID NO 7744
tcggcagattatgacgtcgtcgtcaccttcttcgaagatatgaatagtttcctagcgagggtgaccatcttggagtcaaggcttccgaggtacaaggcgtatcagaactgcctgatggatgtgttcacttcattcttgaccctgtgcgggttcgcgcagaaatacatcgagcttgggagattcaagaaatggatcagaacccttctcgagggcaaagatagcgaactaggtgtggcccgggataacatggacaagaaacttggccatctgcagcaggccactgagtttgctatcctaggcaatacagaagagctccaagacatgagcaaagagcttagcgtaaatcagcaaatgcacactgagatgctggagcggcagatggccgtcatggatgatgtgaacgacagaaccaaggacatccaggatgacatcgtcaagatgcaccaactgctcaagaccatcaacgagcagaaaaaggagagcgggaaggtgaatagcgcctccgcggccgggcctgggaagcatttggctgccaatcggattcggaattttctcccgacggtggagggtgagattcacgaataccacatcctagaggagacaatggtgactgacacatgctcctgggtcttctcggagccgacatgggagacatggctcgaacataagaacgaaaggaataccgttcttcagatcactggcgagcctgggactggcaagagccatatcgctgctgccatttataacagattcgtcaagctggccgctgaggactctacccatcaaacatgcgccgcacacttctactttcgggagaaccacggcagcctatcgtggttcaggaatgccgtcgtcaccattataaatcaagtcgcggagcaaagccctgcgatttgcgagatcatcattacggtattgatgagggatgacatctataccgatccgagcgattggaagagtctcaccaacaccctgctggggcccgcatttagagcggaatccaaggctgccctatatctgatactagatggggtagatgagctcacagtcgaagaaagagcactctttacagagttcgttgagctatgccgcgctaaggagcttaacatttttattgcctgcactactaggcccgtgttgtcgtctagcacaccgctcgaagtgcctgtcagccatattgaggctcgaaaggagaagcagctcttggacttaaaggctatagtatggaatcgcttgaatactgccagtgctttgcggaaatttagtagatatgtgaagcagagaattgctaccaagattgaggaagcggcacctaacttactctatgccgagaggatgcttatccggctgaacagtttgggacgtgaaggtgcagtattgagtgaactaagtagaccgatgccggacgacctgtacggcttgtaccaggggatgttagacgaatgtcatcgtcggacgccagaaagccggcgccacgttgttgccacgctgttcatgtggctcacccatgaaaaacgcccactcctcctggacgaggtggtctcgctcctaaagcacattaccggagacgatgcttttgaccttgatgaaatacctgagccatttgctaagttcttgagtattggggacccgggcaccgacgccgagcaacgagtcgaggcccatactgacggcaattctgtcgccacggaccctacgaaggatgataatcatgagtccaagaaccgcgacgagttatataacgatggtgtattgcctgtcaagttccaagaccgttgtatgaggtctttctttatcgagtcaggtaatagtggctctgcattgtgcacgagtacgatcgactcccatcgtcaaattttcctcacgtgctgcgagatcgcacgagagcgacctaaaaataatgggacagctaatacattcagtcccggacttcaggcttatgccacacagaatctaagtcagcattggtctctcatcgatctggttagttatcctctagaagtaattgccccagtcatagaagcattcggtctcaccatgtccaacacttacaatttcgccgccatggccgaaagaaataaaatcgactacagctcgtgggctgggaagccatttgagcgcatgacagtgtggttacaagtatggcaggaccacaataatgagctgcggccgcagatagacgcgagagcagcagagtggtgggatgaagtggccaatgacaataaaaaggtattgcttcggttagttaggggacatgtccagagactcgtccattccccagcaggaacaaatgttttcattccatttcaatttgcacgaaacgcactccagactagcgatttgaagcatctcttcatcgaacaggccaagaaaaacttcccgaatgcactctcggagacccctgagaatccgagcctggcacaagagtcgcttggtatccctcatttccttggcattgaaatggattcggcagcctatctcattactgcccaagttctgcatgcagtcaaattctacgaggaagccagatcactctgtgttcagggtattaagtcatccactgataagcttatcaaattgaagtccctggccgtactgaccgatatccaactcaagatggaccaagtggacgaggcacgacagactataagccaatgcataagtggtgttgaagattcagatgtgtctgtccaagtcaagcgaccgatcatgatcacgaatgcacgaatccaggtcagattaggcgaaaaggaggcggcagcactatcctaccagaaagcgaggactgttgatccggatacgccgatgcccgtgatagtgctaaaggaggaattgggcatccatgtgaaagtcaaggatatgagaaaagtagtggagacaattaagtcatggagcgccttggagaggttaatatggctaacctgggatttcattgactcggaccacaattcaattgtccgtgaggctgcagcaagaacggacgaccatgcctttatggtggacatctacactgaagccattaagcatctcgacaatttcaactcaggagctccgctgcgatgcagtctagcaacaggctatatccaagtaatcggcgacatggccgccgcgcgtaagctcatcgacgaagtccttgacagtaccactaacggcgatgaatacgccttcaccgactatcttcccatgtactcgaaggaaatagccaccgatctgctatccgacgtctcgatagaattgttccgggcctccaacgacccggtagtgaaacgagaactactagataacatgaagagcgtgagactgagacagctgagcctcgacgtggtgagcgagtctgagagcttcctgctgcattacgagattgtcgtggcccgcatgatacgtaagatgggtccggcgatcgacttccagactgcgctccagaaggtgattgatgcttgttttgacggcttggcggacaaagttgggtggaacgatcaggcaaacctggagacacttgccgaggcactggcgatattgagcggagcgataccggatggggatgagctctggcgtgctgctcgcattatctcttcctgccgattctccaagttgggtggcgcggaagaggatgaagaggaagatgacgatgaggaagatccgggcgaaaaagaggatgatgacgaaaaagatgaagaggatgacggaggcgaagaagattcgagcgcggatgactcaaacgacggagacttggttgaaggcagcgactaccgttgcaacggcaattgcgtaccgacaactagtttctacggttggaaaggacgaaaagcataccagtgtacaacgtgtacctacggcttcctttgcgaaccgtgttacgagctacgacaagccgtcaatcggggcgagcgacaatttgagggaccaagcttctgtgggaaggatcatgcatatataaatctgcctattgagggttggcaaggaatcaaagacggagtgttgacattggctactggtgagagctggccatttgaggaatttctaaagaatgttcgcgagaatatttgtgttaacgcttggcaaagtttctggaagaacgtgtga

SEQ ID NO: 7744 - protein, 1360 aa, Muscodor strobelii
  misc_feature: SGI Peptide ID NO. 562352
  misc_feature (1)..(1357): NCBI GI: 256727995 Blast Desc: NECHADRAFT_83338 [Nectria haematococca mpVI 77-13-4]
  misc_feature (1)..(1359): NCBI GI: 256724597 Blast Desc: [Nectria haematococca mpVI 77-13-4]
  misc_feature (1)..(1357): NCBI GI: 225557793 Blast Desc: HCBG_05394 [Ajellomyces capsulatus G186AR]
  misc_feature (1)..(1357): NCBI GI: 225678303 Blast Desc: [Paracoccidioides brasiliensis Pb03]
  misc_feature (1)..(1357): NCBI GI: 226290649 Blast Desc: conserved [Paracoccidioides brasiliensis Pb18]
  misc_feature (62)..(1357): NCBI GI: 226280502 Blast Desc: conserved [Paracoccidioides brasiliensis Pb01]
  misc_feature (579)..(1357): NCBI GI: 240274094 Blast Desc: HCDG_08282 [Ajellomyces capsulatus H143]
  misc_feature (879)..(1357): NCBI GI: 154288200 Blast Desc: [Ajellomyces capsulatus NAm1] gi|150408536|gb|EDN04077.1| [Ajellomyces capsulatus NAm1]
  misc_feature (440)..(1357): NCBI GI: 169611122 Blast Desc: SNOG_08670 [Phaeosphaeria nodorum SN15] gi|160702227|gb|EAT83838.2| SNOG_08670 [Phaeosphaeria nodorum SN15]
  misc_feature (1)..(370): NCBI GI: 169611122 Blast Desc: SNOG_08670 [Phaeosphaeria nodorum SN15] gi|160702227|gb|EAT83838.2| SNOG_08670 [Phaeosphaeria nodorum SN15]
SADYDVVVTFFEDMNSFLARVTILESRLPRYKAYQNCLMDVFTSFLTLCGFAQKYIELGRFKKWIRTLLEGKDSELGVARDNMDKKLGHLQQATEFAILGNTEELQDMSKELSVNQQMHTEMLERQMAVMDDVNDRTKDIQDDIVKMHQLLKTINEQKKESGKVNSASAAGPGKHLAANRIRNFLPTVEGEIHEYHILEETMVTDTCSWVFSEPTWETWLEHKNERNTVLQITGEPGTGKSHIAAAIYNRFVKLAAEDSTHQTCAAHFYFRENHGSLSWFRNAVVTIINQVAEQSPAICEIIITVLMRDDIYTDPSDWKSLTNTLLGPAFRAESKAALYLILDGVDELTVEERALFTEFVELCRAKELNIFIACTTRPVLSSSTPLEVPVSHIEARKEKQLLDLKAIVWNRLNTASALRKFSRYVKQRIATKIEEAAPNLLYAERMLIRLNSLGREGAVLSELSRPMPDDLYGLYQGMLDECHRRTPESRRHVVATLFMWLTHEKRPLLLDEVVSLLKHITGDDAFDLDEIPEPFAKFLSIGDPGTDAEQRVEAHTDGNSVATDPTKDDNHESKNRDELYNDGVLPVKFQDRCMRSFFIESGNSGSALCTSTIDSHRQIFLTCCEIARERPKNNGTANTFSPGLQAYATQNLSQHWSLIDLVSYPLEVIAPVIEAFGLTMSNTYNFAAMAERNKIDYSSWAGKPFERMTVWLQVWQDHNNELRPQIDARAAEWWDEVANDNKKVLLRLVRGHVQRLVHSPAGTNVFIPFQFARNALQTSDLKHLFIEQAKKNFPNALSETPENPSLAQESLGIPHFLGIEMDSAAYLITAQVLHAVKFYEEARSLCVQGIKSSTDKLIKLKSLAVLTDIQLKMDQVDEARQTISQCISGVEDSDVSVQVKRPIMITNARIQVRLGEKEAAALSYQKARTVDPDTPMPVIVLKEELGIHVKVKDMRKVVETIKSWSALERLIWLTWDFIDSDHNSIVREAAARTDDHAFMVDIYTEAIKHLDNFNSGAPLRCSLATGYIQVIGDMAAARKLIDEVLDSTTNGDEYAFTDYLPMYSKEIATDLLSDVSIELFRASNDPVVKRELLDNMKSVRLRQLSLDVVSESESFLLHYEIVVARMIRKMGPAIDFQTALQKVIDACFDGLADKVGWNDQANLETLAEALAILSGAIPDGDELWRAARIISSCRFSKLGGAEEDEEEDDDEEDPGEKEDDDEKDEEDDGGEEDSSADDSNDGDLVEGSDYRCNGNCVPTTSFYGWKGRKAYQCTTCTYGFLCEPCYELRQAVNRGERQFEGPSFCGKDHAYINLPIEGWQGIKDGVLTLATGESWPFEEFLKNVRENICVNAWQSFWKNV

SEQ ID NO: 7745 - DNA, 1135 bp, Muscodor strobelii
  misc_feature: SGI EST ID NO. CUFF.19247.0
  misc_feature: Variant of the nucleotide sequence at SEQ ID NO 7743
cgcagaaatacatcgagcttgggagattcaagaaatggatcagaacccttctcgagggcaaagatagcgaactaggtgtggcccgggataacatggacaagaaacttggccatctgcagcaggccactgagtttgctatcctaggcaatacagaagagctccaagacatgagcaaagagcttagcgtaaatcagcaaatgcacactgagatgctggagcggcagatggccgtcatggatgatgtgaacgacagaaccaaggacatccaggatgacatcgtcaagatgcaccaactgctcaagaccatcaacgagcagaaaaaggagagcgggaaggtgaatagcgcctccgcggccgggcctgggaagcatttggctgccaatcggattcggaattttctcccgacggtggagggtgagattcacgaataccacatcctagaggagacaatggtgactgacacatgctcctgggtcttctcggagccgacatgggagacatggctcgaacataagaacgaaaggaataccgttcttcagatcactggcgagcctgggactggcaagagccatatcgctgctgccatttataacagattcgtcaagctggccgctgaggactctacccatcaaacatgcgccgcacacttctactttcgggagaaccacggcagcctatcgtggttcaggaatgccgtcgtcaccattataaatcaagtcgcggagcaaagccctgcgatttgcgagatcatcattacggtattgatgagggatgacatctataccgatccgagcgattggaagagtctcaccaacaccctgctggggcccgcatttagagcggaatccaaggctgccctatatctgatactagatggggtagatgagctcacagtcgaagaaagagcactctttacagagttcgttgagctatgccgcgctaaggagcttaacatttttattgcctgcactactaggcccgtgttgtcgtctagcacaccgctcgaagtgcctgtcagccatattgaggctcgaaaggagaagcagctcttggacttaaaggctatagtatggaatcgcttgaatactgccagtgctttgcggaaatttagtagatatgtgaagcagagaattgc

SEQ ID NO: 7746 - DNA, 1602 bp, Muscodor strobelii
  misc_feature: SGI cDNA ID NO. 562353
  misc_feature: Encodes the peptide sequence at SEQ ID NO 7747
atggccgaggtcacatctttgatcgcgaagcaattcacggcggggaagctgttcttccatttcttattttggggtgctcattggggaatcttcgcctacggttggtattcacaggctgcaaatgacaagctagcagccttgaacacgttaagatggtcggtgtggatttcgcgaggtgctggtctcgtcttatcgttcgatgtcacattgatattgctacctgtttgccggacactggtgagatggattcggcccaagatccgattccttcctctcgatgagaacgtctggtttcatcgccaagtcgcttatgctatgctgttgttcacgctcttgcatgtagctgcacattacgtcaactttttcaacgtcgagaaaacgcaagtccgtcctcagtccgctatcgaaattcattatgcccaagctggtggtatcacgggacatattatgcttttctgcatgctattaatgtacaccacagcccatcatcgtattcgacaacaatcattcgagacattttggtacacccaccacctcttcattccgttcttgctcggcatgtacacccacgccaccggatgcttcgtccgtgacagcgtgcagcctttctctccgtttgccggtgacaatttctggaatcactgtatcgggtaccaaggctggagatgggagctctttgctggtggactgtatctcctcgagcgcctatatcgtgaagttcgggccaaacgatcaacaaagatcactcgcgtcgttcgccatccatacgatgtggtcgaaatccaatttgagaagccgtccttcagatacaaagcaggacagtggcttttcttgcaggtcccctcaatctctggctggcagtggcatccattcacgataacgtcatgtccctacgacccatatgtttctgtacacattcgacaagttggtgacttcacaaaagctctcggcgatgctgttggtgctggatccgcgcaaggcaagctgtacgacggtgttgatcctatggggatgtacgaggtcgcactacaaaatggccaacaaatgccatcgcttcgcattgacggcccatacggtgctcctgctgaagatgtctttgataacgagattgccgtcctgataggaacaggtattggcgtcacgccatgggcatcgattctcaagaacatctggcatttaaggaacagcccaaacccacctcgtcgtctccgtcgtgtcgagttcatctggagtgcagaggctgctcgcgttcccggtagtaacgggatcgagttcttgaagatccatacatatcttacccagaagctcgacatggacacgacacagaacatcgtccttaacagtgtgggttctgatgtcgatcctctaacagaactcaaggcccggaccaatttcggacgcccagatttcaaacgcatattcgaagctatgcgcgagggtatccttgaccgcacttatatcaatggtctggagggtagcatgcagactacggtcggtgtgtacttctgcgggccctcagctgccgctcgagatatccaccagtccgccaaggcggtagattgcaaagaagtcaaattccgcttctggaaagaacacttctaa

SEQ ID NO: 7747 - protein, 533 aa, Muscodor strobelii
  misc_feature: SGI Peptide ID NO. 562353
  misc_feature (58)..(188): Pfam Id: PF01794 Pfam Desc: Ferric reductase like transmembrane component
  misc_feature (245)..(330): Pfam Id: PF00970 Pfam Desc: Oxidoreductase FAD-binding domain
  misc_feature (242)..(362): Pfam Id: PF08022 Pfam Desc: FAD-binding domain
  misc_feature (368)..(517): Pfam Id: PF08030 Pfam Desc: Ferric reductase NAD binding domain
  misc_feature (6)..(533): NCBI GI: 261358635 Blast Desc: cytochrome b-245 heavychain subunit beta [Verticillium albo-atrum VaMs.102]
  misc_feature (6)..(533): NCBI GI: 84570587 Blast Desc: NADPH oxidase [Epichloe festucae]
  misc_feature (6)..(533): NCBI GI: 116182190 Blast Desc: CHGG_01723 [Chaetomium globosum CBS 148.51] gi|88186020|gb|EAQ93488.1| CHGG_01723 [Chaetomium globosum CBS 148.51]
  misc_feature (6)..(533): NCBI GI: 256734688 Blast Desc: [Nectria haematococca mpVI 77-13-4]
  misc_feature (6)..(533): NCBI GI: 46107712 Blast Desc: FG00739.1 [Gibberella zeae PH-1]
  misc_feature (7)..(533): NCBI GI: 85111788 Blast Desc: NCU02110 [Neurospora crassa OR74A] gi|28925870|gb|EAA34868.1| NCU02110 [Neurospora crassa OR74A]
  misc_feature (3)..(533): NCBI GI: 145610983 Blast Desc: MGG_00750 [Magnaporthe grisea 70-15] gi|145018318|gb|EDK02597.1| MGG_00750 [Magnaporthe grisea 70-15] gi|151349585|gb|ABS01490.1| NADPH oxidase isoform 1 [Magnaporthe
  misc_feature (6)..(533): NCBI GI: 164513856 Blast Desc: NADPH oxidase 1 [Claviceps purpurea]
  misc_feature (1)..(533): NCBI GI: 171695024 Blast Desc: protein product [Podospora anserina] gi|13958313|gb|AAK50853.1|AF364817_1 NADPH oxidase 1 [Podospora anserina] gi|170947754|emb|CAP59917.1| protein product [Podospora
  misc_feature (7)..(533): NCBI GI: 154299865 Blast Desc: BC1G_10823 [Botryotinia fuckeliana B05.10] gi|150857103|gb|EDN32295.1| BC1G_10823 [Botryotinia fuckeliana B05.10] gi|164513878|emb|CAP12516.1| NADPH oxidase A [Botryotinia
  misc_feature (22)..(523): SWISSPROT Homolog: EC 1.6.3.1 NAD(P)H oxidase
MAEVTSLIAKQFTAGKLFFHFLFWGAHWGIFAYGWYSQAANDKLAALNTLRWSVWISRGAGLVLSFDVTLILLPVCRTLVRWIRPKIRFLPLDENVWFHRQVAYAMLLFTLLHVAAHYVNFFNVEKTQVRPQSAIEIHYAQAGGITGHIMLFCMLLMYTTAHHRIRQQSFETFWYTHHLFIPFLLGMYTHATGCFVRDSVQPFSPFAGDNFWNHCIGYQGWRWELFAGGLYLLERLYREVRAKRSTKITRVVRHPYDVVEIQFEKPSFRYKAGQWLFLQVPSISGWQWHPFTITSCPYDPYVSVHIRQVGDFTKALGDAVGAGSAQGKLYDGVDPMGMYEVALQNGQQMPSLRIDGPYGAPAEDVFDNEIAVLIGTGIGVTPWASILKNIWHLRNSPNPPRRLRRVEFIWSAEAARVPGSNGIEFLKIHTYLTQKLDMDTTQNIVLNSVGSDVDPLTELKARTNFGRPDFKRIFEAMREGILDRTYINGLEGSMQTTVGVYFCGPSAAARDIHQSAKAVDCKEVKFRFWKEHF

SEQ ID NO: 7748 - DNA, 3151 bp, Muscodor strobelii
  misc_feature: SGI EST ID NO. CUFF.19276.0
  misc_feature: Variant of the nucleotide sequence at SEQ ID NO 7746
gttgaattcgcccaaaattagacctcccatgcggtcgagatccggatgtcttgcgttacttgaacccgttgatttcccagcgctacggttcgtgcagctcttttcctttttccctttgaacaaaacttcgacgcagctgtcaaagagcaaacgacaaacgtcgaaattcctaaatgcattttccgtaggagcttagagctaaacccctggcttggcgaccctggcacctcaaaccaagccggtctcatcgactcctagccccgccaacccgcagccgattgactctgcggtgcgtgtacgacccgtggtctttcggcagccgacgaaacgaccccttacgtctgatctaccagactttatcttgcgatcttactatcttcagccactttgctgaatacgggttcaataccctagcgtcagggagagaatagccctgacaatacgattttcaccagtaatagtacccttaatttacgccaaaggccatagaaacgatatactattgcagcttagcactctgtatcatagtttcccagcgattgatagtcaaacaaattgctcgacccctgttctgtcaagaacaagctcgtttattcatcggatcgtcgctatccttctcaacccctggccataccttgcgacggtttctaacatctttgctaccctggccctcgctcatgccttatgacttcacggctgcccacgagcccaacgttctcgttcttcctcttacctcctcacttggcatcttggacgtagaaaggaccgcctgtcttcctactccactacctttcccttcgttcgctgctggttcagatcattcattcatttattcatcgcttgtttcgttttcttgtattggattggatagtagggttgcttaatacattggaggcttggaggaaggatagaattcaaacagaacaatcaggattatcgatttgggacacgaacgcccgattcattgcattcgctcgatatctttctccacggtcaccgtcgaaataagcccgagtcaacccacggcggtactgtcgcaggtcgacaactggactagattgcgtgtgcgtggaacaggaaggggttgcatcaatcgtcatcatggccgaggtcacatctttgatcgcgaagcaattcacggcggggaagctgttcttccatttcttattttggggtgctcattggggaatcttcgcctacggttggtattcacaggctgcaaatgacaagctagcagccttgaacacgttaagatggtcggtgtggatttcgcgaggtgctggtctcgtcttatcgttcgatgtcacattgatattgctacctgtttgccggacactggtgagatggattcggcccaagatccgattccttcctctcgatgagaacgtctggtttcatcgccaagtcgcttatgctatgctgttgttcacgctcttgcatgtagctgcacattacgtcaactttttcaacgtcgagaaaacgcaagtccgtcctcagtccgctatcgaaattcattatgcccaagctggtggtatcacgggacatattatgcttttctgcatgctattaatgtacaccacagcccatcatcgtattcgacaacaatcattcgagacattttggtacacccaccacctcttcattccgttcttgctcggcatgtacacccacgccaccggatgcttcgtccgtgacagcgtgcagcctttctctccgtttgccggtgacaatttctggaatcactgtatcgggtaccaaggctggagatgggagctctttgctggtggactgtatctcctcgagcgcctatatcgtgaagttcgggccaaacgatcaacaaagatcactcgcgtcgttcgccatccatacgatgtggtcgaaatccaatttgagaagccgtccttcagatacaaagcaggacagtggcttttcttgcaggtcccctcaatctctggctggcagtggcatccattcacgataacgtcatgtccctacgacccatatgtttctgtacacattcgacaagttggtgacttcacaaaagctctcggcgatgctgttggtgctggatccgcgcaaggcaagctgtacgacggtgttgatcctatggggatgtacgaggtcgcactacaaaatggccaacaaatgccatcgcttcgcattgacggcccatacggtgctcctgctgaagatgtctttgataacgagattgccgtcctgataggaacaggtattggcgtcacgccatgggcatcgattctcaagaacatctggcatttaaggaacagcccaaacccacctcgtcgtctccgtcgtgtcgagttcatctgggtgtgtaaggacactggctcatttgaatggttccagacgctactttcgctttggagtcacagagtgcagaggctgctcgcgttcccggtagtaacgggatcgagttcttgaagatccatacatatcttacccagaagctcgacatggacacgacacagaacatcgtccttaacagtgtgggttctgatgtcgatcctctaacagaactcaaggcccggaccaatttcggacgcccagatttcaaacgcatattcgaagctatgcgcgagggtatccttgaccgcacttatatcaatggtctggagggtagcatgcagactacggtcggtgtgtacttctgcgggccctcagctgccgctcgagatatccaccagtccgccaaggcggtagattgcaaagaagtcaaattccgcttctggaaagaacacttctaagttcgcgcatttacttctttgtatacccattttatgcatatttgttcgaatgtcaattgattgcgagcccgcgtcgctcattgacacaaccacacgcatgccgagaagcaggattggccgtgatgcactttgcacgctctcttgcccacaacttacataattacttgagggttttgatcaatcaacccgtcgcgttgtagagaggttctgaatgagatttgggacgacagactacttgtcatgatgatagatgatacatactcacattgttgaatataccagttccaagccatctctcctatgatctcacattctttcgtgttgaaataccggtttcaagtgatctgttctgccatctgaaatttgctcacaatgaagcttcttcc

SEQ ID NO: 7749 - DNA, 1089 bp, Muscodor strobelii
  misc_feature: SGI cDNA ID NO. 562354
  misc_feature: Encodes the peptide sequence at SEQ ID NO 7750
atgaggatacgggatgatggatatgtgcctgtagcgtcccagcgatgtgactcattggagattgacggcaacacattggtggacgtagagctagaccatgagattgatcgctctcccaagaagcccccagaggactatcagaaaccgccagattgctttccaatcaggacgcttttcaaagtcaagcgctcttacacatctgccaactcgctacctaccgaagtacatattcacacagagaaggggtgctcgaagcctttaaccgtcacaggtgcatgttttgggtcatcctttgagcttgatggcatgtactacttcaatgaaaaagacgggcgcgatctacagcatctgctttttagtacaaaaggcgagcaggaactgggtgacatggggcgacgatgcgaaccgattggcatagtgcggcgcttgtttccagtcagcaagaaactggacaaagggccggtagtcaggagtgttgcggctttagtccatgactaccgtgtggccatggaggacatatgtgaagttaatgatgaagtatatcacggtgcgaacgaggttaaccaggtcatccaactcataatcgacaagagtatgaacaaacttgaagacgaaaagccacgccttgttgctgttactcaagaggggaaactgataaagggaaagatgtcgagagtgactctcaacgatcctgcgagagcgaaacggatgtcatacctacaaacagaattcgatgcaccatctagcggcctcgacggtggacttaggggatcactggtattcgaagtgatgtgtgggcgggtctcagagagtgttcgactgcgaccagtgtttttggagctcgttggaatgattacaggagttggaagagtctatactaaaaccaaagatggcaaaactacctcacacactatactgcctacagtttatactctcagagatcgcctgtttatcacttatgagcaatgggagaaacgagaaacatataaaaaggcactggcaatgaactgctccgagaagccaggaggttcatctacagatacgtgggagagactcttcaagtcatggggtcttcctacctggatatga

SEQ ID NO: 7750 - protein, 362 aa, Muscodor strobelii
  misc_feature: SGI Peptide ID NO. 562354
MRIRDDGYVPVASQRCDSLEIDGNTLVDVELDHEIDRSPKKPPEDYQKPPDCFPIRTLFKVKRSYTSANSLPTEVHIHTEKGCSKPLTVTGACFGSSFELDGMYYFNEKDGRDLQHLLFSTKGEQELGDMGRRCEPIGIVRRLFPVSKKLDKGPVVRSVAALVHDYRVAMEDICEVNDEVYHGANEVNQVIQLIIDKSMNKLEDEKPRLVAVTQEGKLIKGKMSRVTLNDPARAKRMSYLQTEFDAPSSGLDGGLRGSLVFEVMCGRVSESVRLRPVFLELVGMITGVGRVYTKTKDGKTTSHTILPTVYTLRDRLFITYEQWEKRETYKKALAMNCSEKPGGSSTDTWERLFKSWGLPTWI

SEQ ID NO: 7751 - DNA, 662 bp, Muscodor strobelii
  misc_feature: SGI EST ID NO. CUFF.19266.0
  misc_feature: Variant of the nucleotide sequence at SEQ ID NO 7749
ttttgggtcatcctttgagcttgatggcatgtactacttcaatgaaaaagacgggcgcgatctacagcatctgctttttagtacaaaaggcgagcaggaactgggtgacatggggcgacgatgcgaaccgattggcatagtgcggcgcttgtttccagtcagcaagaaactggacaaagggccggtagtcaggagtgttgcggctttagtccatgactaccgtgtggccatggaggacatatgtgaagttaatgatgaagtatatcacggtgcgaacgaggttaaccaggtcatccaactcataatcgacaagagtatgaacaaacttgaagacgaaaagccacgccttgttgctgttactcaagaggggaaactgataaagggaaagatgtcgagagtgactctcaacgatcctgcgagagcgaaacggatgtcatacctacaaacagaattcgatgcaccatctagcggcctcgacggtggacttaggggatcactggtattcgaagtgatgtgtgggcgggtctcagagagtgttcgactgcgaccagtgtttttggagctcgttggaatgattacaggagttggaagagtctatactaaaaccaaagatggcaaaactacctcacacactatactgcctacagtttatactctcagag

SEQ ID NO: 7752 - DNA, 3645 bp, Muscodor strobelii
  misc_feature: SGI cDNA ID NO. 562355
  misc_feature: Reduced expression when VOC is produced
  misc_feature: Encodes the peptide sequence at SEQ ID NO 7753
atgggtatcagtagacgtcccaaagacaaggccggcggaggtcgcgcaggcggcggcgcatcgtcgggccccaaacccaagaaggccaccttcgagaccaccaagaagaaggagatcggcgtctctgacctgacactacttagcaaggtgtccaacgaggccatcaacgagaacttgaagaagcgtttcgagggccgtgagatctacacgtacatcggccatgtgctggtttccgtcaaccccttccgcgatctcggcatctacaccgacgacgtcctcgagtcctacaagggcaagaaccgcctcgagatgcccccgcacgtcttcgccatcgccgagagcgcctactacaacatgaaggcctacaaggacaaccagtgcgtcatcatctcgggcgagtcgggcgccggcaagaccgaggccgccaagcgcatcatgcagtacatcgccaacgtctccggcggcgagagcggcgagatccagcagatcaaggacatggtgcttgccaccaaccccctgctcgagtccttcggcaacgccaagaccctgcgcaacaacaactcgtcccgcttcggcaagtacctgcagatacacttcaacaccaacggagagcctgtgggcgccgacatcaccaactacctgctcgagaagacgagggtcgtcgggcagatcaccaacgagcgcagcttccacatcttctaccagtttgccaagggcgcatccgagaactacaggaccatgtttggcgtgcagaagcccgagacctacgcctacttgagccgctcgaaatgtttcaatgtcgacggcatcgacgacttggcagagtaccaagatacgctcaacgctatgaagattattggcctttcacaaggtgagcaggacgaggtattccgcatgttggctgcaatcctgtatgccggaaacatccagttcagagaaggcgacgacggctatgctgcagtcgcagatcaatcttacgttgactttttggcatacctgctcgaagttacaccggcagcattgatcaagggcatcaccatccgtgtactgaccccgagaagcggcgaagtgatcgagtcgcctgcgaacatcgctcaggccaatgcaacccgagatgcgctcagcatggctatctacaacaacttgtttgattggatagtcgggaggataaaccagtctttgcaggccagacaggcgacctccaacaacatcggtattctggatatttatggcttcgagattttcgagaaaaacagcttcgaacagctgtgtatcaactacgtcaatgaaaaattgcagcagatctttatccagctcacgcttaaggcagagcaggaggaatacgcgagggaacagatccaatggacccctatcaagtacttcgacaacaaggtcgtgtgcgacctgattgagcaagtgcgccctgttggtgtgttctcagcactcaaggacgctaccaagactgctcatgcagatcccgctgcgtgtgaccggacgttcatgcagagtatcaacggcatgtccaacccacatctcactccccgacagggcagtttcatcatcaagcactatgctggtgatgtcagttacacaacagagggtattacagataagaacaaagaccaattgctcaagggtgtccagaatctcttccagcagagctccaacactttcgtccacaccctcttcccccaacaggttgaccaggataaccgcaagcagccaccgaccgctggtgaccgtatccgtgcctcagccaacgcccttgtggagactctcatgaaatgtcaaccgtcctatatccgaaccatcaaacccaatgagaataagtctcccaccgagtataacgtccccaatgtcctccaccagatcaaatatctcggtctgcaggagaacgtcagaattcgacgtgccggttttgcttaccgtcaatcgttcgagaagtttgtcgagcgtttcttcctcttgtcgccagctacttcgtatgcaggtgaatacacctggcaaggatcggaagaggctgccgtgaaacagattctcaaggataccagtattcccaaggaagaatggcagttaggagtaacgaaggcattcattaaatcgcccgaaactctatttgctctcgagacgatgcgcgatcgttactggcacaatatggccattcgcatccaaagaatgtggagagcgtacttggcctacagggcggaatcggcaactcgtattcaacgattttggcgcaaaaaacgaacaggtgctgaataccttgagttgagagataggggccacgctgttcttcaaggccggaaagaacgaagacggatgagtattctaggatcccgtcgtttcttgggagactatctaggagtcaatgcatccaacggcccgggatcacaggttcgtaatgccatcggcttgtcgagcaacgagaaggctctcttctcatgccgtggtgagattttggaggccaaattcggtcggtcaagtaaagcaagtccgcgcatcctcatcgtgtccaatagcaagttctatattgtggctcaagctctcgtcagtggacagccacaaatatcgattgaaaaatcagtacctctgggtgctataaagttcattggtacctcaacaagcagagatgactggttctcgctaggcattgggtctcagcaggaggctgatcccttattaaactgtgttttcaagacagagatgtttacgcaaatgcagcgcgctatgcctggaggtttcaacctgaagattggcgagtcgatcgagtatgccaagaagccagggaagatgcaaatggtcaaagttctcaaagactcaccacaaaaggttgatttctacaagagtggcgctgttcatacacaacccggggaccctgcatcgtccaggtctcgtcctacacccaaagctaagccggttccaccacgaccaattactcgaggaaagctcatcaaaccgggcggtcccaatggtagaccatcgcggctcacaggatcaagaccggctgcagcgcgcacgcctgttgctgctccggtcgccgtgaaaactcctcgcccggtcccaacccctggtgtcgctcaagggtcaaggccagtcccgaaccccattaaacaacttcccacgcatactcgtaataccagttcgacatcatccgctcgtgcaccgccaccaccaccaccacctcctccagccagggctgccgttacggctaaggtactatatgatttcgtcagccagaacgacaacgaactgtctattaaggcgggcgacatcatcgaaattgtgacgaaagagaacaatggatggtggctagccaagataggtacaaaacaagcgtgggtgccggcggcttacgtccaagagcaagtacctcccccgtcaatagtaccaagggccccacctccacctccggccccgaacggccgcaaaccagcgcccgttcccccggccaaaagacctgcagcgggcaagaagccagctgctttgcagccgagggactctgggtatagcttgaatacgaatggaaacggcggcgatagcagccgcagcaatacgccgacaccgagtgttgcaggctctctggctgatgcgctactcgcgagacaaagtgccatgaggaatagagaagacgacgacgattggtag

SEQ ID NO: 7753 - protein, 1214 aa, Muscodor strobelii
  misc_feature: SGI Peptide ID NO. 562355
  misc_feature (41)..(700): Pfam Id: PF00063 Pfam Desc: Myosin head (motor domain)
  misc_feature (757)..(960): Pfam Id: PF06017 Pfam Desc: Myosin tail
  misc_feature (1068)..(1122): Pfam Id: PF00018 Pfam Desc: SH3 domain
  misc_feature (1069)..(1122): Pfam Id: PF07653 Pfam Desc: Variant SH3 domain
  misc_feature (1)..(1214): NCBI GI: 39974211 Blast Desc: conserved [Magnaporthe grisea 70-15] gi|190359898|sp|A4RE77.1|MYO1_MAGGR RecName: Full=Myosin-1; AltName: Full=Class I unconventional myosin; AltName: Full=Type I
  misc_feature (1)..(1214): NCBI GI: 85111790 Blast Desc: myosin-5 [Neurospora crassa OR74A] gi|74696655|sp|Q7SDM3.1|MYO1_NEUCR RecName: Full=Myosin-1; AltName: Full=Class I unconventional myosin; AltName: Full=Type I
  misc_feature (1)..(1214): NCBI GI: 46109056 Blast Desc: FG01410.1 [Gibberella zeae PH-1]
  misc_feature (19)..(1214): NCBI GI: 256730855 Blast Desc: [Nectria haematococca mpVI 77-13-4]
  misc_feature (1)..(1214): NCBI GI: 261358632 Blast Desc: myosin-5 [Verticillium albo-atrum VaMs.102]
  misc_feature (1)..(1214): NCBI GI: 116182188 Blast Desc: conserved [Chaetomium globosum CBS 148.51] gi|121790290|sp|Q2HDI2.1|MYO1_CHAGB RecName: Full=Myosin-1; AltName: Full=Class I unconventional myosin; AltName: Full=Type I
  misc_feature (2)..(1024): NCBI GI: 171695026 Blast Desc: protein product [Podospora anserina] gi|170947755|emb|CAP59918.1| protein product [Podospora anserina]
  misc_feature (1)..(1214): NCBI GI: 156053630 Blast Desc: SS1G_05662 [Sclerotinia sclerotiorum 1980] gi|190359899|sp|A7EK16.1|MYO1_SCLS1 RecName: Full=Myosin-1; AltName: Full=Class I unconventional myosin; AltName: Full=Type I
  misc_feature (1)..(1214): NCBI GI: 190359860 Blast Desc: SS1G_05662 [Sclerotinia sclerotiorum 1980] gi|190359899|sp|A7EK16.1|MYO1_SCLS1 RecName: Full=Myosin-1; AltName: Full=Class I unconventional myosin; AltName: Full=Type I
  misc_feature (1)..(1213): NCBI GI: 238483011 Blast Desc: myosin I MyoA/Myo5 [Aspergillus flavus NRRL3357] gi|220700794|gb|EED57132.1| myosin I MyoA/Myo5 [Aspergillus flavus NRRL3357]
  misc_feature (41)..(770): SWISSPROT Homolog: EC 2.7.11.1 Non-specific serine/threonine protein kinase
  misc_feature: Useful for introducing or modulating the production of volatile compounds
MGISRRPKDKAGGGRAGGGASSGPKPKKATFETTKKKEIGVSDLTLLSKVSNEAINENLKKRFEGREIYTYIGHVLVSVNPFRDLGIYTDDVLESYKGKNRLEMPPHVFAIAESAYYNMKAYKDNQCVIISGESGAGKTEAAKRIMQYIANVSGGESGEIQQIKDMVLATNPLLESFGNAKTLRNNNSSRFGKYLQIHFNTNGEPVGADITNYLLEKTRVVGQITNERSFHIFYQFAKGASENYRTMFGVQKPETYAYLSRSKCFNVDGIDDLAEYQDTLNAMKIIGLSQGEQDEVFRMLAAILYAGNIQFREGDDGYAAVADQSYVDFLAYLLEVTPAALIKGITIRVLTPRSGEVIESPANIAQANATRDALSMAIYNNLFDWIVGRINQSLQARQATSNNIGILDIYGFEIFEKNSFEQLCINYVNEKLQQIFIQLTLKAEQEEYAREQIQWTPIKYFDNKVVCDLIEQVRPVGVFSALKDATKTAHADPAACDRTFMQSINGMSNPHLTPRQGSFIIKHYAGDVSYTTEGITDKNKDQLLKGVQNLFQQSSNTFVHTLFPQQVDQDNRKQPPTAGDRIRASANALVETLMKCQPSYIRTIKPNENKSPTEYNVPNVLHQIKYLGLQENVRIRRAGFAYRQSFEKFVERFFLLSPATSYAGEYTWQGSEEAAVKQILKDTSIPKEEWQLGVTKAFIKSPETLFALETMRDRYWHNMAIRIQRMWRAYLAYRAESATRIQRFWRKKRTGAEYLELRDRGHAVLQGRKERRRMSILGSRRFLGDYLGVNASNGPGSQVRNAIGLSSNEKALFSCRGEILEAKFGRSSKASPRILIVSNSKFYIVAQALVSGQPQISIEKSVPLGAIKFIGTSTSRDDWFSLGIGSQQEADPLLNCVFKTEMFTQMQRAMPGGFNLKIGESIEYAKKPGKMQMVKVLKDSPQKVDFYKSGAVHTQPGDPASSRSRPTPKAKPVPPRPITRGKLIKPGGPNGRPSRLTGSRPAAARTPVAAPVAVKTPRPVPTPGVAQGSRPVPNPIKQLPTHTRNTSSTSSARAPPPPPPPPPARAAVTAKVLYDFVSQNDNELSIKAGDIIEIVTKENNGWWLAKIGTKQAWVPAAYVQEQVPPPSIVPRAPPPPPAPNGRKPAPVPPAKRPAAGKKPAALQPRDSGYSLNTNGNGGDSSRSNTPTPSVAGSLADALLARQSAMRNREDDDDW

SEQ ID NO: 7754 - DNA, 4188 bp, Muscodor strobelii
  misc_feature: SGI EST ID NO. CUFF.19330.0
  misc_feature: Variant of the nucleotide sequence at SEQ ID NO 7752
cttccaccagattctcaccaaccgccgactcttgcgacgacgtcctctcctctctcctcgtactcgccgtctctcctcaccacccattaccagtgtatcacttctttttttcttgtcgccgctcgctctctgcactcggcgacctcatcatcctgcggcatttcatattgcgatcgcaccccaacagccaaccggcgcccccttcgttttaggctgacgagcaatttcatgcgagcccaacatgggtatcagtagacgtcccaaagacaaggccggcggaggtcgcgcaggcggcggcgcatcgtcgggccccaaacccaagaaggccaccttcgagaccaccaagaagaaggagatcggcgtctctgacctgacactacttagcaaggtgtccaacgaggccatcaacgagaacttgaagaagcgtttcgagggccgtgagatctacacgtacatcggccatgtgctggtttccgtcaaccccttccgcgatctcggcatctacaccgacgacgtcctcgagtcctacaagggcaagaaccgcctcgagatgcccccgcacgtcttcgccatcgccgagagcgcctactacaacatgaaggcctacaaggacaaccagtgcgtcatcatctcgggcgagtcgggcgccggcaagaccgaggccgccaagcgcatcatgcagtacatcgccaacgtctccggcggcgagagcggcgagatccagcagatcaaggacatggtgcttgccaccaaccccctgctcgagtccttcggcaacgccaagaccctgcgcaacaacaactcgtcccgcttcggcaagtacctgcagatacacttcaacaccaacggagagcctgtgggcgccgacatcaccaactacctgctcgagaagacgagggtcgtcgggcagatcaccaacgagcgcagcttccacatcttctaccagtttgccaagggcgcatccgagaactacaggaccatgtttggcgtgcagaagcccgagacctacgcctacttgagccgctcgaaatgtttcaatgtcgacggcatcgacgacttggcagagtaccaagatacgctcaacgctatgaagattattggcctttcacaaggtgagcaggacgaggtattccgcatgttggctgcaatcctgtatgccggaaacatccagttcagagaaggcgacgacggctatgctgcagtcgcagatcaatcttacgttgactttttggcatacctgctcgaagttacaccggcagcattgatcaagggcatcaccatccgtgtactgaccccgagaagcggcgaagtgatcgagtcgcctgcgaacatcgctcaggccaatgcaacccgagatgcgctcagcatggctatctacaacaacttgtttgattggatagtcgggaggataaaccagtctttgcaggccagacaggcgacctccaacaacatcggtattctggatatttatggcttcgagattttcgagaaaaacagcttcgaacagctgtgtatcaactacgtcaatgaaaaattgcagcagatctttatccagctcacgcttaaggcagagcaggaggaatacgcgagggaacagatccaatggacccctatcaagtacttcgacaacaaggtcgtgtgcgacctgattgagcaagtgcgccctgttggtgtgttctcagcactcaaggacgctaccaagactgctcatgcagatcccgctgcgtgtgaccggacgttcatgcagagtatcaacggcatgtccaacccacatctcactccccgacagggcagtttcatcatcaagcactatgctggtgatgtcagttacacaacagagggtattacagataagaacaaagaccaattgctcaagggtgtccagaatctcttccagcagagctccaacactttcgtccacaccctcttcccccaacaggttgaccaggataaccgcaagcagccaccgaccgctggtgaccgtatccgtgcctcagccaacgcccttgtggagactctcatgaaatgtcaaccgtcctatatccgaaccatcaaacccaatgagaataagtctcccaccgagtataacgtccccaatgtcctccaccagatcaaatatctcggtctgcaggagaacgtcagaattcgacgtgccggttttgcttaccgtcaatcgttcgagaagtttgtcgagcgtttcttcctcttgtcgccagctacttcgtatgcaggtgaatacacctggcaaggatcggaagaggctgccgtgaaacagattctcaaggataccagtattcccaaggaagaatggcagttaggagtaacgaaggcattcattaaatcgcccgaaactctatttgctctcgagacgatgcgcgatcgttactggcacaatatggccattcgcatccaaagaatgtggagagcgtacttggcctacagggcggaatcggcaactcgtattcaacgattttggcgcaaaaaacgaacaggtgctgaataccttgagttgagagataggggccacgctgttcttcaaggccggaaagaacgaagacggatgagtattctaggatcccgtcgtttcttgggagactatctaggagtcaatgcatccaacggcccgggatcacaggttcgtaatgccatcggcttgtcgagcaacgagaaggctctcttctcatgccgtggtgagattttggaggccaaattcggtcggtcaagtaaagcaagtccgcgcatcctcatcgtgtccaatagcaagttctatattgtggctcaagctctcgtcagtggacagccacaaatatcgattgaaaaatcagtacctctgggtgctataaagttcattggtacctcaacaagcagagatgactggttctcgctaggcattgggtctcagcaggaggctgatcccttattaaactgtgttttcaagacagagatgtttacgcaaatgcagcgcgctatgcctggaggtttcaacctgaagattggcgagtcgatcgagtatgccaagaagccagggaagatgcaaatggtcaaagttctcaaagactcaccacaaaaggttgatttctacaagagtggcgctgttcatacacaacccggggaccctgcatcgtccaggtctcgtcctacacccaaagctaagccggttccaccacgaccaattactcgaggaaagctcatcaaaccgggcggtcccaatggtagaccatcgcggctcacaggatcaagaccggctgcagcgcgcacgcctgttgctgctccggtcgccgtgaaaactcctcgcccggtcccaacccctggtgtcgctcaagggtcaaggccagtcccgaaccccattaaacaacttcccacgcatactcgtaataccagttcgacatcatccgctcgtgcaccgccaccaccaccaccacctcctccagccagggctgccgttacggctaaggtactatatgatttcgtcagccagaacgacaacgaactgtctattaaggcgggcgacatcatcgaaattgtgacgaaagagaacaatggatggtggctagccaagataggtacaaaacaagcgtgggtgccggcggcttacgtccaagagcaagtacctcccccgtcaatagtaccaagggccccacctccacctccggccccgaacggccgcaaaccagcgcccgttcccccggccaaaagacctgcagcgggcaagaagccagctgctttgcagccgagggactctgggtatagcttgaatacgaatggaaacggcggcgatagcagccgcagcaatacgccgacaccgagtgttgcaggctctctggctgatgcgctactcgcgagacaaagtgccatgaggaatagagaagacgacgacgattggtagagcatctaggtgcttcgactgtgatagaaaaggacatgtgagtgacgtgaaaagaagcatgagtagaatattatggttacgattatagcgtctcttgttgttcttgttttcatcttcatgattacatgattaccttatagctgttgattatggggtgcgcctcacggcgagagggatcgtgcggaaatgagatgagaaaaggcgtggaattgagtagtgaattaaaagataggtgatagggtgggagatgaatagaaagtggtattgacaaattcatgaattgacaataactacatagtgcg

SEQ ID NO: 7755 - DNA, 1689 bp, Muscodor strobelii
  misc_feature: SGI cDNA ID NO. 562356
  misc_feature: Elevated expression when VOC is produced
  misc_feature: Encodes the peptide sequence at SEQ ID NO 7756
atggcagaagtggtcggactcatcgctagcattggcacgattgcttcggctggcgtcactgtcgcaaaaatgatttctgcacttgcggatgagcttggcacggccggcgcgagagtcagcgcgatatcgaccgaaaccaaagccttggcctttattcttcacgaattgaggcgacgcttgacccggctgcagaatgtttcgaaacaggtcatcgagctagccacagagattgctgatctattaagatggctcttcacgaagacaaagatcgctactcgacagacctcgcttgattcgcttaagcacactctgactctgttcctacatactttggattttgaacaaggtgatgtgatagacgaggaatgcattcaggacgaaatcaaacacatggtaaagaactccaaagagaccaaagccaacttccttcgtgccgagcgtgtagaccagtttctcgagactacttgtggcgactgcgagtcaccgcgagaactctctgattgcaacaacgaggaaaccaatgcgggccacgagatgacgtcgcgagaaggcatagggggtgacaaggaggatgccattacagctcccacaagtgaagcattaatcattcttcagaatcacgaggatgcaatgcaagaagcggatggaccgcgtgctcaacaccaatatgaagccaagacagaatttgacgtcgtcctttctctctcggacgacgcattcttgcatattgctgcgcatatccatgcgcaaaaggctgtcactcactacgctctcttaatggtagagaagagtcatgacgtggaaagtgttcccggtgcgtcgtgtagcgacgacatcgaattttcaacgcccgagcaatttgattttgtgcgaaacactcaagtccacgacacagactctatggatgcaacaaatttccggccaagtcatagctctggcttgaatgaacgatctgaattgccttataccgagagcagtcaaggcttaggtcacagctcaagagacacaaagccacaaacttctcaccgctcagcccatgaaaatgctggaaagtcagattggtcaaagccgaatagggacggtacgtactatcttaacaacaaccagccacagaccacatctgatccaagagcggctggctccaaagatgatctagatgatctgcagcgaccaacggatgacgatgagaaattcgatctaaggatgcaagtggatgcgctgatttctcaattgaggacgaaagaagaggaagccaaattgtccgagctcgaaatacgagtcagaggagaagcagaagaagagtttcgcaggaaaatggagcagatgagacaggccgaggaagtccgagccgaacagcgcaagactgcgctcgagctagctgagaaacaagtcgaggccgcccgtggggatgctgcgagggcgacacgtcaagctgaaaccgaaatcgcaaagagagaggcagaagccactgcccgagctgagcgcgatacacgggaaaggctagaggccgagcgtggagtcgaagaggagaggaagaaaatagaagcagaggtcattgctcaggctgaacaagaggctgaggttacgttgcaggcagcgtcggagcgtcaggctgaccggaagaagaaaaggggcctgaggaggttgatgttgaatcaggatcataatagactgagctggtacaggtag

SEQ ID NO: 7756 - protein, 562 aa, Muscodor strobelii
  misc_feature: SGI Peptide ID NO. 562356
  misc_feature (401)..(526): NCBI GI: 46126105 Blast Desc: FG07430.1 [Gibberella zeae PH-1]
  misc_feature (404)..(544): NCBI GI: 116206700 Blast Desc: CHGG_02643 [Chaetomium globosum CBS 148.51] gi|88183240|gb|EAQ90708.1| CHGG_02643 [Chaetomium globosum CBS 148.51]
  misc_feature: Useful for introducing or modulating the production of volatile compounds
MAEVVGLIASIGTIASAGVTVAKMISALADELGTAGARVSAISTETKALAFILHELRRRLTRLQNVSKQVIELATEIADLLRWLFTKTKIATRQTSLDSLKHTLTLFLHTLDFEQGDVIDEECIQDEIKHMVKNSKETKANFLRAERVDQFLETTCGDCESPRELSDCNNEETNAGHEMTSREGIGGDKEDAITAPTSEALIILQNHEDAMQEADGPRAQHQYEAKTEFDVVLSLSDDAFLHIAAHIHAQKAVTHYALLMVEKSHDVESVPGASCSDDIEFSTPEQFDFVRNTQVHDTDSMDATNFRPSHSSGLNERSELPYTESSQGLGHSSRDTKPQTSHRSAHENAGKSDWSKPNRDGTYYLNNNQPQTTSDPRAAGSKDDLDDLQRPTDDDEKFDLRMQVDALISQLRTKEEEAKLSELEIRVRGEAEEEFRRKMEQMRQAEEVRAEQRKTALELAEKQVEAARGDAARATRQAETEIAKREAEATARAERDTRERLEAERGVEEERKKIEAEVIAQAEQEAEVTLQAASERQADRKKKRGLRRLMLNQDHNRLSWYR

SEQ ID NO: 7757 - DNA, 1468 bp, Muscodor strobelii
  misc_feature: SGI EST ID NO. CUFF.19366.1
  misc_feature: Variant of the nucleotide sequence at SEQ ID NO 7755
gatcgctactcgacagacctcgcttgattcgcttaagcacactctgactctgttcctacatactttggattttgaacaaggtgatgtgatagacgaggaatgcattcaggacgaaatcaaacacatggtaaagaactccaaagagaccaaagccaacttccttcgtgccgagcgtgtagaccagtttctcgagactacttgtggcgactgcgagtcaccgcgagaactctctgattgcaacaacgaggaaaccaatgcgggccacgagatgacgtcgcgagaaggcatagggggtgacaaggaggatgccattacagctcccacaagtgaagcattaatcattcttcagaatcacgaggatgcaatgcaagaagcggatggaccgcgtgctcaacaccaatatgaagccaagacagaatttgacgtcgtcctttctctctcggacgacgcattcttgcatattgctgcgcatatccatgcgcaaaaggctgtcactcactacgctctcttaatggtagagaagagtcatgacgtggaaagtgttcccggtgcgtcgtgtagcgacgacatcgaattttcaacgcccgagcaatttgattttgtgcgaaacactcaagtccacgacacagactctatggatgcaacaaatttccggccaagtcatagctctggcttgaatgaacgatctgaattgccttataccgagagcagtcaaggcttaggtcacagctcaagagacacaaagccacaaacttctcaccgctcagcccatgaaaatgctggaaagtcagattggtcaaagccgaatagggacgatgatctagatgatctgcagcgaccaacggatgacgatgagaaattcgatctaaggatgcaagtggatgcgctgatttctcaattgaggacgaaagaagaggaagccaaattgtccgagctcgaaatacgagtcagaggagaagcagaagaagagtttcgcaggaaaatggagcagatgagacaggccgaggaagtccgagccgaacagcgcaagactgcgctcgagctagctgagaaacaagtcgaggccgcccgtggggatgctgcgagggcgacacgtcaagctgaaaccgaaatcgcaaagagagaggcagaagccactgcccgagctgagcgcgatacacgggaaaggctagaggccgagcgtggagtcgaagaggagaggaagaaaatagaagcagaggtcattgctcaggctgaacaagaggctgaggttacgttgcaggcagcgtcggagcgtcaggctgaccggaagaagaaaaggggcctgaggaggttgatgttgaatcaggatcataatagactgagctggtacaggtagttttgtgcgaggtggtcttgatactttggacatacaggcatttattaagaactctatcgagtcgtgccccatccccgagatcgagacgaagagaagaggtgctgccattca

SEQ ID NO: 7758 - DNA, 651 bp, Muscodor strobelii
  misc_feature: SGI cDNA ID NO. 562357
  misc_feature: Encodes the peptide sequence at SEQ ID NO 7759
atggggacgggaaacccgttgttgtggttctttcctttttatcctcatccgagggtcgccaaaccgaaacttagtggagacgagttggtgaataagttagagagtggtggtaggggactgggtaccggatggagttatgaagagaatgggatgaatgatagggagggcttgtggccaccgattgatccggagaaagtgaggaataaacgcctttggaggcgaaggcggagggaagaggaggagtttaggatgagggagccagtattgccggatatggatttgagccctgaacaggagaaagaggcgttcagaaggagacaagagcaagacctacagcggtggaggggcagagaggggatcatggatgagcttgaggagacagacccttatgcagcagatgggaggtatggtggtcacgacgatttggacagagcgagaccagcgcagaggattgtggttgatgagggcaggtccggctgggtcaacggcgatggtgagcatttaggggattatggcgttgatgaagatgccgagtttgacgatgacgggtttgtgtttgaggatgggaacaaggacgatgatgaggatgtgccgcttgcacagcttataagaagaaggaaagggcatgccaaggatagtgaggatacgtag

SEQ ID NO: 7759 - protein, 216 aa, Muscodor strobelii
  misc_feature: SGI Peptide ID NO. 562357
  misc_feature (1)..(215): NCBI GI: 261358631 Blast Desc: palmitoyltransferase PFA4 [Verticillium albo-atrum VaMs.102]
  misc_feature (1)..(215): NCBI GI: 256730629 Blast Desc: NECHADRAFT_30448 [Nectria haematococca mpVI 77-13-4]
  misc_feature (1)..(215): NCBI GI: 46109058 Blast Desc: FG01411.1 [Gibberella zeae PH-1] gi|82593021|sp|Q4IMZ7.1|PFA4_GIBZE RecName: Full=Palmitoyltransferase PFA4; AltName: Full=Protein fatty 4
  misc_feature (1)..(213): NCBI GI: 156053640 Blast Desc: SS1G_05667 [Sclerotinia sclerotiorum 1980] gi|154703448|gb|EDO03187.1| SS1G_05667 [Sclerotinia sclerotiorum 1980]
  misc_feature (1)..(207): NCBI GI: 85111266 Blast Desc: NCU02118 [Neurospora crassa OR74A] gi|74628986|sp|Q7SCY6.1|PFA4_NEUCR RecName: Full=Palmitoyltransferase PFA4; AltName: Full=Protein fatty 4
  misc_feature (1)..(208): NCBI GI: 154299853 Blast Desc: BC1G_10817 [Botryotinia fuckeliana B05.10] gi|150857097|gb|EDN32289.1| BC1G_10817 [Botryotinia fuckeliana B05.10]
  misc_feature (1)..(208): NCBI GI: 258578037 Blast Desc: conserved [Uncinocarpus reesii 1704] gi|237903466|gb|EEP77867.1| conserved [Uncinocarpus reesii 1704]
  misc_feature (1)..(216): NCBI GI: 171695030 Blast Desc: protein product [Podospora anserina] gi|170947757|emb|CAP59920.1| protein product [Podospora anserina]
  misc_feature (1)..(212): NCBI GI: 39974213 Blast Desc: MGG_00747 [Magnaporthe grisea 70-15] gi|145018320|gb|EDK02599.1| MGG_00747 [Magnaporthe grisea 70-15]
  misc_feature (2)..(212): NCBI GI: 240110283 Blast Desc: DHHC zinc finger domain containing protein [Coccidioides posadasii C735 delta SOWgp]
MGTGNPLLWFFPFYPHPRVAKPKLSGDELVNKLESGGRGLGTGWSYEENGMNDREGLWPPIDPEKVRNKRLWRRRRREEEEFRMREPVLPDMDLSPEQEKEAFRRRQEQDLQRWRGREGIMDELEETDPYAADGRYGGHDDLDRARPAQRIVVDEGRSGWVNGDGEHLGDYGVDEDAEFDDDGFVFEDGNKDDDEDVPLAQLIRRRKGHAKDSEDT

SEQ ID NO: 7760 - DNA, 2090 bp, Muscodor strobelii
  misc_feature: SGI EST ID NO. CUFF.19278.0
  misc_feature: Variant of the nucleotide sequence at SEQ ID NO 7758
ggaacagacccctggcttaggtaccttgtatttcagaaccctgaaactccagcgcagaacctcgacgatgacaaacccattcaacgacaacgacttcgttttcacatcacccatggcctaacaccaccctccaaacatggccttccttgtaggctcctcctcaccaggcttccaacgcttcgccgtgcccttcgcgagcctcctaatcggaaccctaggctacggctcacaatacctcttcgcgacctcccccgatctcgaacccggtcccctaacacgcaagcaaacatggacattcaacatcctactggcctgtctctggtggacatactaccgcgcctgcaccgtcgacccaggccgctacacattcccctcgaaatcccacgccatcaaatcaaaatcaagatctaagcccaaaccagacgagacagcagacggaccatgttgctactcctcctcctccgaaccttcatccgacgaggagacacgccataaatcaaaatccaaaacaaaagcaggcactgcaagcaatacattaccaccccgtagaagacgctggtgcaaaaaaatgcgcctccccaaaaccaccgcgagcgcaccactgcaaaacgtgcggacgctgcatcccaaaaatggaccaccactgtccatggaccgggaactgcgtatcactccaaaccttcccgcatttcctgcgtttcataatatacaccaacatatccctctgggtcttactctcctacctctttacccgagcttcccatctctggtcttcgcggcacctaccagcctacctcggaccttccctcttcgagttgatagctctcacggggttgagtttagtgggggcaattgtcgctttggcgatgtttatactgttggtaacgacggtgaaaggctgggcgctgaacactactttgatagaaagttgggagattgaacgacatgagtctgttcttgagagaggaggtgaggaatggtgggctgcgggtgaagggggggaggaaagtaggaatcttgttgagcctgttgagtttccgttcgatatcgggatttactccaatctttctgcggctatggggacgggaaacccgttgttgtggttctttcctttttatcctcatccgagggtcgccaaaccgaaacttagtggagacgagttggtgaataagttagagagtggtggtaggggactgggtaccggatggagttatgaagagaatgggatgaatgatagggagggcttgtggccaccgattgatccggagaaagtgaggaataaacgcctttggaggcgaaggcggagggaagaggaggagtttaggatgagggagccagtattgccggatatggatttgagccctgaacaggagaaagaggcgttcagaaggagacaagagcaagacctacagcggtggaggggcagagaggggatcatggatgagcttgaggagacagacccttatgcagcagatgggaggtatggtggtcacgacgatttggacagagcgagaccagcgcagaggattgtggttgatgagggcaggtccggctgggtcaacggcgatggtgagcatttaggggattatggcgttgatgaagatgccgagtttgacgatgacgggtttgtgtttgaggatgggaacaaggacgatgatgaggatgtgccgcttgcacagcttataagaagaaggaaagggcatgccaaggatagtgaggatacgtagagatgggcatgggtatgatgctatgagatatgaatggaaggcatggagccgtgtataaaaaccatatggacatttacggaatacataggacgtttcgttgtgtacatagatgattagattgagtataaactatagatccagcatggttttgcctcgtaacatcgtggaaccgcaacatgtcaatgtcggtatttgtgaatgtcaggaacgccaccaccaaacggctgccggaatcgatcatgttgcacgtattctgtaaccacgcctactcccggccgtggcctgtatgacggtgaaaggattgccacgcactccaacacggatatgtggccgaatggatgccgtagattcacgaagtggccc

SEQ ID NO: 7761 - DNA, 804 bp, Muscodor strobelii
  misc_feature: SGI cDNA ID NO. 562358
  misc_feature: Encodes the peptide sequence at SEQ ID NO 7762
atggccttccttgtaggctcctcctcaccaggcttccaacgcttcgccgtgcccttcgcgagcctcctaatcggaaccctaggctacggctcacaatacctcttcgcgacctcccccgatctcgaacccggtcccctaacacgcaagcaaacatggacattcaacatcctactggcctgtctctggtggacatactaccgcgcctgcaccgtcgacccaggccgctacacattcccctcgaaatcccacgccatcaaatcaaaatcaagatctaagcccaaaccagacgagacagcagacggaccatgttgctactcctcctcctccgaaccttcatccgacgaggagacacgccataaatcaaaatccaaaacaaaagcaggcactgcaagcaatacattaccaccccgtagaagacgctggtgcaaaaaaatgcgcctccccaaaaccaccgcgagcgcaccactgcaaaacgtgcggacgctgcatcccaaaaatggaccaccactgtccatggaccgggaactgcgtatcactccaaaccttcccgcatttcctgcgtttcataatatacaccaacatatccctctgggtcttactctcctacctctttacccgagcttcccatctctggtcttcgcggcacctaccagcctacctcggaccttccctcttcgagttgatagctctcacggggttgagtttagtgggggcaattgtcgctttggcgatgtttatactgttggtaacgacggtgaaaggctgggcgctgaacactactttgatagaaagttgggagattga

SEQ ID NO: 7762 - protein, 267 aa, Muscodor strobelii
  misc_feature: SGI Peptide ID NO. 562358
  misc_feature (7)..(165): NCBI GI: 261358631 Blast Desc: palmitoyltransferase PFA4 [Verticillium albo-atrum VaMs.102]
  misc_feature (4)..(103): NCBI GI: 171695030 Blast Desc: protein product [Podospora anserina] gi|170947757|emb|CAP59920.1| protein product [Podospora anserina]
  misc_feature (5)..(82): NCBI GI: 85111266 Blast Desc: NCU02118 [Neurospora crassa OR74A] gi|74628986|sp|Q7SCY6.1|PFA4_NEUCR RecName: Full=Palmitoyltransferase PFA4; AltName: Full=Protein fatty 4
  misc_feature (15)..(75): NCBI GI: 212538867 Blast Desc: palmitoyltransferase with autoacylation activity Pfa4, [Penicillium marneffei ATCC 18224] gi|210069331|gb|EEA23422.1| palmitoyltransferase with autoacylation activity Pfa4, marneffei
  misc_feature (1)..(211): NCBI GI: 39974213 Blast Desc: MGG_00747 [Magnaporthe grisea 70-15] gi|145018320|gb|EDK02599.1| MGG_00747 [Magnaporthe grisea 70-15]
  misc_feature (7)..(95): NCBI GI: 46109058 Blast Desc: FG01411.1 [Gibberella zeae PH-1] gi|82593021|sp|Q4IMZ7.1|PFA4_GIBZE RecName: Full=Palmitoyltransferase PFA4; AltName: Full=Protein fatty 4
  misc_feature (14)..(75): NCBI GI: 239611067 Blast Desc: palmitoyltransferase pfa4 [Ajellomyces dermatitidis ER-3]
  misc_feature (14)..(75): NCBI GI: 261205956 Blast Desc: palmitoyltransferase pfa4 [Ajellomyces dermatitidis SLH14081] gi|239592774|gb|EEQ75355.1| palmitoyltransferase pfa4 [Ajellomyces dermatitidis SLH14081]
  misc_feature (7)..(95): NCBI GI: 256730629 Blast Desc: NECHADRAFT_30448 [Nectria haematococca mpVI 77-13-4]
  misc_feature (8)..(75): NCBI GI: 238482995 Blast Desc: zinc finger protein DHHC domain containing protein, [Aspergillus flavus NRRL3357] gi|220700786|gb|EED57124.1| zinc finger protein DHHC domain containing protein, [Aspergillus
MAFLVGSSSPGFQRFAVPFASLLIGTLGYGSQYLFATSPDLEPGPLTRKQTWTFNILLACLWWTYYRACTVDPGRYTFPSKSHAIKSKSRSKPKPDETADGPCCYSSSSEPSSDEETRHKSKSKTKAGTASNTLPPRRRRWCKKMRLPKTTASAPLQNVRTLHPKNGPPLSMDRELRITPNLPAFPAFHNIHQHIPLGLTLLPLYPSFPSLVFAAPTSLPRTFPLRVDSSHGVEFSGGNCRFGDVYTVGNDGERLGAEHYFDRKLGD

SEQ ID NO: 7763 - DNA, 2090 bp, Muscodor strobelii; identical to SEQ ID NO: 7760
  misc_feature: SGI EST ID NO. CUFF.19278.0
  misc_feature: Variant of the nucleotide sequence at SEQ ID NO 7761

SEQ ID NO: 7764 - DNA, 915 bp, Muscodor strobelii
  misc_feature: SGI cDNA ID NO. 562359
  misc_feature: Encodes the peptide sequence at SEQ ID NO 7765
atgccgaaatacgaaaccgtctccttccgcaccctcgacggcctaaccctccgtggccatctctacgcagcttcacaacgcggtccgggaataattctcctccctgggttcagcttcgtaaaagagatcatgctgccaaaagtctgtgaatacttccagcgctcaggcataacagcgctatcctacgacccgcgctctataggagaaagcgacggaacaccacatcgggacatagaccccgcgaagcacatagcggatctacacgatgctttgacattcttgcaaaagcattccctcgtcaaccctgatgaaatcgcgtattggggtttctcattcaacggcgtcgtggcgttgaatgctgcggcgctggataagagggcgaaatgcgttattgccgtgacgcctctcactgatctttcgtatcctgaggatggactacgagagatgctaagagaagcgatgagggatcgagagaatcaattagatgggtgcgcaccggcctatgtccccgtgctgcagagcgatggaaattgtccgtttggatggggcaagggaacgaatatgaatgagtattacgtggcagagaaatcagcgaaggcgtttccgagttataagaatgagatgagtgtccagactcattaccgaatatcgacttggagaccgtatgacttgatgccattggtggctccgacgcctattatgatgattacgccgcagttggatagaatgagcttaccggagaagcaaaagaagttgttcgatgagtttaaggggccgaaagagcatcattgggtgccggataagggtcatatggatgttttgacgggaaaggggtttgagggaatcatggatatgcaattgaggtttctaaggaagcatattgggctatgggatggtgggaatcctcacttatga

SEQ ID NO: 7765 - protein, 304 aa, Muscodor strobelii
  misc_feature: SGI Peptide ID NO. 562359
  misc_feature (5)..(294): NCBI GI: 70983277 Blast Desc: DltD N-terminal domain protein [Aspergillus fumigatus Af293] gi|66844791|gb|EAL85128.1| DltD N-terminal domain protein [Aspergillus fumigatus Af293] gi|159124052|gb|EDP49171.1| DltD
  misc_feature (5)..(294): NCBI GI: 119483532 Blast Desc: NFIA_093920 [Neosartorya fischeri NRRL 181] gi|119409825|gb|EAW19772.1| conserved [Neosartorya fischeri NRRL 181]
  misc_feature (45)..(291): NCBI GI: 67541839 Blast Desc: AN7083.2 [Aspergillus nidulans FGSC A4] gi|40742022|gb|EAA61212.1| AN7083.2 [Aspergillus nidulans FGSC A4] gi|259483597|tpe|CBF79117.1| TPA: DltD N-terminal domain FGSC
  misc_feature (6)..(296): NCBI GI: 116194936 Blast Desc: CHGG_04066 [Chaetomium globosum CBS 148.51] gi|88179979|gb|EAQ87447.1| CHGG_04066 [Chaetomium globosum CBS 148.51]
  misc_feature (1)..(276): NCBI GI: 115396516 Blast Desc: [Aspergillus terreus NIH2624] gi|114193466|gb|EAU35166.1| [Aspergillus terreus NIH2624]
  misc_feature (1)..(292): NCBI GI: 119497555 Blast Desc: NFIA_023500 [Neosartorya fischeri NRRL 181] gi|119413698|gb|EAW23639.1| conserved [Neosartorya fischeri NRRL 181]
  misc_feature (4)..(290): NCBI GI: 67526307 Blast Desc: AN3611.2 [Aspergillus nidulans FGSC A4] gi|40740629|gb|EAA59819.1| AN3611.2 [Aspergillus nidulans FGSC A4] gi|259481862|tpe|CBF75779.1| TPA: conserved [Aspergillus FGSC
  misc_feature (3)..(292): NCBI GI: 169625383 Blast Desc: SNOG_15964 [Phaeosphaeria nodorum SN15] gi|160705643|gb|EAT76543.2| SNOG_15964 [Phaeosphaeria nodorum SN15]
  misc_feature (5)..(295): NCBI GI: 284167096 Blast Desc: Htur_3841 [Haloterrigena turkmenica DSM 5511] gi|284016751|gb|ADB62701.1| conserved [Haloterrigena turkmenica DSM 5511]
  misc_feature (36)..(291): NCBI GI: 154315479 Blast Desc: BC1G_04312 [Botryotinia fuckeliana B05.10] gi|150847252|gb|EDN22445.1| BC1G_04312 [Botryotinia fuckeliana B05.10]
MPKYETVSFRTLDGLTLRGHLYAASQRGPGIILLPGFSFVKEIMLPKVCEYFQRSGITALSYDPRSIGESDGTPHRDIDPAKHIADLHDALTFLQKHSLVNPDEIAYWGFSFNGVVALNAAALDKRAKCVIAVTPLTDLSYPEDGLREMLREAMRDRENQLDGCAPAYVPVLQSDGNCPFGWGKGTNMNEYYVAEKSAKAFPSYKNEMSVQTHYRISTWRPYDLMPLVAPTPIMMITPQLDRMSLPEKQKKLFDEFKGPKEHHWVPDKGHMDVLTGKGFEGIMDMQLRFLRKHIGLWDGGNPHL

SEQ ID NO: 7766 - DNA, 1351 bp, Muscodor strobelii
  misc_feature: SGI EST ID NO. CUFF.19282.0
  misc_feature: Variant of the nucleotide sequence at SEQ ID NO 7764
ctttcctttctcacttcaaaatacccaaatagtggcaccttcaaattccgcgcttatgctttaaacagcatgagctatgcgccgtattcagtgtttgttgctggcgtcagttcatgcaggtgggaattcagcccaagcagctaatcccaattagtgtctgatccacgacgccgcatttcacatcgacgatagaaatacgcatatagtcttgcaacaatctcacccaaaatgcaacgtcttgcttttagctaagtcccaatctccaaatctgtacatcatttcgaaaatgccgaaatacgaaaccgtctccttccgcaccctcgacggcctaaccctccgtggccatctctacgcagcttcacaacgcggtccgggaataattctcctccctggggtaagcatgctcaccatcacctctttttcagcttcgtaaaagagatcatgctgccaaaagtctgtgaatacttccagcgctcaggcataacagcgctatcctacgacccgcgctctataggagaaagcgacggaacaccacatcgggacatagaccccgcgaagcacatagcggatctacacgatgctttgacattcttgcaaaagcattccctcgtcaaccctgatgaaatcgcgtattggggtttctcattcaacggcgtcgtggcgttgaatgctgcggcgctggataagagggcgaaatgcgttattgccgtgacgcctctcactgatctttcgtatcctgaggatggactacgagagatgctaagagaagcgatgagggatcgagagaatcaattagatgggtgcgcaccggcctatgtccccgtgctgcagagcgatggaaattgtccgtttggatggggcaagggaacgaatatgaatgagtattacgtggcagagaaatcagcgaaggcgtttccgagttataagaatgagatgagtgtccagactcattaccgaatatcgacttggagaccgtatgacttgatgccattggtggctccgacgcctattatgatgattacgccgcagttggatagaatgagcttaccggagaagcaaaagaagttgttcgatgagtttaaggggccgaaagagcatcattgggtgccggataagggtcatatggatgttttgacgggaaaggggtttgagggaatcatggatatgcaattgaggtttctaaggaagcatattgggctatgggatggtgggaatcctcacttatgaagaagtagagctttcaagagtgatctattgttgcagagctatctatgccttgtttgtacctactcatatatttgagttgaccaatcggactggcatctaaccaaacacaaagagtatcatgact

SEQ ID NO: 7767 - DNA, 1542 bp, Muscodor strobelii
  misc_feature: SGI cDNA ID NO. 562360
  misc_feature: Elevated expression when VOC is produced
  misc_feature: Encodes the peptide sequence at SEQ ID NO 7768
atgtctcttcagcgacgaacgatcgcaaccattggcgtgctgtttattgccatactttccttgaagtcggatttgctaccaaaaaaactagtcgagatcccacccgtcattggtaagaacaacaccgctctctttcttaccacgagcgactatgggttatccaatgtccatgtggccaccgcacaagggcttctagagcgacacccccatgttcgattgcatttcgggtcgttcaagccaatgctacctagagtagatcgcctctcttcacgcatgaagattccacgcgagcgagaagttgtttttcatcctatcgacggcttatctgtcatcgatacttgcaaggcatttggtaagaccacatcgaatattatccactccccgggatgggccggcatcgggcatatttgcaaagacatgcaactcttcatttccccatggacgggcgaagagcatttggcaatctacgagcaagtcagtcgaataatcgatgaagtcgaccccgcagtcatcgtactagacacgctcttccgtcccgccatcgatgcaacaagggataagaatcgcttgcacgctattattagcccgaatacgctaatagagaacttccctgccgaacagccatggggcaagatgttgtggaaatatcctgccatgggctctgggctcccctatccagtgccctggagcaagatccccgagaatatcttattgaatttgaggtttatatcgacaatgctatggctgccagatattaaagacaaaaaggcatatctcaaatcaaaaggtttaaaagatccaattaacttctttgcactgtatcgaccagatgtgccgtggatctcacaaacaatgcctgaagcatccatcccggtcgatgtcatcccccagaatgtcacatgcacgggtcccattatactctcgctaggaacagttgccgaacaagacgaagaacttgctgcttggctaacgggtgcgccaactgttctgattaacctgggatctggcttcgaattctccgagcgcagtgcgagtactatggcacaagctatcgctatagtcctccagacaagcgaggttcaagtcttgtggaaaataagaaaggaggatacatttggtgacgaatacatgagccctgttcttcattatatcgagacaggtagagtgaagattgagcaatggctcgcggctgacccttccacaatattagaatctggccacgtagtagcatctgtccaccatggagggtctggctgttatcatgagggtatcagtgcaggcatccctcaggtgattctgccacagtggcatgatctatacgggtttgcgcagttggttgaacagatcggtgttggtgtgtggggatgtcgagagaccagtccattttggaacgccgattgtctatccgatgctatattaaaggtggttcaggagagcaagcacaaggacaaagcgcgagagctccagaggcttgcgcaagccaagcctggtcgttatgttgctgcaatgcagattgctaaacttgcaggctcaggcacttaa

SEQ ID NO: 7768 - protein, 513 aa, Muscodor strobelii
  misc_feature: SGI Peptide ID NO. 562360
  misc_feature (11)..(512): NCBI GI: 46133785 Blast Desc: FG09032.1 [Gibberella zeae PH-1]
  misc_feature (11)..(509): NCBI GI: 256728005 Blast Desc: NECHADRAFT_95258 [Nectria haematococca mpVI 77-13-4]
  misc_feature (12)..(512): NCBI GI: 256722508 Blast Desc: NECHADRAFT_35090 [Nectria haematococca mpVI 77-13-4]
  misc_feature (8)..(509): NCBI GI: 154304172 Blast Desc: BC1G_08356 [Botryotinia fuckeliana B05.10] gi|150854158|gb|EDN29350.1| BC1G_08356 [Botryotinia fuckeliana B05.10]
  misc_feature (40)..(507): NCBI GI: 226277750 Blast Desc: UDP-glucoronosyl and UDP-glucosyl transferase family protein [Paracoccidioides brasiliensis Pb01]
  misc_feature (39)..(507): NCBI GI: 226293037 Blast Desc: UDP-glucoronosyl and UDP-glucosyl transferase family protein [Paracoccidioides brasiliensis Pb18]
  misc_feature (39)..(507): NCBI GI: 225683676 Blast Desc: UDP-glucoronosyl and UDP-glucosyl transferase family protein [Paracoccidioides brasiliensis Pb03]
  misc_feature (8)..(509): NCBI GI: 156059010 Blast Desc: SS1G_03517 [Sclerotinia sclerotiorum 1980] gi|154701304|gb|EDO01043.1| SS1G_03517 [Sclerotinia sclerotiorum 1980]
  misc_feature (39)..(512): NCBI GI: 121715678 Blast Desc: UDP-glucoronosyl and UDP-glucosyl transferase, [Aspergillus clavatus NRRL 1] gi|119403605|gb|EAW14022.1| UDP-glucoronosyl and UDP-glucosyl transferase, [Aspergillus NRRL
  misc_feature (44)..(505): NCBI GI: 46139653 Blast Desc: FG11341.1 [Gibberella zeae PH-1]
  misc_feature: Useful for introducing or modulating the production of volatile compounds
MSLQRRTIATIGVLFIAILSLKSDLLPKKLVEIPPVIGKNNTALFLTTSDYGLSNVHVATAQGLLERHPHVRLHFGSFKPMLPRVDRLSSRMKIPREREVVFHPIDGLSVIDTCKAFGKTTSNIIHSPGWAGIGHICKDMQLFISPWTGEEHLAIYEQVSRIIDEVDPAVIVLDTLFRPAIDATRDKNRLHAIISPNTLIENFPAEQPWGKMLWKYPAMGSGLPYPVPWSKIPENILLNLRFISTMLWLPDIKDKKAYLKSKGLKDPINFFALYRPDVPWISQTMPEASIPVDVIPQNVTCTGPIILSLGTVAEQDEELAAWLTGAPTVLINLGSGFEFSERSASTMAQAIAIVLQTSEVQVLWKIRKEDTFGDEYMSPVLHYIETGRVKIEQWLAADPSTILESGHVVASVHHGGSGCYHEGISAGIPQVILPQWHDLYGFAQLVEQIGVGVWGCRETSPFWNADCLSDAILKVVQESKHKDKARELQRLAQAKPGRYVAAMQIAKLAGSGT

SEQ ID NO: 7769 - DNA, 1737 bp, Muscodor strobelii
  misc_feature: SGI EST ID NO. CUFF.19284.0
  misc_feature: Variant of the nucleotide sequence at SEQ ID NO 7767
acgcgacgaagatccggtagctggcaccaacgcggcatttagctacaactttctcagtgttaacggctggtgctcattcatggccatacttgttttcacactctaactatcgcgatgtctcttcagcgacgaacgatcgcaaccattggcgtgctgtttattgccatactttccttgaagtcggatttgctaccaaaaaaactagtcgagatcccacccgtcattggtaagaacaacaccgctctctttcttaccacgagcgactatgggttatccaatgtccatgtggccaccgcacaagggcttctagagcgacacccccatgttcgattgcatttcgggtcgttcaagccaatgctacctagagtagatcgcctctcttcacgcatgaagattccacgcgagcgagaagttgtttttcatcctatcgacggcttatctgtcatcgatacttgcaaggcatttggtaagaccacatcgaatattatccactccccgggatgggccggcatcgggcatatttgcaaagacatgcaactcttcatttccccatggacgggcgaagagcatttggcaatctacgagcaagtcagtcgaataatcgatgaagtcgaccccgcagtcatcgtactagacacgctcttccgtcccgccatcgatgcaacaagggataagaatcgcttgcacgctattattagcccgaatacgctaatagagaacttccctgccgaacagccatggggcaagatgttgtggaaatatcctgccatgggctctgggctcccctatccagtgccctggagcaagatccccgagaatatcttattgaatttgaggtttatatcgacaatgctatggctgccagatattaaagacaaaaaggcatatctcaaatcaaaaggtttaaaagatccaattaacttctttgcactgtatcgaccagatgtgccgtggatctcacaaacaatgcctgaagcatccatcccggtcgatgtcatcccccagaatgtcacatgcacgggtcccattatactctcgctaggaacagttgccgaacaagacgaagaacttgctgcttggctaacgggtgcgccaactgttctgattaacctgggatctggcttcgaattctccgagcgcagtgcgagtactatggcacaagctatcgctatagtcctccagacaagcgaggttcaagtcttgtggaaaataagaaaggaggatacatttggtgacgaatacatgagccctgttcttcattatatcgagacaggtagagtgaagattgagcaatggctcgcggctgacccttccacaatattagaatctggccacgtagtagcatctgtccaccatggagggtctggctgttatcatgagggtatcagtgcaggcatccctcaggtgattctgccacagtggcatgatctatacgggtttgcgcagttggttgaacagatcggtgttggtgtgtggggatgtcgagagaccagtccattttggaacgccgattgtctatccgatgctatattaaaggtggttcaggagagcaagcacaaggacaaagcgcgagagctccagaggcttgcgcaagccaagcctggtcgttatgttgctgcaatgcagattgctaaacttgcaggctcaggcacttaaagctgatgattagctggatgactgaaatgatgctcgtaagctagatctgacgatgcaataacggagcagtgtgaatgatcg

SEQ ID NO: 7770 - DNA, 1347 bp, Muscodor strobelii
  misc_feature: SGI cDNA ID NO. 562361
  misc_feature: Encodes the peptide sequence at SEQ ID NO 7771
atggccacgccgcctgcagtaacaacagccgtgaaagaagttcaagattacttcactggcaacaatcgcttcgtcttcgagtgcattatcgcgtacggtgcgcaaggtgtaacgctcaaaatacaagagcgagggataccaccccctgtcgggggattagaagaccctcggggcaaaaaaagagtgagatctttttcaccaaaggaggcaatagacagccttggcaggaactacaagaaagttaaggcgtcaggtgctaaaataattcgcaaaatcacccccaaggggctcgaaggcctcttccatgcgacaccgtcggctaaagggtctagtgccgaggcgctgatccaacccattcaggatcttgctatcgatgcatctacacagactaatgatcctaacgacccggaagagtttcgagagagccctagcatagacttgcctattctgcggagaatctgcgtaaaaagggcactaaatcagtttggagaacgggacctacgccaggaggtcaaaatactcaagacgttgaatgggagcgcgcatatcgctaagcttattgctttcaaagaaaaggacagaacctctaaagctaggggcactaacttcctgggcggattgcatggacctgccctggcgttagaattcatggaaaatggtactttagagcaactcgttcagagactgggaaaacgtggagacggctatcagactcctgaccgagttatatgggctgtctatttgtgtgtcgtccgggcatgcatcgcaatgaagtatccgacgagagcacctccggacgcagacacgattctggaatcgctcgaacaaccaaatcgcaggtcgtcgaggattattcacggtgatctccattggaagaatgtggtatttggtgacatagacgaatcgaccaatgagcatagcctcgtaccgataatgaaattgatcgactttggactcgcacgtgacgccgacagcgtgaaagatgcagaggagaggaacctaaatgatgtctccaagcttatatacagtctcattacacgcaagatcgccggcggtggtgtaccagtagtttatgggagcgagatacagaccacggcggttgacctcggggacggttccgaattcttagaaagagtgcatgtcaacgaagatcttcggaggctcgtatgcacctcaatgtccaccagagatgacgagcaaccagttattgctcacatgttagcaaccacgatgaatgcagtcgaggaaggagccatcaacggagaggacgatgagactatcgagcagtttattagagagatactattcgagccagatccacctgaaaatgagagcgaagatagctag

SEQ ID NO: 7771 - protein, 448 aa, Muscodor strobelii
  misc_feature: SGI Peptide ID NO. 562361
  misc_feature (211)..(337): NCBI GI: 85081014 Blast Desc: NCU05146 [Neurospora crassa OR74A] gi|28881434|emb|CAD70551.1| [Neurospora crassa] gi|28917716|gb|EAA27408.1| [Neurospora crassa OR74A]
  misc_feature (151)..(440): NCBI GI: 145601223 Blast Desc: [Magnaporthe grisea 70-15] gi|145009254|gb|EDJ93965.1| [Magnaporthe grisea 70-15]
  misc_feature (211)..(341): NCBI GI: 116201421 Blast Desc: [Chaetomium globosum CBS 148.51] gi|88177113|gb|EAQ84581.1| [Chaetomium globosum CBS 148.51]
  misc_feature (207)..(320): NCBI GI: 85109420 Blast Desc: NCU05722 [Neurospora crassa OR74A] gi|28924551|gb|EAA33672.1| [Neurospora crassa OR74A]
  misc_feature (208)..(320): NCBI GI: 171695774 Blast Desc: protein product [Podospora anserina] gi|170948129|emb|CAP60293.1| protein product [Podospora anserina]
  misc_feature (165)..(324): NCBI GI: 116201425 Blast Desc: [Chaetomium globosum CBS 148.51] gi|88177115|gb|EAQ84583.1| [Chaetomium globosum CBS 148.51]
  misc_feature (208)..(352): NCBI GI: 85111903 Blast Desc: NCU00763 [Neurospora crassa OR74A] gi|28925929|gb|EAA34924.1| [Neurospora crassa OR74A] gi|38636417|emb|CAE81954.1| [Neurospora crassa]
  misc_feature (151)..(318): NCBI GI: 256730581 Blast Desc: NECHADRAFT_74247 [Nectria haematococca mpVI 77-13-4]
MATPPAVTTAVKEVQDYFTGNNRFVFECIIAYGAQGVTLKIQERGIPPPVGGLEDPRGKKRVRSFSPKEAIDSLGRNYKKVKASGAKIIRKITPKGLEGLFHATPSAKGSSAEALIQPIQDLAIDASTQTNDPNDPEEFRESPSIDLPILRRICVKRALNQFGERDLRQEVKILKTLNGSAHIAKLIAFKEKDRTSKARGTNFLGGLHGPALALEFMENGTLEQLVQRLGKRGDGYQTPDRVIWAVYLCVVRACIAMKYPTRAPPDADTILESLEQPNRRSSRIIHGDLHWKNVVFGDIDESTNEHSLVPIMKLIDFGLARDADSVKDAEERNLNDVSKLIYSLITRKIAGGGVPVVYGSEIQTTAVDLGDGSEFLERVHVNEDLRRLVCTSMSTRDDEQPVIAHMLATTMNAVEEGAINGEDDETIEQFIREILFEPDPPENESEDS

SEQ ID NO: 7772 - DNA, 1626 bp, Muscodor strobelii
  misc_feature: SGI cDNA ID NO. 562362
  misc_feature: Encodes the peptide sequence at SEQ ID NO 7773
atgcctgcaatcgatggtcaagacaaagatatcacaacaaattctatcaattcctcgcgcataacaacaagcgctgcaacggaggtggccgcctttgcacgccaattgcaccttctctgtaaagaaagcaccgcgctttgtgatgcactccaaagattcagcaaactcgaaatggccgaagagctgaagaagcctgtgcaagatgagacagattatgttactagcacttcaactggccctattttcaacgaatatgacgacgcggcaaagtctgaatatgccgaaaagctattcaaagacgaaaacccactactggatgatccctttgattttcccgagagtatcagcgagttcacagatagctcggggaggatcctcaccttcataggtctccgcatcgtcaggacatctccccgccagttctcgatcaaaactgaggcaatggactcaaaatttgagacaagaacacttgtgcttccgtggacagcatcggctgacagcatggctgacgggtggtatgtaacagaacaactccgtccgacccagttcaacaaccgatcacacaaggacgtcccgccaattggcatcgtacatcaaatcctctatccctattctgaaaagcttatccccttctcctacgttgtacttcttgccggacatctgccaagacatccagattttagtttcttaggcatctggaagccaatgaagccgcggtacgaggccgcgcggccggatcgactcgcaatgaatattaggcttttcacctatacgcgttcttattatatcgggcgtaccgtgaatggtggtggcgtcatccctacacgtgataaaacaaaaattttggactttcgtggtcagcatgcactcaatctctacgaaaaacgcatttctttgtctttgtggttaccgtaccaatctccaatgccaaccgcattctcggaatacgtgcttgtctatgcagccgattcatttaacaatccagaagagccattgagactttctctgcgacagtctaaacatggtgtacggcattgctcgtcgcaagcaggtatcgcaatgttccagctcgctctcagtgaaatctacgatcaatggttacaggtgtggaggtcgctgctagacaagatagacgggagccttgaagtcacagagcatgatattttcgatcaggataagttggaagatctaatgtttgatgactatcaactctcgagatccaaatcctacttcaccgctcttcaacatctgcgcatcttccaaagtcggataaacgagagtgtggaagatctgcagtcactagtggaccgatgtgatgactgggaatctaatgccaaaggtgactcagacatcgtaaaagcgaattgggtcgccttgttatctttccagaaagacggagccaatcaacttcgagagagaattaaacgcaagtcagaggaaatcaagagtattagagacggcctttacagtgcccaagctattttcgaggccaagaagagcgcactaatgaatcaatatcttttggttttcaccgtggtaacaattctttacctcccaccctcatttgtagcggggatgcaagacaagggaaaaggcaaagcacgagctgttcagccaattgaatga

SEQ ID NO: 7773 - protein, 541 aa, Muscodor strobelii
  misc_feature: SGI Peptide ID NO. 562362
  misc_feature (362)..(524): NCBI GI: 119501615 Blast Desc: NFIA_044860 [Neosartorya fischeri NRRL 181] gi|119415730|gb|EAW25667.1| NFIA_044860 [Neosartorya fischeri NRRL 181]
  misc_feature (339)..(523): NCBI GI: 46134027 Blast Desc: FG09153.1 [Gibberella zeae PH-1]
  misc_feature (342)..(524): NCBI GI: 171676599 Blast Desc: protein product [Podospora anserina] gi|170936366|emb|CAP61024.1| protein product [Podospora anserina]
  misc_feature (289)..(529): NCBI GI: 116194133 Blast Desc: [Chaetomium globosum CBS 148.51] gi|88182697|gb|EAQ90165.1| [Chaetomium globosum CBS 148.51]
  misc_feature (349)..(535): NCBI GI: 116197541 Blast Desc: [Chaetomium globosum CBS 148.51] gi|88178205|gb|EAQ85673.1| [Chaetomium globosum CBS 148.51]
  misc_feature (370)..(526): NCBI GI: 225684196 Blast Desc: [Paracoccidioides brasiliensis Pb03]
  misc_feature (370)..(526): NCBI GI: 226285007 Blast Desc: conserved [Paracoccidioides brasiliensis Pb01]
  misc_feature (370)..(526): NCBI GI: 239606331 Blast Desc: conserved [Ajellomyces dermatitidis ER-3]
  misc_feature (404)..(526): NCBI GI: 116198769 Blast Desc: [Chaetomium globosum CBS 148.51] gi|88178819|gb|EAQ86287.1| [Chaetomium globosum CBS 148.51]
  misc_feature (349)..(526): NCBI GI: 154291860 Blast Desc: BC1G_14946 [Botryotinia fuckeliana B05.10] gi|150846554|gb|EDN21747.1| BC1G_14946 [Botryotinia fuckeliana B05.10]
MPAIDGQDKDITTNSINSSRITTSAATEVAAFARQLHLLCKESTALCDALQRFSKLEMAEELKKPVQDETDYVTSTSTGPIFNEYDDAAKSEYAEKLFKDENPLLDDPFDFPESISEFTDSSGRILTFIGLRIVRTSPRQFSIKTEAMDSKFETRTLVLPWTASADSMADGWYVTEQLRPTQFNNRSHKDVPPIGIVHQILYPYSEKLIPFSYVVLLAGHLPRHPDFSFLGIWKPMKPRYEAARPDRLAMNIRLFTYTRSYYIGRTVNGGGVIPTRDKTKILDFRGQHALNLYEKRISLSLWLPYQSPMPTAFSEYVLVYAADSFNNPEEPLRLSLRQSKHGVRHCSSQAGIAMFQLALSEIYDQWLQVWRSLLDKIDGSLEVTEHDIFDQDKLEDLMFDDYQLSRSKSYFTALQHLRIFQSRINESVEDLQSLVDRCDDWESNAKGDSDIVKANWVALLSFQKDGANQLRERIKRKSEEIKSIRDGLYSAQAIFEAKKSALMNQYLLVFTVVTILYLPPSFVAGMQDKGKGKARAVQPIE

SEQ ID NO: 7774 - DNA, 2178 bp, Muscodor strobelii
  misc_feature: SGI EST ID NO. CUFF.19346.1
  misc_feature: Variant of the nucleotide sequence at SEQ ID NO 7772
ctctgcccaccccaagcgctatctaccccgcgcagctacattataaaactttatagaaccaagttctaggcctttcgtcaccgtcttgaatctccgtttcataggatgggcctcaaggccatgcaaatcagatccttgctgcagtatattgtaactcaacccctctcacgatattcagccaccttccagttcgccccctccgtgcatgtcccaatcaatttttacactataactctgtcaagtaacttactcctcttcagtacactaacgctattttccctgtaaacttgaccgagctttggaaactacatgacgcatccaagtctgagataagtctacactcctcaatttcaaaatgcctgcaatcgatggtcaagacaaagatatcacaacaaattctatcaattcctcgcgcataacaacaagcgctgcaacggaggtggccgcctttgcacgccaattgcaccttctctgtaaagaaagcaccgcgctttgtgatgcactccaaagattcagcaaactcgaaatggccgaagagctgaagaagcctgtgcaagatgagacagattatgttactagcacttcaactggccctattttcaacgaatatgacgacgcggcaaagtctgaatatgccgaaaagctattcaaagacgaaaacccactactggatgatccctttgattttcccgagagtatcagcgagttcacagatagctcggggaggatcctcaccttcataggtctccgcatcgtcaggacatctccccgccagttctcgatcaaaactgaggcaatggactcaaaatttgagacaagaacacttgtgcttccgtggacagcatcggctgacagcatggctgacgggtggtatgtaacagaacaactccgtccgacccagttcaacaaccgatcacacaaggacgtcccgccaattggcatcgtacatcaaatcctctatccctattctgaaaagcttatccccttctcctacgttgtacttcttgccggacatctgccaagacatccagattttagtttcttaggcatctggaagccaatgaagccgcggtacgaggccgcgcggccggatcgactcgcaatgaatattaggcttttcacctatacgcgttcttattatatcgggcgtaccgtgaatggtggtggcgtcatccctacacgtgataaaacaaaaattttggactttcgtggtcagcatgcactcaatctctacgaaaaacgcatttctttgtctttgtggttaccgtaccaatctccaatgccaaccgcattctcggaatacgtgcttgtctatgcagccgattcatttaacaatccagaagagccattgagactttctctgcgacagtctaaacatggtgtacggcattgctcgtcgcaagcaggtatcgcaatgttccagctcgctctcagtgaaatctacgatcaatggttacaggtgtggaggtcgctgctagacaagatagacgggagccttgaagtcacagagcatgatattttcgatcaggataagttggaagatctaatgtttgatgactatcaactctcgagatccaaatcctacttcaccgctcttcaacatctgcgcatcttccaaagtcggataaacgagagtgtggaagatctgcagtcactagtggaccgatgtgatgactgggaatctaatgccaaaggtgactcagacatcgtaaaagcgaattgggtcgccttgttatctttccagaaagacggagccaatcaacttcgagagagaattaaacgcaagtcagaggaaatcaagagtattagagacggcctttacagtgcccaagctattttcgaggccaagaagagcgcactaatgaatcaatatcttttggttttcaccgtggtaacaattctttacctcccaccctcatttgtagcgacgttctttggaatgcacttgtttgacggcgagaatgggcctactctatggacccagacaactttttggaaagttttggccagtgtcagcgttactacatatatattagcagcaatatttcttgtgactcttccaaacagacgtctcttggcatcctacgtaccatatattttcaatacgttcaagttccaggtacggtggtggtggggggatatagaactgcccacactgagaatgcccgcaacactggt

SEQ ID NO: 7775 - DNA, 1455 bp, Muscodor strobelii
  misc_feature: SGI cDNA ID NO. 562363
  misc_feature: Elevated expression when VOC is produced
  misc_feature: Encodes the peptide sequence at SEQ ID NO 7776
atggccgaagagctgaagaagcctgtgcaagatgagacagattatgttactagcacttcaactggccctattttcaacgaatatgacgacgcggcaaagtctgaatatgccgaaaagctattcaaagacgaaaacccactactggatgatccctttgattttcccgagagtatcagcgagttcacagatagctcggggaggatcctcaccttcataggtctccgcatcgtcaggacatctccccgccagttctcgatcaaaactgaggcaatggactcaaaatttgagacaagaacacttgtgcttccgtggacagcatcggctgacagcatggctgacgggtggtatgtaacagaacaactccgtccgacccagttcaacaaccgatcacacaaggacgtcccgccaattggcatcgtacatcaaatcctctatccctattctgaaaagcttatccccttctcctacgttgtacttcttgccggacatctgccaagacatccagattttagtttcttaggcatctggaagccaatgaagccgcggtacgaggccgcgcggccggatcgactcgcaatgaatattaggcttttcacctatacgcgttcttattatatcgggcgtaccgtgaatggtggtggcgtcatccctacacgtgataaaacaaaaattttggactttcgtggtcagcatgcactcaatctctacgaaaaacgcatttctttgtctttgtggttaccgtaccaatctccaatgccaaccgcattctcggaatacgtgcttgtctatgcagccgattcatttaacaatccagaagagccattgagactttctctgcgacagtctaaacatggtgtacggcattgctcgtcgcaagcaggtatcgcaatgttccagctcgctctcagtgaaatctacgatcaatggttacaggtgtggaggtcgctgctagacaagatagacgggagccttgaagtcacagagcatgatattttcgatcaggataagttggaagatctaatgtttgatgactatcaactctcgagatccaaatcctacttcaccgctcttcaacatctgcgcatcttccaaagtcggataaacgagagtgtggaagatctgcagtcactagtggaccgatgtgatgactgggaatctaatgccaaaggtgactcagacatcgtaaaagcgaattgggtcgccttgttatctttccagaaagacggagccaatcaacttcgagagagaattaaacgcaagtcagaggaaatcaagagtattagagacggcctttacagtgcccaagctattttcgaggccaagaagagcgcactaatgaatcaatatcttttggttttcaccgtggtaacaattctttacctcccaccctcatttgtagcggggatgcaagacaagggaaaaggcaaagcacgagctgttcagccaattgaatga

SEQ ID NO: 7776 - protein, 484 aa, Muscodor strobelii
  misc_feature: SGI Peptide ID NO. 562363
  misc_feature (305)..(467): NCBI GI: 119501615 Blast Desc: NFIA_044860 [Neosartorya fischeri NRRL 181] gi|119415730|gb|EAW25667.1| NFIA_044860 [Neosartorya fischeri NRRL 181]
  misc_feature (282)..(466): NCBI GI: 46134027 Blast Desc: FG09153.1 [Gibberella zeae PH-1]
  misc_feature (285)..(467): NCBI GI: 171676599 Blast Desc: protein product [Podospora anserina] gi|170936366|emb|CAP61024.1| protein product [Podospora anserina]
  misc_feature (232)..(472): NCBI GI: 116194133 Blast Desc: [Chaetomium globosum CBS 148.51] gi|88182697|gb|EAQ90165.1| [Chaetomium globosum CBS 148.51]
  misc_feature (292)..(478): NCBI GI: 116197541 Blast Desc: [Chaetomium globosum CBS 148.51] gi|88178205|gb|EAQ85673.1| [Chaetomium globosum CBS 148.51]
  misc_feature (313)..(469): NCBI GI: 225684196 Blast Desc: [Paracoccidioides brasiliensis Pb03]
  misc_feature (313)..(469): NCBI GI: 226285007 Blast Desc: conserved [Paracoccidioides brasiliensis Pb01]
  misc_feature (313)..(469): NCBI GI: 239606331 Blast Desc: conserved [Ajellomyces dermatitidis ER-3]
  misc_feature (347)..(469): NCBI GI: 116198769 Blast Desc: [Chaetomium globosum CBS 148.51] gi|88178819|gb|EAQ86287.1| [Chaetomium globosum CBS 148.51]
  misc_feature (292)..(469): NCBI GI: 154291860 Blast Desc: BC1G_14946 [Botryotinia fuckeliana B05.10] gi|150846554|gb|EDN21747.1| BC1G_14946 [Botryotinia fuckeliana B05.10]
  misc_feature: Useful for introducing or modulating the production of volatile compounds
MAEELKKPVQDETDYVTSTSTGPIFNEYDDAAKSEYAEKLFKDENPLLDDPFDFPESISEFTDSSGRILTFIGLRIVRTSPRQFSIKTEAMDSKFETRTLVLPWTASADSMADGWYVTEQLRPTQFNNRSHKDVPPIGIVHQILYPYSEKLIPFSYVVLLAGHLPRHPDFSFLGIWKPMKPRYEAARPDRLAMNIRLFTYTRSYYIGRTVNGGGVIPTRDKTKILDFRGQHALNLYEKRISLSLWLPYQSPMPTAFSEYVLVYAADSFNNPEEPLRLSLRQSKHGVRHCSSQAGIAMFQLALSEIYDQWLQVWRSLLDKIDGSLEVTEHDIFDQDKLEDLMFDDYQLSRSKSYFTALQHLRIFQSRINESVEDLQSLVDRCDDWESNAKGDSDIVKANWVALLSFQKDGANQLRERIKRKSEEIKSIRDGLYSAQAIFEAKKSALMNQYLLVFTVVTILYLPPSFVAGMQDKGKGKARAVQPIE

SEQ ID NO: 7777 - DNA, 2178 bp, Muscodor strobelii; identical to SEQ ID NO: 7774
  misc_feature: SGI EST ID NO. CUFF.19346.1
  misc_feature: Variant of the nucleotide sequence at SEQ ID NO 7775

SEQ ID NO: 7778 - DNA, 870 bp, Muscodor strobelii
  misc_feature: SGI cDNA ID NO. 562364
  misc_feature: Encodes the peptide sequence at SEQ ID NO 7779
atggaggagtcaaagggttcggttgaatctgcggcttacaacgagagcagtcaaacagccaaggaaccggaagatcaagcgcttcgaaacgttcgaattatatacgaaaagcatatgagactaaaactgatcctagaccaagcgaagcccgggaaggcacacctcccgggaagattttggaatcgatatcccattcgatggacagaggcggttctctacgagttgtcatgtttgcaatcatatatggaagagcctttaaagaccgattacatctttttatacgatcagcttatggatatggaagtctttacggccgtctccaacatcacaaattcgccgccgaatatggtttcagccattatcaaaggattcaagatgatgctggagcgaacagaaccagtccttgtgcctgacaagtccgcccaaacttctggtgttgtatgtcgtttgcaatgccccatacagcttgtgaatattcagctattcctcagttggtccctgaaagccgctctgcgtcgagtctggatcttttcacgcgaatggggtgctaaagagataatggctatcgtatttatctgggccaagagaccgagcgttttccgaccacaggatggagcctttaatcttggcgcataccaggtcaaagaccagagagtccaagacctagagtggaagaaccacaaataccatgcccgcgcccataacgccgagaactacgtcttcacaatgatggagggcttctcagaggtcaaatgtaatcacccccagcccgtcattgagtttggtctaactcctaaagacaaatcgtctgaaactgtaaatggaaatacaaggacagaaggtgatctgcaagagacatctgaatcatga

SEQ ID NO: 7779 - protein, 289 aa, Muscodor strobelii
  misc_feature: SGI Peptide ID NO. 562364
  misc_feature (64)..(223): NCBI GI: 255954037 Blast Desc: Pc21g07300 [Penicillium chrysogenum Wisconsin 54-1255] gi|211589482|emb|CAP95627.1| Pc21g07300 [Penicillium chrysogenum Wisconsin 54-1255]
  misc_feature (79)..(222): NCBI GI: 169775181 Blast Desc: [Aspergillus oryzae RIB40] gi|238496197|ref|XP_002379334.1| conserved [Aspergillus flavus NRRL3357] gi|83769921|dbj|BAE60056.1| protein product oryzae]
  misc_feature (91)..(215): NCBI GI: 119173663 Blast Desc: CIMG_10263 [Coccidioides immitis RS]
  misc_feature (91)..(213): NCBI GI: 258570299 Blast Desc: [Uncinocarpus reesii 1704] gi|237904223|gb|EEP78624.1| [Uncinocarpus reesii 1704]
  misc_feature (73)..(213): NCBI GI: 261358393 Blast Desc: conserved [Verticillium albo-atrum VaMs.102]
MEESKGSVESAAYNESSQTAKEPEDQALRNVRIIYEKHMRLKLILDQAKPGKAHLPGRFWNRYPIRWTEAVLYELSCLQSYMEEPLKTDYIFLYDQLMDMEVFTAVSNITNSPPNMVSAIIKGFKMMLERTEPVLVPDKSAQTSGVVCRLQCPIQLVNIQLFLSWSLKAALRRVWIFSREWGAKEIMAIVFIWAKRPSVFRPQDGAFNLGAYQVKDQRVQDLEWKNHKYHARAHNAENYVFTMMEGFSEVKCNHPQPVIEFGLTPKDKSSETVNGNTRTEGDLQETSES

SEQ ID NO: 7780 - DNA, 810 bp, Muscodor strobelii
  misc_feature: SGI cDNA ID NO. 562365
  misc_feature: Elevated expression when VOC is produced
  misc_feature: Encodes the peptide sequence at SEQ ID NO 7781
atggtctcctcgatatcgtcgaagaagctagtccttgcggcggctgctctgtcattcacagtagacgcgcgatcaatattgaagcgcgaccctccagcagcgcttccaggttgtgctacggatgctgataagaaatggcagccagcaatggacttcgacaccgacggatgctacaacagtcccgcgattgacgctagcgggaatcttgcaacgggattgaactgtggcggtgccaagaatggtcactgccgtgatctttcagatctacagaacaataatgtctattcgcgcgctcgctgcaataatggttggtgtggttatctatatggctactacttcgagaaagaccagactatcgacgggtcttgtggcgtaggacataaaaatgactgggagcatattgtcgtttgggtcaaggatggtgattcgatgccctcttatgtcgctgtgtcacaacacaaagggttcgaggtgcgcgctgccgccgacgtgagatggctggatacccatcccaaagtcatatatcatcaggatggcgccctaacacacgacttccgtttcgcgaatgaagacgacgataacattgagaatcacaccggagcctggtttttcggtgacgtcgtcggtttccttgggtttccttcggctgatctacgcgacaaaatgaacaacgccgactggggcgcggggctccctgacattagagaaagtgttttccctggcaagctcgaagactcgaagggtggcaatgatattcctacagatacgaatgtggacaacgaaaactcaccgggtcagcccgcttgctaa

SEQ ID NO: 7781 - protein, 269 aa, Muscodor strobelii
  misc_feature: SGI Peptide ID NO. 562365
  misc_feature (6)..(247): Pfam Id: PF05630 Pfam Desc: Necrosis inducing protein (NPP1)
  misc_feature (31)..(229): Pfam Id: PF05630 Pfam Desc: Necrosis inducing protein (NPP1)
  misc_feature (18)..(267): NCBI GI: 116179466 Blast Desc: CHGG_00361 [Chaetomium globosum CBS 148.51] gi|88184658|gb|EAQ92126.1| CHGG_00361 [Chaetomium globosum CBS 148.51]
  misc_feature (31)..(267): NCBI GI: 171681357 Blast Desc: protein product [Podospora anserina] gi|170940637|emb|CAP65865.1| protein product [Podospora anserina]
  misc_feature (3)..(247): NCBI GI: 256730144 Blast Desc: NECHADRAFT_95038 [Nectria haematococca mpVI 77-13-4]
  misc_feature (30)..(267): NCBI GI: 85093779 Blast Desc: NCU02338 [Neurospora crassa OR74A] gi|28921216|gb|EAA30528.1| NCU02338 [Neurospora crassa OR74A] gi|40804603|emb|CAF05864.1| conserved [Neurospora crassa]
  misc_feature (21)..(266): NCBI GI: 39974905 Blast Desc: MGG_00401 [Magnaporthe grisea 70-15] gi|145018708|gb|EDK02987.1| MGG_00401 [Magnaporthe grisea 70-15]
  misc_feature (3)..(247): NCBI GI: 239981736 Blast Desc: secreted protein [Streptomyces albus J1074]
  misc_feature (3)..(258): NCBI GI: 256781676 Blast Desc: necrosis-inducing protein [Streptomyces hygroscopicus ATCC 53653]
  misc_feature (8)..(255): NCBI GI: 254385319 Blast Desc: necrosis-inducing protein [Streptomyces sp. Mg1] gi|194344193|gb|EDX25159.1| necrosis-inducing protein [Streptomyces sp. Mg1]
  misc_feature (2)..(247): NCBI GI: 76884869 Blast Desc: necrosis inducing factor [Streptomyces tsusimaensis]
  misc_feature (10)..(247): NCBI GI: 126348045 Blast Desc: secreted protein [Streptomyces ambofaciens ATCC 23877]
  misc_feature: Useful for introducing or modulating the production of volatile compounds
MVSSISSKKLVLAAAALSFTVDARSILKRDPPAALPGCATDADKKWQPAMDFDTDGCYNSPAIDASGNLATGLNCGGAKNGHCRDLSDLQNNNVYSRARCNNGWCGYLYGYYFEKDQTIDGSCGVGHKNDWEHIVVWVKDGDSMPSYVAVSQHKGFEVRAAADVRWLDTHPKVIYHQDGALTHDFRFANEDDDNIENHTGAWFFGDVVGFLGFPSADLRDKMNNADWGAGLPDIRESVFPGKLEDSKGGNDIPTDTNVDNENSPGQPAC

SEQ ID NO: 7782 - DNA, 1686 bp, Muscodor strobelii
  misc_feature: SGI EST ID NO. CUFF.19306.0
  misc_feature: Variant of the nucleotide sequence at SEQ ID NO 7780
ctcgataattacttcaatcagagtttccgggttactatcagatatatacatatatgatgttttgtgtcgtctattattggtgactccaatgggcatcgattgcatcgtttcttcgtcgcctttcatttgagttacagctcaaccggtatgtaatgtattgcttcagctggcggcgatcaacttggcgactcgaagcctcagaacgatcgtctcccaattcggcagtaccaatcattatggcgtcagcccggcctgtcacgcttcggcaaaattagcaactcagcatcgtcattgagaatccccttgggcaacggactgcttggcatccggggccaagcatccttaactcaaccacctgcctttcgcgactcttgaatcccacgaggtccgacaaggccgtgctgttcctggattcgcagcaaatcaaaacgcctcaatcgacaacatgttttcctgtgatcgtcgagctgcattatgcatggtctctgtggattgccgatgctactcagattgaccatgcatttgacaaaacagaacgaactcgacgatttagatataaagtcagccctaatccgcgacagacatcacagtctagggaaatccccagttctcgtggctcaagcaaataggttcaaatcaacgaattcttgaaaatggtctcctcgatatcgtcgaagaagctagtccttgcggcggctgctctgtcattcacagtagacgcgcgatcaatattgaagcgcgaccctccagcagcgcttccaggttgtgctacggatgctgataagaaatggcagccagcaatggacttcgacaccgacggatgctacaacagtcccgcgattgacgctagcgggaatcttgcaacgggattgaactgtggcggtgccaagaatggtcactgccgtgatctttcagatctacagaacaataatgtctattcgcgcgctcgctgcaataatggttggtgtggttatctatatggctactacttcgagaaagaccagactatcgacgggtcttgtggcgtaggacataaaaatgactgggagcatattgtcgtttgggtcaaggatggtgattcgatgccctcttatgtcgctgtgtcacaacacaaagggttcgaggtgcgcgctgccgccgacgtgagatggctggatacccatcccaaagtcatatatcatcaggatggcgccctaacacacgacttccgtttcgcgaatgaagacgacgataacattgagaatcacaccggagcctggtttttcggtgacgtcgtcggtttccttgggtttccttcggctgatctacgcgacaaaatgaacaacgccgactggggcgcggggctccctgacattagagaaagtgttttccctggcaagctcgaagactcgaagggtggcaatgatattcctacagatacgaatgtggacaacgaaaactcaccgggtcagcccgcttgctaaattcatatcgttatatatgcaacccgcctaagtctaatagcgtaggaagattagatataaacgtgggggataaattcaacttaatgacaagtgtactaaacatggccattaggggtcgacgacgtgatatattcaagcatcagtaacactagggctcgacaatgggcggcattggaataaacgcttcatcacatgtcttcttctgttcgaagatcacgcgccg

SEQ ID NO: 7783 - DNA, 906 bp, Muscodor strobelii
  misc_feature: SGI cDNA ID NO. 562366
  misc_feature: Encodes the peptide sequence at SEQ ID NO 7784
atggcgtctcttttcgcggtgattcgatatctacggctcaagattctcgttactgcgatccggttattcgtacggctcgtcacacctcgcttgcaaccacatcccgatgaagtcctgaaaattccgactcgcgacgcagggcgtactattaaaactcacgtctatgatgcggcaaatggcacgtcgcaggacccgagacccgtgctagtcaatttctgcggatgcgggttcgccttacctctctatggcgccgatgactactactgccgcgagatggcgacacgcgccggccagatagtattagatgttgagtatcgcctggctcccgaacatccatttcctgccgccatcaatgatgccgaagatgcagtgcgctacgtgctatcgcaccccgagaagtatgaccagacacaaatttccgtctgtgggttttcgtctggcggcgcattggcgctcactgtcccgacattattccctgcaggcacattccgcaatctgatcacattctacccatctacgaacttggcgaaacccgcggccgagcgcaaagcaccggtgaagagcactttaggtgggcgcaccgggcgcaccccggcctcttggacaagcctattccgggaaggctacttgggaaacatggacccacgagatccacgcatctcgccaatttatgccgataggaccaattgccctctaaccatgatcatgatcacaggagaatgggacgtctcgactctagacgcggaagagtgggcgcatagagcgcggcaagaagggcaaggatctggcagagaggtagttgtgaagagaatgaaggagtgcggacacgccttcgacaaaggcaaaaggaaaacagcccagagagatgaggcctatcaactcgtgattagtatgttgaagaagtga

SEQ ID NO: 7784 - protein, 301 aa, Muscodor strobelii
  misc_feature: SGI Peptide ID NO. 562366
  misc_feature (69)..(280): Pfam Id: PF07859 Pfam Desc: alpha/beta hydrolase fold
  misc_feature (69)..(152): Pfam Id: PF07859 Pfam Desc: alpha/beta hydrolase fold
  misc_feature (1)..(301): NCBI GI: 70986372 Blast Desc: carboxylesterase [Aspergillus fumigatus Af293] gi|66846309|gb|EAL86642.1| carboxylesterase, [Aspergillus fumigatus Af293] gi|159128174|gb|EDP53289.1| carboxylesterase,
  misc_feature (6)..(301): NCBI GI: 212529712 Blast Desc: carboxylesterase, [Penicillium marneffei ATCC 18224] gi|210074411|gb|EEA28498.1| carboxylesterase, [Penicillium marneffei ATCC 18224]
  misc_feature (1)..(295): NCBI GI: 115399264 Blast Desc: conserved [Aspergillus terreus NIH2624] gi|114192104|gb|EAU33804.1| conserved [Aspergillus terreus NIH2624]
  misc_feature (1)..(301): NCBI GI: 242786864 Blast Desc: carboxylesterase, [Talaromyces stipitatus ATCC 10500] gi|218721035|gb|EED20454.1| carboxylesterase, [Talaromyces stipitatus ATCC 10500]
  misc_feature (11)..(301): NCBI GI: 212532049 Blast Desc: esterase/lipase, [Penicillium marneffei ATCC 18224] gi|210071545|gb|EEA25634.1| esterase/lipase, [Penicillium marneffei ATCC 18224]
  misc_feature (8)..(300): NCBI GI: 115385132 Blast Desc: conserved [Aspergillus terreus NIH2624] gi|114196805|gb|EAU38505.1| conserved [Aspergillus terreus NIH2624]
  misc_feature (3)..(300): NCBI GI: 255945381 Blast Desc: Pc20g09630 [Penicillium chrysogenum Wisconsin 54-1255] gi|211588193|emb|CAP86292.1| Pc20g09630 [Penicillium chrysogenum Wisconsin 54-1255]
  misc_feature (4)..(301): NCBI GI: 145234208 Blast Desc: An02g13440 [Aspergillus niger] gi|134057419|emb|CAK47757.1| protein product [Aspergillus niger]
  misc_feature (7)..(300): NCBI GI: 255944015 Blast Desc: Pc20g02160 [Penicillium chrysogenum Wisconsin 54-1255] gi|211587510|emb|CAP85545.1| Pc20g02160 [Penicillium chrysogenum Wisconsin 54-1255]
  misc_feature (6)..(300): NCBI GI: 67537326 Blast Desc: AN4833.2 [Aspergillus nidulans FGSC A4] gi|40740878|gb|EAA60068.1| AN4833.2 [Aspergillus nidulans FGSC A4] gi|259482312|tpe|CBF76674.1| TPA: esterase/lipase, nidulans
MASLFAVIRYLRLKILVTAIRLFVRLVTPRLQPHPDEVLKIPTRDAGRTIKTHVYDAANGTSQDPRPVLVNFCGCGFALPLYGADDYYCREMATRAGQIVLDVEYRLAPEHPFPAAINDAEDAVRYVLSHPEKYDQTQISVCGFSSGGALALTVPTLFPAGTFRNLITFYPSTNLAKPAAERKAPVKSTLGGRTGRTPASWTSLFREGYLGNMDPRDPRISPIYADRTNCPLTMIMITGEWDVSTLDAEEWAHRARQEGQGSGREVVVKRMKECGHAFDKGKRKTAQRDEAYQLVISMLKK

SEQ ID NO: 7785 - DNA, 1380 bp, Muscodor strobelii
  misc_feature: SGI EST ID NO. CUFF.19308.0
  misc_feature: Variant of the nucleotide sequence at SEQ ID NO 7783
caaattcagtctacatttcgagttctgttgctcaattgaagatcatcagtcccaagagtttatcgaataaatacaacccttaatcgcaacgcaaggggctgccggcgcgtcccacattagagatggcgtctcttttcgcggtgattcgatatctacggctcaagattctcgttactgcgatccggttattcgtacggctcgtcacacctcgcttgcaaccacatcccgatgaagtcctgaaaattccgactcgcgacgcagggcgtactattaaaactcacgtctatgatgcggcaaatggcacgtcgcaggacccgagacccgtgctagtcaatttctgcggatgcgggttcgccttacctctctatggcgccgatgactactactgccgcgagatggcgacacgcgccggccagatagtattagatgttgagtatcgcctggctcccgaacatccatttcctgccgccatcaatgatgccgaagatgcagtgcgctacgtgctatcgcaccccgagaagtatgaccagacacaaatttccgtctgtgggttttcgtctggcggcgcattggcgctcactgtcccgacattattccctgcaggcacattccgcaatctgatcacattctacccatctacgaacttggcgaaacccgcggccgagcgcaaagcaccggtgaagagcactttaggtgggcgcaccgggcgcaccccggcctcttggacaagcctattccgggaaggctacttgggaaacatggacccacgagatccacgcatctcgccaatttatgccgataggaccaattgccctctaaccatgatcatgatcacaggagaatgggacgtctcgactctagacgcggaagagtgggcgcatagagcgcggcaagaagggcaaggatctggcagagaggtagttgtgaagagaatgaaggagtgcggacacgccttcgacaaaggcaaaaggaaaacagcccagagagatgaggcctatcaactcgtgattagtatgttgaagaagtgagcagggtagtgagatcacatagggttcgcgagcaagatggttggggcctcctcttcaactacgctgcctccaacattccagaggggtcaatggtataggtaacagtcgtgcaatcctgttaacattctatttaaaagctcgaagacaggattttctatatatgtgtgccattgggtgccaattgaacgaacccgatgtggacttgaaatgactagggcagacggccgcgcgacaccaaggagagtcgaattgatcaacccattatgtgaacatggacatccacccgtactcatcatcaacgtcgagttaggcgccgcttcgtccgccttccaaagtcgtttctggctcaagc

SEQ ID NO: 7786 - DNA, 501 bp, Muscodor strobelii
  misc_feature: SGI cDNA ID NO. 562367
  misc_feature: Encodes the peptide sequence at SEQ ID NO 7787
atggcttcttctactccagacagtaccttcagcacattaaattcgaagtgggctcgctggtgggctaagaattggtactggccagcggttgttaccggtttgccaattgtcccatcgtactgcttccaacacatccacaagttcggatcgcagcgctttcgtgactccttggagacaaaggccaacgagtcgcaagacagcctaacacaacatatccgcatgcaaatcaacgaagcctacgaggcaatataccgtgagaaatgcaaaaatgttggcggcagagcacgtgttggggatctgagggttccaacatgggctaaattgcagctggtatggcagcacgtgctgaaccgcacggtgaaacgaacagctaagaccttgattttcttcgggtcttatggatatatttgtcggaagatgtgcgaggaatgggataagcagaaaatccccgacaacaatagtagtgagcagcaggcatcttcgggcgacttgtcctggtaa

SEQ ID NO: 7787 - protein, 166 aa, Muscodor strobelii
  misc_feature: SGI Peptide ID NO. 562367
MASSTPDSTFSTLNSKWARWWAKNWYWPAVVTGLPIVPSYCFQHIHKFGSQRFRDSLETKANESQDSLTQHIRMQINEAYEAIYREKCKNVGGRARVGDLRVPTWAKLQLVWQHVLNRTVKRTAKTLIFFGSYGYICRKMCEEWDKQKIPDNNSSEQQASSGDLSW

SEQ ID NO: 7788 - DNA, 900 bp, Muscodor strobelii
  misc_feature: SGI cDNA ID NO. 562368
  misc_feature: Encodes the peptide sequence at SEQ ID NO 7789
atggatcaggcgcgctctggccgtggggccttgccttacaagccccgcaagtcctccacaaagggcaacacttccgcctctggtgacaacgccgtccgagttcctggcccttcacgagtcacccgacgtactcgcaagcctgtcaagcttagcgaatccgagatcagtatgcttgggcgcgaggttgatgcgatgatggagacctggacggaggagctgcggctcaagggtctgtttcccgaaggcgatgctgagaacatgagcctgatgagtgaagctgccactccgccctccatcgaggagaagacagacgatagcagctatgacaaagccatagtatctcttttgcgttccatggctgtcagtcgttcctgcttgcagaagctcaaggagcatgtcgttcgcggctccagcgacactcctacttctcccctcgtcgacaaggagccagagactactcttgctcagtatcatggccgcatcgccaatctcattagatctagcttgccgaatttcattggacgagacaccagcagcatcaacgcgcgcgatgttggcatggagaacggagatcgccccgttctcatcgcctttccaggacttcatgatgagctcagacgtctggaatcatcccactcagccagcagccgtttctgggcagacattgcacctgtccctctgggctacgacgcgaacaacagctacacgctacaccccgatccagcccggaccagccaccccaccagccccgagcccattgagcccgccgagccccttcagcccggtgaatacgccaaactgaagcaagagctcgaggataccgtcatgatgtgtgacatagaggatgccgtcgacggacatttgcttggtgatcagggaactagtgctggacgttactaa

SEQ ID NO: 7789 - protein, 299 aa, Muscodor strobelii
  misc_feature: SGI Peptide ID NO. 562368
MDQARSGRGALPYKPRKSSTKGNTSASGDNAVRVPGPSRVTRRTRKPVKLSESEISMLGREVDAMMETWTEELRLKGLFPEGDAENMSLMSEAATPPSIEEKTDDSSYDKAIVSLLRSMAVSRSCLQKLKEHVVRGSSDTPTSPLVDKEPETTLAQYHGRIANLIRSSLPNFIGRDTSSINARDVGMENGDRPVLIAFPGLHDELRRLESSHSASSRFWADIAPVPLGYDANNSYTLHPDPARTSHPTSPEPIEPAEPLQPGEYAKLKQELEDTVMMCDIEDAVDGHLLGDQGTSAGRY

SEQ ID NO: 7790 - DNA, 467 bp, Muscodor strobelii
  misc_feature: SGI cDNA ID NO. 562369
  misc_feature: Reduced expression when VOC is produced
  misc_feature: Encodes the peptide sequence at SEQ ID NO 7791
atggcagcgacccgtccagcgctgtccgcggcagcatgctcccaatgccgcctgcgcctgttgcactacgcctttgcccccattgctctacctacggctctgcccagacacgtcgccgctgcctctgcccgcgcccgcctgcccagtccttcgaccaacgcccaggccctgtctctccgacacttctcttccttgcccgactcccagccccccaggccctccgagcccaaggcagacctagacccagacgcacagccagatgcagaggccaatgcaagtccagagtcttcttctgccgacgcgcccgttccctggtacctccaggttgatcctccaacgcacatagcgcccatcgagctgcccgccctgcccgacgtgcccccggatgcgccgcccttgatccgcactctcctccagtatgcctcggaagatatgggcctcgatgatctgaacctgctggatctgcg

SEQ ID NO: 7791 - protein, 155 aa, Muscodor strobelii
  misc_feature: SGI Peptide ID NO. 562369
  misc_feature (1)..(155): NCBI GI: 85108429 Blast Desc: NCU06309 [Neurospora crassa OR74A] gi|28924180|gb|EAA33335.1| [Neurospora crassa OR74A]
  misc_feature (4)..(155): NCBI GI: 256729788 Blast Desc: NECHADRAFT_101229 [Nectria haematococca mpVI 77-13-4]
  misc_feature (8)..(155): NCBI GI: 242817476 Blast Desc: conserved [Talaromyces stipitatus ATCC 10500] gi|218713428|gb|EED12852.1| conserved [Talaromyces stipitatus ATCC 10500]
  misc_feature (4)..(155): NCBI GI: 46121273 Blast Desc: FG05015.1 [Gibberella zeae PH-1]
  misc_feature (81)..(155): NCBI GI: 145601361 Blast Desc: MGG_08809 [Magnaporthe grisea 70-15] gi|145009365|gb|EDJ94076.1| MGG_08809 [Magnaporthe grisea 70-15]
  misc_feature (97)..(155): NCBI GI: 170940260 Blast Desc: protein product [Podospora anserina]
  misc_feature (3)..(146): NCBI GI: 261352764 Blast Desc: conserved [Verticillium albo-atrum VaMs.102]
  misc_feature (38)..(155): NCBI GI: 212530814 Blast Desc: conserved [Penicillium marneffei ATCC 18224] gi|210074962|gb|EEA29049.1| conserved [Penicillium marneffei ATCC 18224]
  misc_feature (4)..(155): NCBI GI: 255956301 Blast Desc: Pc21g19120 [Penicillium chrysogenum Wisconsin 54-1255] gi|211590614|emb|CAP96809.1| Pc21g19120 [Penicillium chrysogenum Wisconsin 54-1255]
  misc_feature (11)..(155): NCBI GI: 115385613 Blast Desc: conserved [Aspergillus terreus NIH2624] gi|114187800|gb|EAU29500.1| conserved [Aspergillus terreus NIH2624]
  misc_feature: Useful for introducing or modulating the production of volatile compounds
MAATRPALSAAACSQCRLRLLHYAFAPIALPTALPRHVAAASARARLPSPSTNAQALSLRHFSSLPDSQPPRPSEPKADLDPDAQPDAEANASPESSSADAPVPWYLQVDPPTHIAPIELPALPDVPPDAPPLIRTLLQYASEDMGLDDLNLLDL

SEQ ID NO: 7792 - DNA, 703 bp, Muscodor strobelii
  misc_feature: SGI EST ID NO. CUFF.19320.0
  misc_feature: Variant of the nucleotide sequence at SEQ ID NO 7790
cacgaggtatgatgtaggtagatattctacatgagaacaaccttcggtctcgggacctggtcgtcgacattgctgaatgtgctaccaaagcagataattaacattcatctcactacctagtcttgtcgataccggtatcgagttatcaactatcaagcatgaggcagcgcatctaaaccttttcgtcctccctcctacattttttttcttcttctctctctggcgacggaaacaccatggcagcgacccgtccagcgctgtccgcggcagcatgctcccaatgccgcctgcgcctgttgcactacgcctttgcccccattgctctacctacggctctgcccagacacgtcgccgctgcctctgcccgcgcccgcctgcccagtccttcgaccaacgcccaggccctgtctctccgacacttctcttccttgcccgactcccagccccccaggccctccgagcccaaggcagacctagacccagacgcacagccagatgcagaggccaatgcaagtccagagtcttcttctgccgacgcgcccgttccctggtacctccaggttgatcctccaacgcacatagcgcccatcgagctgcccgccctgcccgacgtgcccccggatgcgccgcccttgatccgcactctcctccagtatgcctcggaagatatgggcctcgatgatctgaacctgctggatctgcg

SEQ ID NO: 7793 - DNA, 4140 bp, Muscodor strobelii
  misc_feature: SGI cDNA ID NO. 562370
  misc_feature: Reduced expression when VOC is produced
  misc_feature: Encodes the peptide sequence at SEQ ID NO 7794
atgctcttgcgccagcgccatgccaggaggcacctctccctccctttaacctgccagtccgtcacgcgatactataccaccgcaaaactcacgcccacccgcccaccacagcgcaagagcaccgccgcgcatcatcgtcccgtccccagccgcccgctcgccaccgccgtcggctcacacatccgccaggatgacctctcctacgaccacctacgtgcctaccagcagcagcagcagcagtccaccgcccctccagtctaccatctgcgcagctgggatcccgcgagcaatctcctgctcccagtctccgatgaccccctcccacgtgtcagaaccaacgcttccggcattcctggtggcgtagacgagatgctgtctgtcttcgacgcctgtctactcgtgaaccagctggatcgcgccgcccttgtgctcgagcgcctgaacgacggtgccgacggcggcctgcttcccgcggatgacttgatcctgcttcacaaccaatatttgcgcgccgtcattgcggccgccgtcgagcagcccgagatgcaccgagccaagtcattgcaccggtggtttgaggtccatatcgtcgcgcacagcctcccctacaccactgagacgattgcttgcatgctgaaggcttcgctccagtccgcccagggcactctcctccggaagcttgttacgcgctacatggacatgctacctcaggaatctatctacgccctagcccaaggtggtctcttgagtcagcaagactttggcaccatcacaagcatctaccaacccgcctcggattccatgtatgatgcttgggatcctaccttggccgagaacgaacctgagcagccggtttcgctagacagtctcgaggcggcggaagaggacggtaccgcggatgccacgcctcaggtccgccctgtacctcagaagggcctgggattgaaatctctgcgcggcatcttgtccttcttcgaccccttagaagggcacgatctttccaagctctccaaggacgagctggccgagttgcagactcaactagagaaagactgtgtcgattcggccatggagcgctggaaagaagagtaccaggcattgactaagatgggccgcaacaacgtttggacgtcaagcaggcagttcaacgcccagatttacgagtggcagtgtgctttcgagcagaagctacaacaggagtttgctaaatttgccgcctcggaagctagcacacagaaggctgccgaggatcaggatcgctgcttgtatggtcctttcatgcgccaatccacgccagcaagattggctgccatcactatcatgtctattctcaactcactcgcgtcgttgggtgcggacaagggcataactctgtcaacttcagtcgccaacctgtccagaatggtggaagaggacatcgcccttcaaaaccgagagaaggaaaacctggctcgtcgcaaaaattggcagcaaaccaagtcctcgacgccgcaaccggccgcctcggacacggagacatccaatattttaaaagcccctctttgcgacagaaggtcatggccgacctcgattcgggccaagattggcgctctactgttgtcttatctgctcgatgtagctaagatggaggtcgtacgtgagcatcctgaaaccaaagagctcagcagacagcttcagccagccctggcgcacgtggctatgtttcgcaagggaaagagagttggcatggttataccaaacaagtgcttagtcgaagtcctgatgcgtgagcctaggggtgacttcctagccaaacatcttcccatgttggtcgagccgaggccatggacagaatttgaaaagggaggttatctcgacaccccgaaccggctggtacgcctgaagaatggagaactggatcagaaaatctacacggaagcagcattgaagcgaggcgatttagagcaagttaccaaagccatggacgtgcttggtcgaacggcctggaaaatcaacaactcggtttttaacgttatgctggaagcgtggaacacgggtgaggccattgctaacatcccgcctctcaatcccaacatcccggtccccgaagaacctgatatgggcgccgatccgacggtgcgcagagagtggatcaagcgcgtcaaactcgccgagaatgaaagatccggactccattccgagcgctgtcacatgaattttcaatttgacattgcaagagctttcaaagaccggacattttatttcccccacaacatggacttcagaggacgcgcatacccagtgccttcctacttgaaccacatgggtgccgaccatgtccgtggattgctgtgtttcggctctggcaaggaattgggcgaggccgggctccgatggctgaaagtccagcttgccaatgtgttcgggtttgacaaagccagcctcgaggagagggaagcattcgccatggcccattatgatgacattgttgattccactacgaagccgctcataggcaaacgctggtggctcaaggcggaagatccgtggcaatgcttggcggcttgtttcgaattgaaagccgccttagagtcccccgaccccaccaagtatgtgtcccatctacctgtccagcaggatgggacttgcaacggactgcaacattatgcagctttgggcggtgatacttggggtgcgcagcaagtgaacctagctcccggagagcgtcccgccgacgtgtattctgccgttgccggtcttgtccaggaaagtgttaccgaagacgtcactcgcgggcactttgtcgctaaggccatggacggcaaaatcacacgcaaggtggtcaaacagacagtgatgacaaatgtctatggtgtgacgtatatcggcgctaaagcccaagttctcaagcagataaatgctgcgcacccaaatttccaggccgagactggtgtcgccccatcgctagcctctgcctacgtgacgacaaagatcttcaaggctttgtctactatgttccgcggagctcacgacatacagtactggctgggggaatgtgccgggcgagtgagtcgtgcgctgacgccagagcaattagaccgtatagatgatggatccaagtcccctaaaccagtgaggaagaatgcgaagagtacaaaaggatcgaaggcaacgcgaacgcaagtccaaataacaaccaccccggatgaaatcctcaaccaattcagatctactattgtgtggactacacctcttcgaatgccaattgttcagccgtatcgcaagacgacgactcgtagcatcaagacttgcatgcaagacttgacgttgcaagtccctgatcgaagcgacccggtcaacagacggaagcagttgcaggcgtttccaccgaatttcatccactctctcgacgctagccacatgctcctttccgctttagagtgcgaggaagtcggtttatcatttgcagccgttcacgattcgttctggacccatgcaactgatattgacgcgatgaatcgcattctacgggatgcttttatccgaatccacagtgaagatgtgattggccggctgaaggccgagttcgacgctaggtacaagggttgcttgtatcttgccaaaaccgcccaggactcagaatttgggattaaactgatggatctacggcgacaaactaggttgtcactgaaggaggagttgcttcgggagcgcgagcgacagcgatatttgaactcatccgatccagaagaagtacaaaagggcttggaaatggtcacacctgcaagcctctacgaagaacacaatgcctctcagttactatcatcttttgatgaaggtgagcctgtgggactaggagacattaccaacgaaaaagttcccgaagaggaggatactgtctctccgcacagtccgagagacaagccacatctccggacaagtatggaaaatgaagaattggcatcaaagcttgcttccatgaatcacttccaggccgttctcgagaaagattcttcaagagaattgcaaaaagcaccgagcgcatcctttaaacaaaacgtaccatattgcttctggcttcctcttgacttccctgatatccccaaaaagggggactttgacgtgaggcaactcaaagacagcaaatatttcttctcctaa

SEQ ID NO: 7794 - protein, 1379 aa, Muscodor strobelii
  misc_feature: SGI Peptide ID NO. 562370
  misc_feature (782)..(1379): Pfam Id: PF00940 Pfam Desc: DNA-dependent RNA polymerase
  misc_feature (782)..(1194): Pfam Id: PF00940 Pfam Desc: DNA-dependent RNA polymerase
  misc_feature (1354)..(1379): Pfam Id: PF00940 Pfam Desc: DNA-dependent RNA polymerase
  misc_feature (51)..(1379): NCBI GI: 116195484 Blast Desc: CHGG_04340 [Chaetomium globosum CBS 148.51] gi|88180253|gb|EAQ87721.1| CHGG_04340 [Chaetomium globosum CBS 148.51]
  misc_feature (70)..(1379): NCBI GI: 438813 Blast Desc: mitochondrial RNA polymerase [Neurospora crassa] gi|1589165|prf||2210334A cyt-5 gene
  misc_feature (70)..(1375): NCBI GI: 164425173 Blast Desc: NCU06308 [Neurospora crassa OR74A] gi|157070818|gb|EAA33334.2| [Neurospora crassa OR74A]
  misc_feature (37)..(1379): NCBI GI: 256729603 Blast Desc: NECHADRAFT_95384 [Nectria haematococca mpVI 77-13-4]
  misc_feature (50)..(1379): NCBI GI: 46121275 Blast Desc: FG05016.1 [Gibberella zeae PH-1]
  misc_feature (1)..(1379): NCBI GI: 145601305 Blast Desc: MGG_14133 [Magnaporthe grisea 70-15] gi|145009315|gb|EDJ94026.1| MGG_14133 [Magnaporthe grisea 70-15]
  misc_feature (108)..(1379): NCBI GI: 170940259 Blast Desc: protein product [Podospora anserina]
  misc_feature (37)..(1363): NCBI GI: 156049831 Blast Desc: SS1G_08623 [Sclerotinia sclerotiorum 1980] gi|154693021|gb|EDN92759.1| SS1G_08623 [Sclerotinia sclerotiorum 1980]
  misc_feature (159)..(1379): NCBI GI: 154290650 Blast Desc: BC1G_15645 [Botryotinia fuckeliana B05.10] gi|150847476|gb|EDN22669.1| BC1G_15645 [Botryotinia fuckeliana B05.10]
  misc_feature (2)..(1379): NCBI GI: 238845421 Blast Desc: DNA-directed RNA polymerase [Microsporum canis CBS 113480]
  misc_feature (70)..(1379): SWISSPROT Homolog: EC 2.7.7.6 DNA-directed RNA polymerase
  misc_feature: Useful for introducing or modulating the production of volatile compounds
MLLRQRHARRHLSLPLTCQSVTRYYTTAKLTPTRPPQRKSTAAHHRPVPSRPLATAVGSHIRQDDLSYDHLRAYQQQQQQSTAPPVYHLRSWDPASNLLLPVSDDPLPRVRTNASGIPGGVDEMLSVFDACLLVNQLDRAALVLERLNDGADGGLLPADDLILLHNQYLRAVIAAAVEQPEMHRAKSLHRWFEVHIVAHSLPYTTETIACMLKASLQSAQGTLLRKLVTRYMDMLPQESIYALAQGGLLSQQDFGTITSIYQPASDSMYDAWDPTLAENEPEQPVSLDSLEAAEEDGTADATPQVRPVPQKGLGLKSLRGILSFFDPLEGHDLSKLSKDELAELQTQLEKDCVDSAMERWKEEYQALTKMGRNNVWTSSRQFNAQIYEWQCAFEQKLQQEFAKFAASEASTQKAAEDQDRCLYGPFMRQSTPARLAAITIMSILNSLASLGADKGITLSTSVANLSRMVEEDIALQNREKENLARRKNWQQTKSSTPQPAASDTETSNILKAPLCDRRSWPTSIRAKIGALLLSYLLDVAKMEVVREHPETKELSRQLQPALAHVAMFRKGKRVGMVIPNKCLVEVLMREPRGDFLAKHLPMLVEPRPWTEFEKGGYLDTPNRLVRLKNGELDQKIYTEAALKRGDLEQVTKAMDVLGRTAWKINNSVFNVMLEAWNTGEAIANIPPLNPNIPVPEEPDMGADPTVRREWIKRVKLAENERSGLHSERCHMNFQFDIARAFKDRTFYFPHNMDFRGRAYPVPSYLNHMGADHVRGLLCFGSGKELGEAGLRWLKVQLANVFGFDKASLEEREAFAMAHYDDIVDSTTKPLIGKRWWLKAEDPWQCLAACFELKAALESPDPTKYVSHLPVQQDGTCNGLQHYAALGGDTWGAQQVNLAPGERPADVYSAVAGLVQESVTEDVTRGHFVAKAMDGKITRKVVKQTVMTNVYGVTYIGAKAQVLKQINAAHPNFQAETGVAPSLASAYVTTKIFKALSTMFRGAHDIQYWLGECAGRVSRALTPEQLDRIDDGSKSPKPVRKNAKSTKGSKATRTQVQITTTPDEILNQFRSTIVWTTPLRMPIVQPYRKTTTRSIKTCMQDLTLQVPDRSDPVNRRKQLQAFPPNFIHSLDASHMLLSALECEEVGLSFAAVHDSFWTHATDIDAMNRILRDAFIRIHSEDVIGRLKAEFDARYKGCLYLAKTAQDSEFGIKLMDLRRQTRLSLKEELLRERERQRYLNSSDPEEVQKGLEMVTPASLYEEHNASQLLSSFDEGEPVGLGDITNEKVPEEEDTVSPHSPRDKPHLRTSMENEELASKLASMNHFQAVLEKDSSRELQKAPSASFKQNVPYCFWLPLDFPDIPKKGDFDVRQLKDSKYFFS

SEQ ID NO: 7795 - DNA, 4986 bp, Muscodor strobelii
  misc_feature: SGI EST ID NO. CUFF.19419.0
  misc_feature: Variant of the nucleotide sequence at SEQ ID NO 7793
aggcgcgacacttgacagacttgcccgccgactagggtgcctacctacctaagcccgtcgtggcgttcaattagaatggaagtggtccccgacgtgcaatgccaataacgtgggagatgcattgctggtagaaatttattcagtccaatcccgtcaccaccaccaccctcgatctcaacctccatcctcatcttcgcccacgccccgatcccatctgctcgtcctcatcctgctcggggcatctgtatcatcatccctcttcacagcgtgctggatgtgttgttgtgttactccccctaatagtctattgtaattcctaaatgttctgaacccgcgccgcctcctcagcagcctttggcctgccgagtccccgtcactcctttccgtatatcgtcacgcatcttccatcttcctcagaatgctcttgcgccagcgccatgccaggaggcacctctccctccctttaacctgccagtccgtcacgcgatactataccaccgcaaaactcacgcccacccgcccaccacagcgcaagagcaccgccgcgcatcatcgtcccgtccccagccgcccgctcgccaccgccgtcggctcacacatccgccaggatgacctctcctacgaccacctacgtgcctaccagcagcagcagcagcagtccaccgcccctccagtctaccatctgcgcagctgggatcccgcgagcaatctcctgctcccagtctccgatgaccccctcccacgtgtcagaaccaacgcttccggcattcctggtggcgtagacgagatgctgtctgtcttcgacgcctgtctactcgtgaaccagctggatcgcgccgcccttgtgctcgagcgcctgaacgacggtgccgacggcggcctgcttcccgcggatgacttgatcctgcttcacaaccaatatttgcgcgccgtcattgcggccgccgtcgagcagcccgagatgcaccgagccaagtcattgcaccggtggtttgaggtccatatcgtcgcgcacagcctcccctacaccactgagacgattgcttgcatgctgaaggcttcgctccagtccgcccagggcactctcctccggaagcttgttacgcgctacatggacatgctacctcaggaatctatctacgccctagcccaaggtggtctcttgagtcagcaagactttggcaccatcacaagcatctaccaacccgcctcggattccatgtatgatgcttgggatcctaccttggccgagaacgaacctgagcagccggtttcgctagacagtctcgaggcggcggaagaggacggtaccgcggatgccacgcctcaggtccgccctgtacctcagaagggcctgggattgaaatctctgcgcggcatcttgtccttcttcgaccccttagaagggcacgatctttccaagctctccaaggacgagctggccgagttgcagactcaactagagaaagactgtgtcgattcggccatggagcgctggaaagaagagtaccaggcattgactaagatgggccgcaacaacgtttggacgtcaagcaggcagttcaacgcccagatttacgagtggcagtgtgctttcgagcagaagctacaacaggagtttgctaaatttgccgcctcggaagctagcacacagaaggctgccgaggatcaggatcgctgcttgtatggtcctttcatgcgccaatccacgccagcaagattggctgccatcactatcatgtctattctcaactcactcgcgtcgttgggtgcggacaagggcataactctgtcaacttcagtcgccaacctgtccagaatggtggaagaggacatcgcccttcaaaaccgagagaaggaaaacctggctcgtcgcaaaaattggcagcaaaccaagtcctcgacgccgcaaccggccgcctcggacacggagacatccaatattttaaaagcccctctttgcgacagaaggtcatggccgacctcgattcgggccaagattggcgctctactgttgtcttatctgctcgatgtagctaagatggaggtcgtacgtgagcatcctgaaaccaaagagctcagcagacagcttcagccagccctggcgcacgtggctatgtttcgcaagggaaagagagttggcatggttataccaaacaagtgcttagtcgaagtcctgatgcgtgagcctaggggtgacttcctagccaaacatcttcccatgttggtcgagccgaggccatggacagaatttgaaaagggaggttatctcgacaccccgaaccggctggtacgcctgaagaatggagaactggatcagaaaatctacacggaagcagcattgaagcgaggcgatttagagcaagttaccaaagccatggacgtgcttggtcgaacggcctggaaaatcaacaactcggtttttaacgttatgctggaagcgtggaacacgggtgaggccattgctaacatcccgcctctcaatcccaacatcccggtccccgaagaacctgatatgggcgccgatccgacggtgcgcagagagtggatcaagcgcgtcaaactcgccgagaatgaaagatccggactccattccgagcgctgtcacatgaattttcaatttgacattgcaagagctttcaaagaccggacattttatttcccccacaacatggacttcagaggacgcgcatacccagtgccttcctacttgaaccacatgggtgccgaccatgtccgtggattgctgtgtttcggctctggcaaggaattgggcgaggccgggctccgatggctgaaagtccagcttgccaatgtgttcgggtttgacaaagccagcctcgaggagagggaagcattcgccatggcccattatgatgacattgttgattccactacgaagccgctcataggcaaacgctggtggctcaaggcggaagatccgtggcaatgcttggcggcttgtttcgaattgaaagccgccttagagtcccccgaccccaccaagtatgtgtcccatctacctgtccagcaggatgggacttgcaacggactgcaacattatgcagctttgggcggtgatacttggggtgcgcagcaagtgaacctagctcccggagagcgtcccgccgacgtgtattctgccgttgccggtcttgtccaggaaagtgttaccgaagacgtcactcgcgggcactttgtcgctaaggccatggacggcaaaatcacacgcaaggtggtcaaacagacagtgatgacaaatgtctatggtgtgacgtatatcggcgctaaagcccaagttctcaagcagataaatgctgcgcacccaaatttccaggccgagactggtgtcgccccatcgctagcctctgcctacgtgacgacaaagatcttcaaggctttgtctactatgttccgcggagctcacgacatacagtactggctgggggaatgtgccgggcgagtgagtcgtgcgctgacgccagagcaattagaccgtatagatgatggatccaagtcccctaaaccagtgaggaagaatgcgaagagtacaaaaggatcgaaggcaacgcgaacgcaagtccaaataacaaccaccccggatgaaatcctcaaccaattcagatctactattgtgtggactacacctcttcgaatgccaattgttcagccgtatcgcaagacgacgactcgtagcatcaagacttgcatgcaagacttgacgttgcaagtccctgatcgaagcgacccggtcaacagacggaagcagttgcaggcgtttccaccgaatttcatccactctctcgacgctagccacatgctcctttccgctttagagtgcgaggaagtcggtttatcatttgcagccgttcacgattcgttctggacccatgcaactgatattgacgcgatgaatcgcattctacgggatgcttttatccgaatccacagtgaagatgtgattggccggctgaaggccgagttcgacgctaggtacaagggttgcttgtatcttgccaaaaccgcccaggactcagaatttgggattaaactgatggatctacggcgacaaactaggttgtcactgaaggaggagttgcttcgggagcgcgagcgacagcgatatttgaactcatccgatccagaagaagtacaaaagggcttggaaatggtcacacctgcaagcctctacgaagaacacaatgcctctcagttactatcatcttttgatgaaggtgagcctgtgggactaggagacattaccaacgaaaaagttcccgaagaggaggatactgtctctccgcacagtccgagagacaagccacatctccggacaagtatggaaaatgaagaattggcatcaaagcttgcttccatgaatcacttccaggccgttctcgagaaagattcttcaagagaattgcaaaaagcaccgagcgcatcctttaaacaaaacgtaccatattgcttctggcttcctcttgacttccctgatatccccaaaaagggggactttgacgtgaggcaactcaaagacagcaaatatttcttctcctaattcagagatgcaatatggctgtcgcaaatcggatacttcggtttttaatcatggggcgtttcttgcgaggattagggccagcagcgcatgcattcaatggcgtttattcattttaggaaaaggggctgcgatgtacaaaaaaagaactatacaactcggactgtcgaaatctttgtactaacagatgtatataatacccgtggccaacgccgtatttggtggcctgccgtcgaagggacgtgcagtaggggctagtatcgggttggcctttataagttactatatagaggactagatgtgtaggatcggtaaaggacaaaccctcaattatgggttcagagtatactacgtggctagtcagataagaatagccgatggaaaatattgaatatcgtaagacaacatactcatggacttcaggttccgca

SEQ ID NO: 7796 - DNA, 1224 bp, Muscodor strobelii
  misc_feature: SGI cDNA ID NO. 562371
  misc_feature: Reduced expression when VOC is produced
  misc_feature: Encodes the peptide sequence at SEQ ID NO 7797
atggccgctctccaagcccagaagctctcacccaccgaggaaaccgaagtccagcagtggaccaccaccgccgagcgcctgaaggcctctcctgccgatacttctatcctcgacagcctcaatgcccacctcacctctcgcaccaccgtccttggcaccaagccctctaccgccgatgtagccatctacgagtctctggcccctaccgtcaagtcatggaccgctgagcagcgcaccggccagcagggccacccgcacatcgtccgccatctcgacttcgtccagaactcgactctgttcgacctcaagctcgcagacgacgccaagttcaacgtcgaccacgacgaaatcctctacgtcaagcccccgaccgacctcaaggccgagaaggagcgtctaaagaaggagaaagctgccgcagctgcagccgcagccggcgccagtgctgaaggagctacagccacactcgtcgacaggaccaaagccgccgctgccgtcgtagtcgagaaagccatcgaagtcaaagacgccgtcgcagccgcagccggcgtcggcggcgaaacagccaagcccaagaaggagaagaaagagaaagcccccaaacaacccaaagcccccgccgtcgcgacgcctcccgcccctcacctcatcgacctacgcgtcggccacatccttaaggccatcaagcacccggaagccgactccctctacgtctccaccatcgccatgggcgacaagcccggcaccgacgacaccgaggagtacgagggacaagtctgccgcaccgtctgctcgggcctcaacggtctagtgccgctcgaggagatgcaaggccgtaaagtggtcgtcgtcgctaacctgaagcccgtcaagatgcgcggcatcaagtcctgcgccatggtcctggccgcatcgccaaagctcaaggaaggcgaggtagataaccacgcaggacccgtcgagcttgttacgccgcccgagggttccacagccggcgagcgtgtctgctttgatgggtggcggggtgagcctgagggtgtgctgaaccccaagaagaagatctgggagacgttccagcctggcttcacgactacggataatttcgaggtcgcttttgacggaagtgtggtcaaggaggctggcaaatctgaggttgggaagctcaccacggctaccggtgggacgtgtacggttaagacgctgaagggtgctacggtacgataa

SEQ ID NO: 7797 - protein, 407 aa, Muscodor strobelii
  misc_feature: SGI Peptide ID NO. 562371
  misc_feature (219)..(334): Pfam Id: PF01588 Pfam Desc: tRNA binding domain
  misc_feature (1)..(407): NCBI GI: 156049847 Blast Desc: SS1G_08631 [Sclerotinia sclerotiorum 1980] gi|154693029|gb|EDN92767.1| SS1G_08631 [Sclerotinia sclerotiorum 1980]
  misc_feature (1)..(407): NCBI GI: 39966524 Blast Desc: MGG_01907 [Magnaporthe grisea 70-15] gi|145009596|gb|EDJ94252.1| MGG_01907 [Magnaporthe grisea 70-15]
  misc_feature (1)..(407): NCBI GI: 154309195 Blast Desc: BC1G_07492 [Botryotinia fuckeliana B05.10] gi|150852535|gb|EDN27727.1| BC1G_07492 [Botryotinia fuckeliana B05.10]
  misc_feature (1)..(407): NCBI GI: 170940257 Blast Desc: protein product [Podospora anserina]
  misc_feature (1)..(407): NCBI GI: 261352758 Blast Desc: GU4 nucleic-binding protein [Verticillium albo-atrum VaMs.102]
  misc_feature (1)..(407): NCBI GI: 46121267 Blast Desc: FG05012.1 [Gibberella zeae PH-1]
  misc_feature (1)..(407): NCBI GI: 85108421 Blast Desc: NCU06307 [Neurospora crassa OR74A] gi|28924178|gb|EAA33333.1| NCU06307 [Neurospora crassa OR74A]
  misc_feature (1)..(407): NCBI GI: 256729789 Blast Desc: [Nectria haematococca mpVI 77-13-4]
  misc_feature (13)..(407): NCBI GI: 169621666 Blast Desc: SNOG_14044 [Phaeosphaeria nodorum SN15] gi|111057549|gb|EAT78669.1| SNOG_14044 [Phaeosphaeria nodorum SN15]
  misc_feature (13)..(407): NCBI GI: 189205911 Blast Desc: multisynthetase complex auxiliary component p43 [Pyrenophora tritici-repentis Pt-1C-BFP] gi|187975383|gb|EDU42009.1| multisynthetase complex auxiliary p43
  misc_feature: Useful for introducing or modulating the production of volatile compounds
MAALQAQKLSPTEETEVQQWTTTAERLKASPADTSILDSLNAHLTSRTTVLGTKPSTADVAIYESLAPTVKSWTAEQRTGQQGHPHIVRHLDFVQNSTLFDLKLADDAKFNVDHDEILYVKPPTDLKAEKERLKKEKAAAAAAAAGASAEGATATLVDRTKAAAAVVVEKAIEVKDAVAAAAGVGGETAKPKKEKKEKAPKQPKAPAVATPPAPHLIDLRVGHILKAIKHPEADSLYVSTIAMGDKPGTDDTEEYEGQVCRTVCSGLNGLVPLEEMQGRKVVVVANLKPVKMRGIKSCAMVLAASPKLKEGEVDNHAGPVELVTPPEGSTAGERVCFDGWRGEPEGVLNPKKKIWETFQPGFTTTDNFEVAFDGSVVKEAGKSEVGKLTTATGGTCTVKTLKGATVR

SEQ ID NO: 7798 - DNA, 1658 bp, Muscodor strobelii
  misc_feature: SGI EST ID NO. CUFF.19327.0
  misc_feature: Variant of the nucleotide sequence at SEQ ID NO 7796
tggaggatggggttactactgttcctaaatgagcacagctagtgacccggacccctgtcatcgggccttgcatcgagggaagtcatgatggatgggcaattgacatagtacatacccaaatcaaaaaaatccgaagacccctcctccactaccaaacaacattccacctcccgccccaaaccgccaagctgtctctccctcgcataattcgccctctggcaagaggcatcagcactcgatccttcaccatggccgctctccaagcccagaagctctcacccaccgaggaaaccgaagtccagcagtggaccaccaccgccgagcgcctgaaggcctctcctgccgatacttctatcctcgacagcctcaatgcccacctcacctctcgcaccaccgtccttggcaccaagccctctaccgccgatgtagccatctacgagtctctggcccctaccgtcaagtcatggaccgctgagcagcgcaccggccagcagggccacccgcacatcgtccgccatctcgacttcgtccagaactcgactctgttcgacctcaagctcgcagacgacgccaagttcaacgtcgaccacgacgaaatcctctacgtcaagcccccgaccgacctcaaggccgagaaggagcgtctaaagaaggagaaagctgccgcagctgcagccgcagccggcgccagtgctgaaggagctacagccacactcgtcgacaggaccaaagccgccgctgccgtcgtagtcgagaaagccatcgaagtcaaagacgccgtcgcagccgcagccggcgtcggcggcgaaacagccaagcccaagaaggagaagaaagagaaagcccccaaacaacccaaagcccccgccgtcgcgacgcctcccgcccctcacctcatcgacctacgcgtcggccacatccttaaggccatcaagcacccggaagccgactccctctacgtctccaccatcgccatgggcgacaagcccggcaccgacgacaccgaggagtacgagggacaagtctgccgcaccgtctgctcgggcctcaacggtctagtgccgctcgaggagatgcaaggccgtaaagtggtcgtcgtcgctaacctgaagcccgtcaagatgcgcggcatcaagtcctgcgccatggtcctggccgcatcgccaaagctcaaggaaggcgaggtagataaccacgcaggacccgtcgagcttgttacgccgcccgagggttccacagccggcgagcgtgtctgctttgatgggtggcggggtgagcctgagggtgtgctgaaccccaagaagaagatctgggagacgttccagcctggcttcacgactacggataatttcgaggtcgcttttgacggaagtgtggtcaaggaggctggcaaatctgaggttgggaagctcaccacggctaccggtgggacgtgtacggttaagacgctgaagggtgctacggtacgataaatagggtgtgttagaaaagagggcgggaatgagaaaccccaacacgaaactcccacagacactagatagatctctgcttggcctaggttaaagactgagctgccttgcagaaaataagaagatcctttggtttgggatcacaatcattgaatttttatgtgttagcgtatgaaaggcgagtaggaa

SEQ ID NO: 7799 - DNA, 609 bp, Muscodor strobelii
  misc_feature: SGI cDNA ID NO. 562372
  misc_feature: Encodes the peptide sequence at SEQ ID NO 7800
atgggttacaactactatggcgtgggatctctcacgtccttcctgaccgtggtcggtctgtatatgctgtttacgggcagtggcgaagctttcaacgtcggagcctttctcgagtccgtatcgccctacgcatgggccagcacaggaatagccctttgcatcggtctatctgtagtcggagcagcgtggggtatctttcttacaggctcctccatcctcggtgccggcgtcaaggctccgcgaatccgaaccaagaacttggtctccatcatcttctgtgaggtcgtcgccatctatggcgtcatcatggccatcatcttctcctccaaggtcggctggacaaacggcgaggttgtcgccgacggcaacagctactacaccggtttcgctctcttctgggctggcttgacagttggtggctgcaacttggtctgtggtatcgctgttggtatcaatggaagcggtgctgctcttgcagatgccgccgatgcgtcgctatttatcaagatcctggtcatcgaaatcttcagttctgtacttggtctctttggcctcatcatcggacttctagtccaagccaaggccctagagtttggtagcgatgtatag

SEQ ID NO: 7800 - protein, 202 aa, Muscodor strobelii
  misc_feature: SGI Peptide ID NO. 562372
  misc_feature (45)..(110): Pfam Id: PF00137 Pfam Desc: ATP synthase subunit C
  misc_feature (49)..(110): Pfam Id: PF00137 Pfam Desc: ATP synthase subunit C
  misc_feature (1)..(200): NCBI GI: 116195806 Blast Desc: conserved [Chaetomium globosum CBS 148.51] gi|88180414|gb|EAQ87882.1| conserved [Chaetomium globosum CBS 148.51]
  misc_feature (6)..(199): NCBI GI: 171690784 Blast Desc: protein product [Podospora anserina] gi|170945340|emb|CAP71452.1| protein product [Podospora anserina]
  misc_feature (6)..(201): NCBI GI: 85112994 Blast Desc: vacuolar ATP synthase 20 kDa proteolipid subunit [Neurospora crassa OR74A] gi|28926231|gb|EAA35213.1| vacuolar ATP synthase 20 kDa proteolipid subunit [Neurospora crassa OR74A]
  misc_feature (5)..(201): NCBI GI: 46121845 Blast Desc: FG05300.1 [Gibberella zeae PH-1]
  misc_feature (5)..(200): NCBI GI: 71002420 Blast Desc: V-ATPase proteolipid subunit Ppa1 [Aspergillus fumigatus Af293] gi|66853529|gb|EAL93853.1| V-ATPase proteolipid subunit Ppa1, [Aspergillus fumigatus Af293] V-ATPase proteolipid
  misc_feature (5)..(200): NCBI GI: 119481979 Blast Desc: V-ATPase proteolipid subunit Ppa1, [Neosartorya fischeri NRRL 181] gi|119409172|gb|EAW19121.1| V-ATPase proteolipid subunit Ppa1, [Neosartorya fischeri NRRL 181]
  misc_feature (6)..(198): NCBI GI: 156049597 Blast Desc: SS1G_08505 [Sclerotinia sclerotiorum 1980] gi|154692904|gb|EDN92642.1| SS1G_08505 [Sclerotinia sclerotiorum 1980]
  misc_feature (5)..(198): NCBI GI: 119191776 Blast Desc: CIMG_00265 [Coccidioides immitis RS]
  misc_feature (5)..(198): NCBI GI: 240106352 Blast Desc: Vacuolar ATP synthase 22 kDa proteolipid subunit, [Coccidioides posadasii C735 delta SOWgp]
  misc_feature (6)..(200): NCBI GI: 67901232 Blast Desc: AN7603.2 [Aspergillus nidulans FGSC A4] gi|40742993|gb|EAA62183.1| AN7603.2 [Aspergillus nidulans FGSC A4] gi|259483930|tpe|CBF79722.1| TPA: V-ATPase proteolipid Ppa1,
MGYNYYGVGSLTSFLTVVGLYMLFTGSGEAFNVGAFLESVSPYAWASTGIALCIGLSVVGAAWGIFLTGSSILGAGVKAPRIRTKNLVSIIFCEVVAIYGVIMAIIFSSKVGWTNGEVVADGNSYYTGFALFWAGLTVGGCNLVCGIAVGINGSGAALADAADASLFIKILVIEIFSSVLGLFGLIIGLLVQAKALEFGSDV

SEQ ID NO: 7801 - DNA, 1150 bp, Muscodor strobelii
  misc_feature: SGI EST ID NO. CUFF.19434.1
  misc_feature: Variant of the nucleotide sequence at SEQ ID NO 7799
gccacctttgcaaccgccaatccgaacctcgatctcaagccgcagcttgctcgttgaagcttcagaatagagcagcctaaataattccatcaacgccgaccacccatcgacgacatccacggacgaagctcaccacgagctgtctcaacctccgcttctactctccgaacacgaatatttccctccacatccctatcccactacaatctgttcacgaatctcgacgagcatgggttacaactactatggcgtgggatctctcacgtccttcctgaccgtggtcggtctgtatatgctgtttacgggcagtggcgaagctttcaacgtcggagcctttctcgagtccgtatcgccctacgcatgggccagcacaggaatagccctttgcatcggtctatctgtagtcggagcagcgtggggtatctttcttacaggctcctccatcctcggtgccggcgtcaaggctccgcgaatccgaaccaagaacttggtctccatcatcttctgtgaggtcgtcgccatctatggcgtcatcatggccatcatcttctcctccaaggtcggctggacaaacggcgaggttgtcgccgacggcaacagctactacaccggtttcgctctcttctgggctggcttgacagttggtggctgcaacttggtctgtggtatcgctgttggtatcaatggaagcggtgctgctcttgcagatgccgccgatgcgtcgctatttatcaagatcctggtcatcgaaatcttcagttctgtacttggtctctttggcctcatcatcggacttctagtccaagccaaggccctagagtttggtagcgatgtataggcaaccttcgatccaaagcatctggggtctcgcaccctgcaattgtcgttgtaaagaatattaggaaccatgcatttcaatcccggatagtttgttccaggattgtttggcgttcggaagaaaggactttgaaatccacattaatcgggagggtgttcgctccaaaaaaaaaatgcattacttgtgcattttagtgtggtactacagctacatcatgatcgtatagtgtattatacatagtgctccgtggaagaaagagctttccggcgggctcagatatttcgaaataaactttgataccttacacttctg

SEQ ID NO: 7802 - DNA, 1767 bp, Muscodor strobelii
  misc_feature: SGI cDNA ID NO. 562373
  misc_feature: Reduced expression when VOC is produced
  misc_feature: Encodes the peptide sequence at SEQ ID NO 7803
atgaattatacacgaaaacgtgcgctactagcatgtgacttctgtcgacaccgaaagcgaagatgcgatgggaagaacccgtgctccacctgtagagacagtaacgcagactgtgtctatcagcaactaccttttgaaagaatcgaagaaacgaaccctgctgcggtctttgatcgactgagtagaatcgaggcccttttagaacagcagagccgatctattcatcaactcaactcccagccaagccatagtccatatcccgctagcctctctgacgagttctcccgattcatgcccgttgacttgaacccatcattagagacaacacagttcctcatcccccaaaaccacgcgactgttgcgacaacgctgctatctatccctcaggtgcgcgatctcatcggaacgtattcaagggactactttattcgaattgaagagagactacctctgccacgactcctagatgacttccaagatggacctttagttttgccgaatctggatccagacagcttgaatgcactggcagacgattatttccagtatgctcatccccaccatcctcttttcacgagaaagatgctgggggaatggcaaaccgagttactagagcgacaagactcccgaagtatcaaaactgcgatctgtttatctgcttatgctcttgggaatatcaccacttgtcataccggggacgcaaaacgacccgagacgcttggtctcgaatatttccaaccagcattcaagatcataataaagactgtctttttgggattccagcccaacattgaatgctgtcaggccttattattggcagcatcatatctcgcatgtttgggaaggccacttcatagtttcagaatggtccatttcgcatcgcgaatatttctcagtcttgctgctagtcgtcaacgttacctcgccgatgacgaatatagcaacattgagcttcgtaccttctggcaatgttttatggcagagtgtgatggtattgccacagcagacaggtcccgtagcggcatagaaccactcgcagacagaatgccgttgccacaaagcttagaatcagccgatagccagaaccatgtctattcaatcgccgagcatgcaattcgacgacttctcaatcgaatcaatgtcacattgtatagtcccgaggacacgtaccgatacgcagctccacctccagacctcaattatacttggcaaggcctcagcattccgaaactgctttccctcagcgcagagctcaatcgccaactagaagaatggtatagctccattccagagtatctgagatttgaaaagggttcgggcactctgaccaacgatcgttgctgtatactgcgcatcagatattacaccgccaagcaattgatatatgggccattcgtgctccgcaaagtgtctgacagccgggaagaggacataacgccaccacaatccccaacacccggccttgaggcattagtcacggagaggtgcgagacgtgcatcgattcctgtgtggcatatctacggaacgcgggagacatgatggcgaaacgtacaccatatctgtggatattatcccaaaattgcctctcctgcatagtcatgctttggctggcatcgacatgtgcccctctacagcatttgataccgcacatgcaacctatccaggacatagtttgcgaaaagctacagacatgggcagtcgagggttctagtttcgaggctgagcttggaattttggaacaattcgtgttctcggatcccgagtag

SEQ ID NO: 7803 - protein, 588 aa, Muscodor strobelii
  misc_feature: SGI Peptide ID NO. 562373
  misc_feature (10)..(47): Pfam Id: PF00172 Pfam Desc: Fungal Zn(2)-Cys(6) binuclear cluster domain
  misc_feature (1)..(576): NCBI GI: 225677990 Blast Desc: conserved [Paracoccidioides brasiliensis Pb03]
  misc_feature (1)..(583): NCBI GI: 261196970 Blast Desc: conserved [Ajellomyces dermatitidis SLH14081] gi|239596133|gb|EEQ78714.1| conserved [Ajellomyces dermatitidis SLH14081]
  misc_feature (1)..(580): NCBI GI: 242792324 Blast Desc: C6 finger domain protein, [Talaromyces stipitatus ATCC 10500] gi|218718517|gb|EED17937.1| C6 finger domain protein, [Talaromyces stipitatus ATCC 10500]
  misc_feature (1)..(565): NCBI GI: 239609719 Blast Desc: conserved [Ajellomyces dermatitidis ER-3]
  misc_feature (1)..(525): NCBI GI: 116203071 Blast Desc: CHGG_09420 [Chaetomium globosum CBS 148.51] gi|88177938|gb|EAQ85406.1| CHGG_09420 [Chaetomium globosum CBS 148.51]
  misc_feature (28)..(583): NCBI GI: 154279674 Blast Desc: [Ajellomyces capsulatus NAm1] gi|150412593|gb|EDN07980.1| [Ajellomyces capsulatus NAm1]
  misc_feature (1)..(522): NCBI GI: 255953415 Blast Desc: Pc21g04140 [Penicillium chrysogenum Wisconsin 54-1255] gi|211589171|emb|CAP95311.1| Pc21g04140 [Penicillium chrysogenum Wisconsin 54-1255]
  misc_feature (51)..(585): NCBI GI: 226287259 Blast Desc: conserved [Paracoccidioides brasiliensis Pb18]
  misc_feature (1)..(525): NCBI GI: 255939334 Blast Desc: Pc16g00110 [Penicillium chrysogenum Wisconsin 54-1255] gi|211585059|emb|CAP92681.1| Pc16g00110 [Penicillium chrysogenum Wisconsin 54-1255]
  misc_feature (1)..(583): NCBI GI: 225562684 Blast Desc: conserved [Ajellomyces capsulatus G186AR]
  misc_feature: Useful for introducing or modulating the production of volatile compounds
MNYTRKRALLACDFCRHRKRRCDGKNPCSTCRDSNADCVYQQLPFERIEETNPAAVFDRLSRIEALLEQQSRSIHQLNSQPSHSPYPASLSDEFSRFMPVDLNPSLETTQFLIPQNHATVATTLLSIPQVRDLIGTYSRDYFIRIEERLPLPRLLDDFQDGPLVLPNLDPDSLNALADDYFQYAHPHHPLFTRKMLGEWQTELLERQDSRSIKTAICLSAYALGNITTCHTGDAKRPETLGLEYFQPAFKIIIKTVFLGFQPNIECCQALLLAASYLACLGRPLHSFRMVHFASRIFLSLAASRQRYLADDEYSNIELRTFWQCFMAECDGIATADRSRSGIEPLADRMPLPQSLESADSQNHVYSIAEHAIRRLLNRINVTLYSPEDTYRYAAPPPDLNYTWQGLSIPKLLSLSAELNRQLEEWYSSIPEYLRFEKGSGTLTNDRCCILRIRYYTAKQLIYGPFVLRKVSDSREEDITPPQSPTPGLEALVTERCETCIDSCVAYLRNAGDMMAKRTPYLWILSQNCLSCIVMLWLASTCAPLQHLIPHMQPIQDIVCEKLQTWAVEGSSFEAELGILEQFVFSDPE

SEQ ID NO: 7804 - DNA, 2077 bp, Muscodor strobelii
  misc_feature: SGI EST ID NO. CUFF.19352.0
  misc_feature: Variant of the nucleotide sequence at SEQ ID NO 7802
ggaagaacccgtgctccacctgtagagacagtaacgcagactgtgtctatcagcaactaccttttgaaagaatcgaagaaacgaaccctgctgcggtctttgatcgactgagtagaatcgaggcccttttagaacagcagagccgatctattcatcaactcaactcccagccaagccatagtccatatcccgctagcctctctgacgagttctcccgattcatgcccgttgacttgaacccatcattagagacaacacagttcctcatcccccaaaaccacgcgactgttgcgacaacgctgctatctatccctcaggtgcgcgatctcatcggaacgtattcaagggactactttattcgaattgaagagagactacctctgccacgactcctagatgacttccaagatggacctttagttttgccgaatctggatccagacagcttgaatgcactggcagacgattatttccagtatgctcatccccaccatcctcttttcacgagaaagatgctgggggaatggcaaaccgagttactagagcgacaagactcccgaagtatcaaaactgcgatctgtttatctgcttatgctcttgggaatatcaccacttgtcataccggggacgcaaaacgacccgagacgcttggtctcgaatatttccaaccagcattcaagatcataataaagactgtctttttgggattccagcccaacattgaatgctgtcaggccttattattggcagcatcatatctcgcatgtttgggaaggccacttcatagtttcagaatggtccatttcgcatcgcgaatatttctcagtcttgctgctagtcgtcaacgttacctcgccgatgacgaatatagcaacattgagcttcgtaccttctggcaatgttttatggcagagtgtgatggtattgccacagcagacaggtcccgtagcggcatagaaccactcgcagacagaatgccgttgccacaaagcttagaatcagccgatagccagaaccatgtctattcaatcgccgagcatgcaattcgacgacttctcaatcgaatcaatgtcacattgtatagtcccgaggacacgtaccgatacgcagctccacctccagacctcaattatacttggcaaggcctcagcattccgaaactgctttccctcagcgcagagctcaatcgccaactagaagaatggtatagctccattccagagtatctgagatttgaaaagggttcgggcactctgaccaacgatcgttgctgtatactgcgcatcagatattacaccgccaagcaattgatatatgggccattcgtgctccgcaaagtgtctgacagccgggaagaggacataacgccaccacaatccccaacacccggccttgaggcattagtcacggagaggtgcgagacgtgcatcgattcctgtgtggcatatctacggaacgcgggagacatgatggcgaaacgtacaccatatctgtggatattatcccaaaattgcctctcctgcatagtcatgctttggctggcatcgacatgtgcccctctacagcatttgataccgcacatgcaacctatccaggacatagtttgcgaaaagctacagacatgggcagtcgagggttctagtttcgaggctgagcttggaattttggaacaattcgtgttctcggatcccgagtagtctgctatcagcgatagcagatgccatcaggtacatcgatgcattgattgtatcgtgccagagtaaaatcatatccatagaatggaatagaaagctattgtcattttcatccgaactgcccgtagctgaagtcttcatgacgagatgatgtccggctaaggaagtaaatggtagcctgcaggcgccttaggtcagatatcgtcgctcactccgaatgcaatctcatccgattgagccgtttgttttctactctatcttcgtgaaaatgtctcgctgaaaatgtctcgcggacatagtgaactctgcatgcccgtagatctgtcgggggcggttcctcgcggtatcgcgcaatcaaggatcaccgacttggagttcagttg

SEQ ID NO: 7805 - DNA, 873 bp, Muscodor strobelii
  misc_feature: SGI cDNA ID NO. 562374
  misc_feature: Reduced expression when VOC is produced
  misc_feature: Encodes the peptide sequence at SEQ ID NO 7806
atgaagatcaacgctgctctcctcgctgctgttctcagcgcggcagccgaagctgggcttgtagctcgggacccttcgactatcagctaccttctaaacaacattcttactgctatgacaaacgcagatgctcagcttctggcgtttcatggggggccatctgtcgcttttcatgaggctgccaaagaactatacaagacaatctcagagagtaccccaatctcgcgagagatggagcccctgaacgataaagatgtccagactatcggtcctacatctcaccaattaaccgaggcgggcaccaagtttttgaatgatctcattgcagccgttccagtgtttgagcaggctggactttgcgagtacatgttcgaatattccatttaccttggccaagttagtgatgacttcttcatcaccaccaagggtaaattcccggccgaccatcaagacgaggctcagaaggagatcaccggcaccgaacaattgttcatcaaagtacagacagctcttgcccccggttcctgcgacaataaacagcagcacgagcttcctgatgctggtgacgataaggctgagccgtggcgaaagctctgccctcccggtcagaaacccggtggcggcgaacggggctccactcatcctactggtgcatcatctgctccatataacgtcccaacaggtatccattcgcctccgggtggacatggaggacacggaggacagggcggacacgaaggacacggtggtgctcccggtggcggtgccggtcaccatggtcctcctacaccggtccaccatgctggtgccgcaaccctcggcttctctagcgtcgccctagcgggagctttggctaccttcttcatgctatag

SEQ ID NO: 7806 - protein, 290 aa, Muscodor strobelii
  misc_feature: SGI Peptide ID NO. 562374
  misc_feature (21)..(185): NCBI GI: 39960750 Blast Desc: MGG_09460 [Magnaporthe grisea 70-15] gi|145010953|gb|EDJ95609.1| MGG_09460 [Magnaporthe grisea 70-15]
  misc_feature: Useful for introducing or modulating the production of volatile compounds
MKINAALLAAVLSAAAEAGLVARDPSTISYLLNNILTAMTNADAQLLAFHGGPSVAFHEAAKELYKTISESTPISREMEPLNDKDVQTIGPTSHQLTEAGTKFLNDLIAAVPVFEQAGLCEYMFEYSIYLGQVSDDFFITTKGKFPADHQDEAQKEITGTEQLFIKVQTALAPGSCDNKQQHELPDAGDDKAEPWRKLCPPGQKPGGGERGSTHPTGASSAPYNVPTGIHSPPGGHGGHGGQGGHEGHGGAPGGGAGHHGPPTPVHHAGAATLGFSSVALAGALATFFML

SEQ ID NO: 7807 - DNA, 2196 bp, Muscodor strobelii
  misc_feature: SGI EST ID NO. CUFF.19358.0
  misc_feature: Variant of the nucleotide sequence at SEQ ID NO 7805
aagactgtcaagagtccatcttccctgaccagtgacaagacatttcaagataaacaatatctcagttgtaactcaaagcggctaccatgaagatcaacgctgctctcctcgctgctgttctcagcgcggcagccgaagctgggcttgtagctcgggacccttcgactatcagctaccttctaaacaacattcttactgctatgacaaacgcagatgctcagcttctggcgtttcatggggggccatctgtcgcttttcatgaggctgccaaagaactatacaagacaatctcagagagtaccccaatctcgcgagagatggagcccctgaacgataaagatgtccagactatcggtcctacatctcaccaattaaccgaggcgggcaccaagtttttgaatgatctcattgcagccgttccagtgtttgagcaggctggactttgcgagtacatgttcgaatattccatttaccttggccaagttagtgatgacttcttcatcaccaccaagggtaaattcccggccgaccatcaagacgaggctcagaaggagatcaccggcaccgaacaattgttcatcaaagtacagacagctcttgcccccggttcctgcgacaataaacagcagcacgagcttcctgatgctggtgacgataaggctgagccgtggcgaaagctctgccctcccggtcagaaacccggtggcggcgaacggggctccactcatcctactggtgcatcatctgctccatataacgtcccaacaggtatccattcgcctccgggtggacatggaggacacggaggacagggcggacacgaaggacacggtggtgctcccggtggcggtgccggtcaccatggtcctcctacaccggtccaccatgctggtgccgcaaccctcggcttctctagcgtcgccctagcgggagctttggctaccttcttcatgctatagtggaaatggagcgtatcgtgcaatcatcggctggttctgagtttgattaggttcatgtcggccaatctgtttagaaatgaagagaaaatcaatataatggtacgggaacgataaaggtaaaaaaaaaggcaaaagaaaggaaataataccaaaatgcaagacagcagataatatagataatatagttcgtagatgaaaagagcaatataataattaaaagcaacctctgcagtgttttattactcctcctactagacttttcgtggggtcatcatcacgcttcgaatacatcttattcgcaacagaatgtggaaacaaccatcccgagcgttacctacgcgtttcgaccaccattaatttgtccttcgtcgattgcgaactctgtaccattgcgaatcacgatctagtgaccaatatggtgttggaaacccgtcttactatcgggtcgctcaaacgaacttagatatgaatactgatgaaagcggccaaaacgcattcgttattttcactggtccgccagtgccaattgctgcttgtcaaatataagttcgacgcgtcctctttgcatgtaaagcaagctgtttgagaatgttggttctggctggtcaagacaacatcaaacaattggccaaattcgtatcgtcaggatggcaatctgaatagaacaatgactaaggtatgcttcctaggagcaccagaattagcgcgcgcattaggttttgataccttatccagatgaccatgcacgatgttcagtgacaatgtttttgttggtaatgacgccgactgtagtaaactcaggcgtgagccgcagatcagatgctcagctgagtggagcgcatggtgaagtgctgttcgagcccttgcagctatgaaaaccgagatgtacgtcttccatgttaacagagtatatcgtttttgcggcagctaatgtcaggtgcagaataaatatctcatgatgatggttttcatgatagacgaattagttttgcctcttctgttgtttaacttctcaacccgatgagcatcgccatgtgaatgggaatatgacgtctttgtataaatgggcccatacgatgaccaatgctgaatattcggggaagtagccaagaactgtgactaagatgccacgatagttcccattcccgtacagatccacagcttcaactaatatgaacatacctattgtggtaggtaataacaagtgtatgtgattcgtagatttagtcgttctaga

SEQ ID NO: 7808 - DNA, 891 bp, Muscodor strobelii
  misc_feature: SGI cDNA ID NO. 562375
  misc_feature: Encodes the peptide sequence at SEQ ID NO 7809
atgctatttcgaatcttaccgaccgtcatggtcgtggctgttgcaagccaaacagtggcagaaggaatatacaagccgcgccagcctctccttgcgcgaatgtctactgccaacgagacgctgacctgtattttatcaagaaacttactggggctggaattacgcgcgctcgacgaaggttactcaccaggagaagagctttgtggtgacggtgacacatgcgcagaagcttgcgggacgggattcaagcaatgtgcatcgacagatagcatgacccattgctacaatcccggcgcaaagcaacaatgctgccctggtggcacgggagacgcctgcgacggcggcttcttttgctctgccgacgagcaaggcacgacttggtgttgtcccgacggcctatcgttgaaggaatgcgccaaaaaatacggactgcccggaccgctcacgtcagagggaccaacaacatcgactacgacgactaaactcacatcgacgaagaagacgtcaacgaccgaaaatgccgaaacgaccacgcatactacaaaacacaagtcgaccaaaacaacagacgcttcaacacacagcgtcgctgaagaaaccgcatcgacatcgtccaagaaaacaaccaagatacgcccagcgtccgataagacgacaagcgtgtccagcaccgaatcagcatcgccaacatcaaacgcggatgtttcaaccacccaggcacccacaactagcgctgcttcgacgacggtcagtacgacagaagccgcacctgcatcaacgtcttctggatcgacctcagcttcccaaggcggcagcggtgcctcggcgactcaagacgttaggctcctgatcgccggggctgccggtgcattcgcggcggccattctttaa

SEQ ID NO: 7809 - protein, 296 aa, Muscodor strobelii
  misc_feature: SGI Peptide ID NO. 562375
  misc_feature (50)..(230): NCBI GI: 261352428 Blast Desc: conserved [Verticillium albo-atrum VaMs.102]
  misc_feature (47)..(151): NCBI GI: 85090011 Blast Desc: NCU09929 [Neurospora crassa OR74A] gi|7801110|emb|CAB91338.1| conserved [Neurospora crassa] gi|28919552|gb|EAA28979.1| [Neurospora crassa OR74A]
  misc_feature (1)..(292): NCBI GI: 256726929 Blast Desc: NECHADRAFT_76408 [Nectria haematococca mpVI 77-13-4]
  misc_feature (1)..(151): NCBI GI: 171683329 Blast Desc: protein product [Podospora anserina] gi|170941624|emb|CAP67278.1| protein product [Podospora anserina]
  misc_feature (1)..(144): NCBI GI: 46136405 Blast Desc: FG09718.1 [Gibberella zeae PH-1]
  misc_feature (60)..(155): NCBI GI: 156062948 Blast Desc: SS1G_01590 [Sclerotinia sclerotiorum 1980] gi|154696926|gb|EDN96664.1| SS1G_01590 [Sclerotinia sclerotiorum 1980]
  misc_feature (46)..(153): NCBI GI: 154319063 Blast Desc: BC1G_02483 [Botryotinia fuckeliana B05.10] gi|150856914|gb|EDN32106.1| BC1G_02483 [Botryotinia fuckeliana B05.10]
  misc_feature (52)..(161): NCBI GI: 39951603 Blast Desc: [Magnaporthe grisea 70-15] gi|145020722|gb|EDK04851.1| [Magnaporthe grisea 70-15]
  misc_feature (46)..(132): NCBI GI: 116194604 Blast Desc: CHGG_03900 [Chaetomium globosum CBS 148.51] gi|88179813|gb|EAQ87281.1| CHGG_03900 [Chaetomium globosum CBS 148.51]
  misc_feature (51)..(160): NCBI GI: 171688074 Blast Desc: protein product [Podospora anserina] gi|170943999|emb|CAP70109.1| protein product [Podospora anserina]
MLFRILPTVMVVAVASQTVAEGIYKPRQPLLARMSTANETLTCILSRNLLGLELRALDEGYSPGEELCGDGDTCAEACGTGFKQCASTDSMTHCYNPGAKQQCCPGGTGDACDGGFFCSADEQGTTWCCPDGLSLKECAKKYGLPGPLTSEGPTTSTTTTKLTSTKKTSTTENAETTTHTTKHKSTKTTDASTHSVAEETASTSSKKTTKIRPASDKTTSVSSTESASPTSNADVSTTQAPTTSAASTTVSTTEAAPASTSSGSTSASQGGSGASATQDVRLLIAGAAGAFAAAIL

SEQ ID NO: 7810 - DNA, 3090 bp, Muscodor strobelii
  misc_feature: SGI cDNA ID NO. 562376
  misc_feature: Reduced expression when VOC is produced
  misc_feature: Encodes the peptide sequence at SEQ ID NO 7811
atgaacggcctcagcccaacctcgaggtccaagcggaagatgggtccgtcgtccgccgacgagcgtccccttaagcagttccgccacggcccgaacggcaagatctcaccgggtgaaaacacgccggacgtggagctctcggcattcttgcccaagggcggcgatctcgaggacgaggaagcccctgtcttctaccagccccagcccgccgacactgctgagtggcaagccaccatcgagaacgtcgtgcgagctgtcgtctccatccgcttctgccagacctgttcgttcgacaccgatgccgcatgtgccagcgaggcgactggatttgtggtcgacgctgagagggggctgatcgtcacgaatcgacacgtcgttggtgctggccccttcacgggctacgtcgtcttcgataatcacgaagaggtcgatgcctaccccgtctaccgcgaccctgtgcacgactttggcattctccgattcgaccccaaagcgatcaagtacatgcccgtgacggccttgcctctacgcccagacctcgcaaaagtgggtgtcgaaatcagggttgtcggaaacgatgcaggcgagaagctcagtattctttccggcgtcatcagtcgtctcgaccgcaacgcgccagaatacggggagggctacagcgatttcaacacctgttactaccaagctaatgcggctgccagcggtggtagttccggaagtccagtcgtcaacatcgatggccatgccattgctctgcaggctggtggtcgatccgatggtgcatcgacggactacttcctccccttagatcgccctctccgagcgctgcgctgtatacaagaaggccggtccatagaacgaggtactatacaatgccagtttcttttcaagcccttcgacgaatgtcgtcgcctgggccttactcagaactgggaagctgctgcacgagcagctttccccaaagcaactaatatgcttgttgctgagatcgttcttcccgatggtccctcgtattcgaagatcgaggaaggtgacgttctgttgaaagtgaacggcgaaatgatcgctgagttcattcgactggacgatattctggattccagcgtcggcaacactgtccgcatcactctccagcgaggaggtgaagacgtcgaggtcgatgtggaagtcggcaaccttcacgacatcactcctgaccgctttgtcactgttgctggaggtagcttccacgatctttcataccaacaagcacggctgtacggcgtggcttgcaagggtggtggtgtttatgtttgcgagtcatccgggtcattccgagtagactctgccgatagtggatggatgatccagagcgttgaccagaagaagacccctgacctcaagacttttattgaagtgatgaagcaaataccagataaggcgcgcgttgtggtcacgtacaaacacctgcgtgatctgcatacgctgaacacagcgattctaaatgtcgacaggcactggtccacaaaaatgcgactggccatacgaaacgacacgacgggattatgggattttgaagacattggcgaaccgcttccgccggagccacctgtccctaggaaggcagccttcattcaattggagcatactgctcaccctgccgttgctgatctggtacgcagttttgttagagtcacctgcgtcttacctttgaagctggacggtttcccgcgcaaccgaaaatggggtatgggcctgatcatcgacgcggacaagggtctcgtagtgatttcaagagctgttgtgccttacgatctgtgcgatatttggattaccattgcagactccgtcctcgtccagggcaaagtcgtgttccttcaccctctgcagaattatgccatcgtgcaatatgatgctagtctcgtccaagcgccagtattgagcgcaaagctgagtaccgacaatataacacaaggtgcatctaccacattcattggtttcaatcgcagtgggcgaattgtacatgctgcaacgacggtgactgaagtcactgctgtgtccattcctgctaactccggggcaccgcggtaccgcgctactaatgttgatgccataaccgtcgatactagcctgagccaacagtgcgggagcggtgtccttgtggatggagaaggcagtgttcaagctctctggcttacttaccttggtgagagggtacatggctctagagatgaggagtaccaccttggtctagccactcctaccctgctttccgttctttcgcagattcagcaagggaatataccaaaattaagaatgttgtccatggaattccgccccattgccatgtctcaagcacgcatcatgggagtgtcggaagactggatccataaggttgcggaggcaaacaagcatagccatcaccttttcatggtttcaaagcgaacctttgagcgtgggtctcatccaagcgtgcttatggaaggcgatatcatcctgactctaaatggcaacatgatcacacgggtatcggaacttgatgtgatgtattcacaagaagtccttgacgctgtgattgtacgagagagcgaagagatacatctccaagttccgacggtatctgcggatgacgtcgaaactgatcaagccatctcattctgcggtgccattctacatgttcctcacctggcggtacggcaacagatcagcaaactacatagcgaagtctacgtctcggctaggagtcgtggctcgccagcttatcaatatggcctcgcacctactaatttcattacacacgtcaacggcaagcccactccggacttgaaaactttccttgaggctgttgtcaagattcccgataacacttacttccgtctccgagctatgacgttcgacaatgtcccatgggttgttactatgaaaaagaacgagcattactttcccactatggaatggattaaagacggctcggaaccgtgcggctggaaacgtatcacttatgaaagtgatggccgtgctgttgagggggagcccactgatggaatggtgcctgtttctgccgaagataatggggacatagctcttgatgacgccgatggtgccatatga

SEQ ID NO: 7811 - protein, 1029 aa, Muscodor strobelii
  misc_feature: SGI Peptide ID NO. 562376
  misc_feature (1)..(1024): NCBI GI: 145613179 Blast Desc: MGG_01824 [Magnaporthe grisea 70-15] gi|189042277|sp|A4RJH4.1|NM111_MAGGR RecName: Full=Pro-apoptotic serine protease NMA111 gi|145020316|gb|EDK04445.1| MGG_01824
  misc_feature (1)..(1015): NCBI GI: 116194428 Blast Desc: conserved [Chaetomium globosum CBS 148.51] gi|121784558|sp|Q2H334.1|NM111_CHAGB RecName: Full=Pro-apoptotic serine protease NMA111 gi|88179725|gb|EAQ87193.1| conserved CBS
  misc_feature (1)..(1016): NCBI GI: 46121433 Blast Desc: FG05095.1 [Gibberella zeae PH-1]
  misc_feature (1)..(1012): NCBI GI: 171683617 Blast Desc: protein product [Podospora anserina] gi|170941768|emb|CAP67422.1| protein product [Podospora anserina]
  misc_feature (1)..(1009): NCBI GI: 85106524 Blast Desc: NCU05200 [Neurospora crassa OR74A] gi|74616864|sp|Q7S9D2.1|NM111_NEUCR RecName: Full=Pro-apoptotic serine protease nma-111 gi|28923798|gb|EAA32963.1| NCU05200
  misc_feature (16)..(1016): NCBI GI: 256726904 Blast Desc: [Nectria haematococca mpVI 77-13-4]
  misc_feature (1)..(1024): NCBI GI: 159130305 Blast Desc: nuclear serine protease HtrA2/Nma111, [Aspergillus fumigatus A1163]
  misc_feature (1)..(1024): NCBI GI: 119473113 Blast Desc: nuclear serine protease HtrA2/Nma111, [Neosartorya fischeri NRRL 181] gi|119406655|gb|EAW16606.1| nuclear serine protease HtrA2/Nma111, [Neosartorya fischeri NRRL 181]
  misc_feature (1)..(1024): NCBI GI: 70992785 Blast Desc: nuclear serine protease HtrA2/Nma111 [Aspergillus fumigatus Af293] gi|74670362|sp|Q4WLG1.1|NM111_ASPFU RecName: Full=Pro-apoptotic serine protease nma111 nuclear serine protease
  misc_feature (1)..(1024): NCBI GI: 206557945 Blast Desc: nuclear serine protease HtrA2/Nma111 [Aspergillus fumigatus Af293] gi|74670362|sp|Q4WLG1.1|NM111_ASPFU RecName: Full=Pro-apoptotic serine protease nma111 nuclear serine protease
  misc_feature: Useful for introducing or modulating the production of volatile compounds
MNGLSPTSRSKRKMGPSSADERPLKQFRHGPNGKISPGENTPDVELSAFLPKGGDLEDEEAPVFYQPQPADTAEWQATIENVVRAVVSIRFCQTCSFDTDAACASEATGFVVDAERGLIVTNRHVVGAGPFTGYVVFDNHEEVDAYPVYRDPVHDFGILRFDPKAIKYMPVTALPLRPDLAKVGVEIRVVGNDAGEKLSILSGVISRLDRNAPEYGEGYSDFNTCYYQANAAASGGSSGSPVVNIDGHAIALQAGGRSDGASTDYFLPLDRPLRALRCIQEGRSIERGTIQCQFLFKPFDECRRLGLTQNWEAAARAAFPKATNMLVAEIVLPDGPSYSKIEEGDVLLKVNGEMIAEFIRLDDILDSSVGNTVRITLQRGGEDVEVDVEVGNLHDITPDRFVTVAGGSFHDLSYQQARLYGVACKGGGVYVCESSGSFRVDSADSGWMIQSVDQKKTPDLKTFIEVMKQIPDKARVVVTYKHLRDLHTLNTAILNVDRHWSTKMRLAIRNDTTGLWDFEDIGEPLPPEPPVPRKAAFIQLEHTAHPAVADLVRSFVRVTCVLPLKLDGFPRNRKWGMGLIIDADKGLVVISRAVVPYDLCDIWITIADSVLVQGKVVFLHPLQNYAIVQYDASLVQAPVLSAKLSTDNITQGASTTFIGFNRSGRIVHAATTVTEVTAVSIPANSGAPRYRATNVDAITVDTSLSQQCGSGVLVDGEGSVQALWLTYLGERVHGSRDEEYHLGLATPTLLSVLSQIQQGNIPKLRMLSMEFRPIAMSQARIMGVSEDWIHKVAEANKHSHHLFMVSKRTFERGSHPSVLMEGDIILTLNGNMITRVSELDVMYSQEVLDAVIVRESEEIHLQVPTVSADDVETDQAISFCGAILHVPHLAVRQQISKLHSEVYVSARSRGSPAYQYGLAPTNFITHVNGKPTPDLKTFLEAVVKIPDNTYFRLRAMTFDNVPWVVTMKKNEHYFPTMEWIKDGSEPCGWKRITYESDGRAVEGEPTDGMVPVSAEDNGDIALDDADGAI

SEQ ID NO: 7812 - DNA, 4018 bp, Muscodor strobelii
  misc_feature: SGI EST ID NO. CUFF.19551.1
  misc_feature: Variant of the nucleotide sequence at SEQ ID NO 7810
aaggcttcgaaatattgtgatttgatgttgcccgttgctacctttgttctcgttggtgttcgtctcgttgctccctccgtgacattcctcccctccccccgccatcaaccttccgggcccagcgacatgccagcagcgtcctgaacgacctcggctctcattccaaggcgttcctcgccattcgatgctgacatcgctcggtgacccgcgaccgcaggacccgagtccagtgaacactgtgcttgtccttccctccacgtgtgtcttttcgtcccgtgtctctggtgctggatgaggtcgctcgtttctgctcttcgagctctgcgccatcgacgtctatcagtacttgctcgtggaccgcaacgacgatcactactcctcgcacccgtcgccgtctccccgttcgctataagcctgaagtcggctgcagctcctcgccgctcacggttcttcaccactgcatctggttgcctccagacttcatctgctgctgctgctgctgcatccgccgccatgaacggcctcagcccaacctcgaggtccaagcggaagatgggtccgtcgtccgccgacgagcgtccccttaagcagttccgccacggcccgaacggcaagatctcaccgggtgaaaacacgccggacgtggagctctcggcattcttgcccaagggcggcgatctcgaggacgaggaagcccctgtcttctaccagccccagcccgccgacactgctgagtggcaagccaccatcgagaacgtcgtgcgagctgtcgtctccatccgcttctgccagacctgttcgttcgacaccgatgccgcatgtgccagcgaggcgactggatttgtggtcgacgctgagagggggctgatcgtcacgaatcgacacgtcgttggtgctggccccttcacgggctacgtcgtcttcgataatcacgaagaggtcgatgcctaccccgtctaccgcgaccctgtgcacgactttggcattctccgattcgaccccaaagcgatcaagtacatgcccgtgacggccttgcctctacgcccagacctcgcaaaagtgggtgtcgaaatcagggttgtcggaaacgatgcaggcgagaagctcagtattctttccggcgtcatcagtcgtctcgaccgcaacgcgccagaatacggggagggctacagcgatttcaacacctgttactaccaagctaatgcggctgccagcggtggtagttccggaagtccagtcgtcaacatcgatggccatgccattgctctgcaggctggtggtcgatccgatggtgcatcgacggactacttcctccccttagatcgccctctccgagcgctgcgctgtatacaagaaggccggtccatagaacgaggtactatacaatgccagtttcttttcaagcccttcgacgaatgtcgtcgcctgggccttactcagaactgggaagctgctgcacgagcagctttccccaaagcaactaatatgcttgttgctgagatcgttcttcccgatggtccctcgtattcgaagatcgaggaaggtgacgttctgttgaaagtgaacggcgaaatgatcgctgagttcattcgactggacgatattctggattccagcgtcggcaacactgtccgcatcactctccagcgaggaggtgaagacgtcgaggtcgatgtggaagtcggcaaccttcacgacatcactcctgaccgctttgtcactgttgctggaggtagcttccacgatctttcataccaacaagcacggctgtacggcgtggcttgcaagggtggtggtgtttatgtttgcgagtcatccgggtcattccgagtagactctgccgatagtggatggatgatccagagcgttgaccagaagaagacccctgacctcaagacttttattgaagtgatgaagcaaataccagataaggcgcgcgttgtggtcacgtacaaacacctgcgtgatctgcatacgctgaacacagcgattctaaatgtcgacaggcactggtccacaaaaatgcgactggccatacgaaacgacacgacgggattatgggattttgaagacattggcgaaccgcttccgccggagccacctgtccctaggaaggcagccttcattcaattggagcatactgctcaccctgccgttgctgatctggtacgcagttttgttagagtcacctgcgtcttacctttgaagctggacggtttcccgcgcaaccgaaaatggggtatgggcctgatcatcgacgcggacaagggtctcgtagtgatttcaagagctgttgtgccttacgatctgtgcgatatttggattaccattgcagactccgtcctcgtccagggcaaagtcgtgttccttcaccctctgcagaattatgccatcgtgcaatatgatgctagtctcgtccaagcgccagtattgagcgcaaagctgagtaccgacaatataacacaaggtgcatctaccacattcattggtttcaatcgcagtgggcgaattgtacatgctgcaacgacggtgactgaagtcactgctgtgtccattcctgctaactccggggcaccgcggtaccgcgctactaatgttgatgccataaccgtcgatactagcctgagccaacagtgcgggagcggtgtccttgtggatggagaaggcagtgttcaagctctctggcttacttaccttggtgagagggtacatggctctagagatgaggagtaccaccttggtctagccactcctaccctgctttccgttctttcgcagattcagcaagggaatataccaaaattaagaatgttgtccatggaattccgccccattgccatgtctcaagcacgcatcatgggagtgtcggaagactggatccataaggttgcggaggcaaacaagcatagccatcaccttttcatggtttcaaagcgaacctttgagcgtgggtctcatccaagcgtgcttatggaaggcgatatcatcctgactctaaatggcaacatgatcacacgggtatcggaacttgatgtgatgtattcacaagaagtccttgacgctgtgattgtacgagagagcgaagagatacatctccaagttccgacggtatctgcggatgacgtcgaaactgatcaagccatctcattctgcggtgccattctacatgttcctcacctggcggtacggcaacagatcagcaaactacatagcgaagtctacgtctcggctaggagtcgtggctcgccagcttatcaatatggcctcgcacctactaatttcattacacacgtcaacggcaagcccactccggacttgaaaactttccttgaggctgttgtcaagattcccgataacacttacttccgtctccgagctatgacgttcgacaatgtcccatgggttgttactatgaaaaagaacgagcattactttcccactatggaatggattaaagacggctcggaaccgtgcggctggaaacgtatcacttatgaaagtgatggccgtgctgttgagggggagcccactgatggaatggtgcctgtttctgccgaagataatggggacatagctcttgatgacgccgatggtgccatatgaagaacttatatgttcaatatcgttcctcggcaaggcatggctcgttagcaatcgtgtatgttgtatcaccttgtctttgtacatatctcgttcctagaattgcgattgccgcatgtactatataggaaggtttcagcggacattatgtcctggccgcgtggctagaaacaccaaagttccgaatcccctggggagagggcgagaacaggtctgtaagagcagtgttatgtagaataggagtggcaggagctccaacctcaagtgcttgatgggaaataactatagctaccagcaattagacattgtgtgatgccacgctgtagacatcccacatgacgcaaagccgagtcagaggttgtcgattttccttagtatttctattgatcattccaatactccattggcaatgctgctg

SEQ ID NO: 7813 - DNA, 432 bp, Muscodor strobelii
  misc_feature: SGI cDNA ID NO. 562377
  misc_feature: Encodes the peptide sequence at SEQ ID NO 7814
atggctgacaacgcttccaacaccggcgagagtagcaaggtcaagtggaccgaggaggagaagtcctcggtacagaacaagctcctcgtccagatcgtcggccaattccttgccagtggcgccaaaccggacctcgcggtaatcaacctcccaggccgttctatccgaagtattcgccacgtcctggagcaggtgaagaaggatgcggctctccttcttggcactgctgccgcagtcaccactcccgccaagggcaaagctaaaggtgcgggcagcaagcgcaaggccgccgattctgaggacgatactgagggtgacgatgtcaagaccccgatgaagtcccctgctaagcgcgctcgaaagacgcccgctaagcccaagaaggccgcagtcaagaaggaggagtatgatgacgacgatggcgaggcctaa

SEQ ID NO: 7814 - protein, 143 aa, Muscodor strobelii
  misc_feature: SGI Peptide ID NO. 562377
MADNASNTGESSKVKWTEEEKSSVQNKLLVQIVGQFLASGAKPDLAVINLPGRSIRSIRHVLEQVKKDAALLLGTAAAVTTPAKGKAKGAGSKRKAADSEDDTEGDDVKTPMKSPAKRARKTPAKPKKAAVKKEEYDDDDGEA

SEQ ID NO: 7815 - DNA, 2187 bp, Muscodor strobelii
  misc_feature: SGI cDNA ID NO. 562378
  misc_feature: Encodes the peptide sequence at SEQ ID NO 7816
atgtcacaacccatggaaattgacgagccaagaggcactaagcgaaaacaaccttcgccctcatcacctgaagagagcgcccctcgccgcattcagcccctggacccagatgtcgtgaataaaattgctgctggagaaatcatcgttgctcctgtccatgctctcaaggagctcatcgaaaatgccgttgatgctgggtcttcctcgcttgaagtcctgataaaagagggcggtttgaagctgctgcagatcacagataatggtcacgggatcgataaagaagacctcccgattctgtgcgaaagattcaccacttcgaaacttcaaagttttgaagatctaagcaacatctccacgtatggctttcgtggtgaagctctggctagtatcagtcacatagctcatttgacagtgacaaccaagactaaggactcaagctgcgcttggcgtgcgtgttacaatagcgggaagctttcgcctgccaaacctggccagtcacctgagcctaaaccaactgcagggcgaggaggaacccagatatcagttgaggatctattttataacgttccaacaagacgcaaagcatttcgctccgcttctgacgaatacaacaagatcattgacatggtggggcgatatgccatccattgcgccggcgtcgctttttcttgtaaaaagcatggcgattctggaacatctattgctattcagtcgcaagcctcaactctcgatcgtattcgccagattcatggcggcagcgtagcgaatgagttgatccagttttcggctgcggacgatcgatggggtttccgagcctcgggatgggccactaatgcaaattaccacgtgaagaaagtcactatgttgttgttcatcaacaaccgcagtgtggagtcctccaatatcaagaaggccattgaacagacatactctgccttcttaccaaaaggcagccacccattcgtctatttaagtctcgatgtcgaccctcagcgcgtggacgtcaatgttcaccccactaaacgggaagtgaatttcctcaacgaggacgagatcatccaggttatctgcgaagctcttcgcgggaagcttgcagaagttgacaccagccgaacattcatgacccaaacgctactccctggcacacttataccaaatattaccccacagcaagataccgaagattcttcggccaaggccccctcgacagtccgcaagactacgcgtccctacgagaacaatctagtgcggactgatgcatcacttcgtaagatcacgagcatgttcccgacagcttctaaatcagcagccccaggtgcaacgtctgaaggcattgtagcagacacaaatcaaatgcccgagtacgatatcacagatcgcgaagcagtttattgtcgcctgaacagtgtacgcgaacttcggactgctgtaagagacgatatgcaccatgagctcacggagacatttgccaaccacgcgttcgttggcattgtagacgaaaaacgtcgactcgcagctattcagggcggtgttaaactcttccttatagattatggtcgagcttgtttcgaatacttctaccaagtaggtttaacggatttcggcaactttggaacaatcaagttccaaccagctctcaatatacgtgaagttctcagcattgcagcagagaaagaaaaacaggccgatgctgatggagtgttggctgacgatgatgattttgatgtgaatgaggtggtggacaaggtggcagagcagttgatcgagaggagagaaatgcttcttgagtatttcagctttgagatttcaccatcgggggaacttctgagtatcccattgctgctaaaaggctacacaccctctatggcaaagctgcctcagtttcttcttcgactcggaccatacgtaaattggacggatgaaaagttgtgtttcgaatcatttttgaaggaactcgctacattttatgtccctgagcagctgccatcgctcccgggaagtgaccagatcgaagaagacgtgtccgacgagatcaaagccagaagagcactggttcgtcacgctgtggagcatatattctttccagcattcaaagcgaggcttgtggctacgaagtcactcatgaaaggtggcgtcctggagttagccaatttgaagggcctgtatagagtctttgagagatgttag

SEQ ID NO: 7816 - protein, 728 aa, Muscodor strobelii
  misc_feature: SGI Peptide ID NO. 562378
  misc_feature (251)..(365): Pfam Id: PF01119 Pfam Desc: DNA mismatch repair protein, C-terminal domain
  misc_feature (46)..(187): Pfam Id: PF02518 Pfam Desc: Histidine kinase-, DNA gyrase B-, and HSP90-like ATPase
  misc_feature (46)..(183): Pfam Id: PF02518 Pfam Desc: Histidine kinase-, DNA gyrase B-, and HSP90-like ATPase
  misc_feature (1)..(728): NCBI GI: 85108177 Blast Desc: NCU08309 [Neurospora crassa OR74A] gi|28924130|gb|EAA33286.1| NCU08309 [Neurospora crassa OR74A]
  misc_feature (1)..(728): NCBI GI: 219963259 Blast Desc: MutL-like protein [Sordaria macrospora]
  misc_feature (10)..(728): NCBI GI: 46136425 Blast Desc: FG09728.1 [Gibberella zeae PH-1]
  misc_feature (32)..(728): NCBI GI: 256726935 Blast Desc: [Nectria haematococca mpVI 77-13-4]
  misc_feature (1)..(728): NCBI GI: 156049801 Blast Desc: SS1G_08608 [Sclerotinia sclerotiorum 1980] gi|154693006|gb|EDN92744.1| SS1G_08608 [Sclerotinia sclerotiorum 1980]
  misc_feature (1)..(728): NCBI GI: 115387545 Blast Desc: conserved [Aspergillus terreus NIH2624] gi|114195362|gb|EAU37062.1| conserved [Aspergillus terreus NIH2624]
  misc_feature (1)..(728): NCBI GI: 169611282 Blast Desc: SNOG_08751 [Phaeosphaeria nodorum SN15] gi|111062799|gb|EAT83919.1| SNOG_08751 [Phaeosphaeria nodorum SN15]
  misc_feature (5)..(728): NCBI GI: 121713708 Blast Desc: DNA mismatch repair protein Mlh1, [Aspergillus clavatus NRRL 1] gi|119402618|gb|EAW13039.1| DNA mismatch repair protein Mlh1, [Aspergillus clavatus NRRL 1]
  misc_feature (1)..(728): NCBI GI: 171690550 Blast Desc: protein product [Podospora anserina] gi|170945223|emb|CAP71334.1| protein product [Podospora anserina]
  misc_feature (1)..(728): NCBI GI: 255953937 Blast Desc: Pc21g06790 [Penicillium chrysogenum Wisconsin 54-1255] gi|211589432|emb|CAP95576.1| Pc21g06790 [Penicillium chrysogenum Wisconsin 54-1255]
MSQPMEIDEPRGTKRKQPSPSSPEESAPRRIQPLDPDVVNKIAAGEIIVAPVHALKELIENAVDAGSSSLEVLIKEGGLKLLQITDNGHGIDKEDLPILCERFTTSKLQSFEDLSNISTYGFRGEALASISHIAHLTVTTKTKDSSCAWRACYNSGKLSPAKPGQSPEPKPTAGRGGTQISVEDLFYNVPTRRKAFRSASDEYNKIIDMVGRYAIHCAGVAFSCKKHGDSGTSIAIQSQASTLDRIRQIHGGSVANELIQFSAADDRWGFRASGWATNANYHVKKVTMLLFINNRSVESSNIKKAIEQTYSAFLPKGSHPFVYLSLDVDPQRVDVNVHPTKREVNFLNEDEIIQVICEALRGKLAEVDTSRTFMTQTLLPGTLIPNITPQQDTEDSSAKAPSTVRKTTRPYENNLVRTDASLRKITSMFPTASKSAAPGATSEGIVADTNQMPEYDITDREAVYCRLNSVRELRTAVRDDMHHELTETFANHAFVGIVDEKRRLAAIQGGVKLFLIDYGRACFEYFYQVGLTDFGNFGTIKFQPALNIREVLSIAAEKEKQADADGVLADDDDFDVNEVVDKVAEQLIERREMLLEYFSFEISPSGELLSIPLLLKGYTPSMAKLPQFLLRLGPYVNWTDEKLCFESFLKELATFYVPEQLPSLPGSDQIEEDVSDEIKARRALVRHAVEHIFFPAFKARLVATKSLMKGGVLELANLKGLYRVFERC

SEQ ID NO: 7817 - DNA, 2747 bp, Muscodor strobelii
  misc_feature: SGI EST ID NO. CUFF.19383.0
  misc_feature: Variant of the nucleotide sequence at SEQ ID NO 7815
gtttccggtctccagcgttcgcgacttgtcttgttcttttcgtcacccaactccttcccattagtttcgtttcggtctcctgtgccctatccatagtcgcagcgcgatgaatgattatggtctccgccggcatccaggcacgctggtcatatgacacttcaatctacttgtggacgcttgtgaaatatagactcaaggagaggtcgagactttgccatgtcacaacccatggaaattgacgagccaagaggcactaagcgaaaacaaccttcgccctcatcacctgaagagagcgcccctcgccgcattcagcccctggacccagatgtcgtgaataaaattgctgctggagaaatcatcgttgctcctgtccatgctctcaaggagctcatcgaaaatgccgttgatgctgggtcttcctcgcttgaagtcctgataaaagagggcggtttgaagctgctgcagatcacagataatggtcacgggatcgataaagaagacctcccgattctgtgcgaaagattcaccacttcgaaacttcaaagttttgaagatctaagcaacatctccacgtatggctttcgtggtgaagctctggctagtatcagtcacatagctcatttgacagtgacaaccaagactaaggactcaagctgcgcttggcgtgcgtgttacaatagcgggaagctttcgcctgccaaacctggccagtcacctgagcctaaaccaactgcagggcgaggaggaacccagatatcagttgaggatctattttataacgttccaacaagacgcaaagcatttcgctccgcttctgacgaatacaacaagatcattgacatggtggggcgatatgccatccattgcgccggcgtcgctttttcttgtaaaaagcatggcgattctggaacatctattgctattcagtcgcaagcctcaactctcgatcgtattcgccagattcatggcggcagcgtagcgaatgagttgatccagttttcggctgcggacgatcgatggggtttccgagcctcgggatgggccactaatgcaaattaccacgtgaagaaagtcactatgttgttgttcatcaacaaccgcagtgtggagtcctccaatatcaagaaggccattgaacagacatactctgccttcttaccaaaaggcagccacccattcgtctatttaagtctcgatgtcgaccctcagcgcgtggacgtcaatgttcaccccactaaacgggaagtgaatttcctcaacgaggacgagatcatccaggttatctgcgaagctcttcgcgggaagcttgcagaagttgacaccagccgaacattcatgacccaaacgctactccctggcacacttataccaaatattaccccacagcaagataccgaagattcttcggccaaggccccctcgacagtccgcaagactacgcgtccctacgagaacaatctagtgcggactgatgcatcacttcgtaagatcacgagcatgttcccgacagcttctaaatcagcagccccaggtgcaacgtctgaaggcattgtagcagacacaaatcaaatgcccgagtacgatatcacagatcgcgaagcagtttattgtcgcctgaacagtgtacgcgaacttcggactgctgtaagagacgatatgcaccatgagctcacggagacatttgccaaccacgcgttcgttggcattgtagacgaaaaacgtcgactcgcagctattcagggcggtgttaaactcttccttatagattatggtcgagcttgtttcgaatacttctaccaagtaggtttaacggatttcggcaactttggaacaatcaagttccaaccagctctcaatatacgtgaagttctcagcattgcagcagagaaagaaaaacaggccgatgctgatggagtgttggctgacgatgatgattttgatgtgaatgaggtggtggacaaggtggcagagcagttgatcgagaggagagaaatgcttcttgagtatttcagctttgagatttcaccatcgggggaacttctgagtatcccattgctgctaaaaggctacacaccctctatggcaaagctgcctcagtttcttcttcgactcggaccatacgtaaattggacggatgaaaagttgtgtttcgaatcatttttgaaggaactcgctacattttatgtccctgagcagctgccatcgctcccgggaagtgaccagatcgaagaagacgtgtccgacgagatcaaagccagaagagcactggttcgtcacgctgtggagcatatattctttccagcattcaaagcgaggcttgtggctacgaagtcactcatgaaaggtggcgtcctggagttagccaatttgaagggcctgtatagagtctttgagagatgttagataatgatgccccaactactagtcctagcagaagaccaacgttgaaaggatgcttatgtacggatgatttatacacatggctttgaagttttgggttgttatatcatgaggacgggtctattgtgtagtagccagtaagatcacgtgaatttgagcgaagaaaaaagaaatgtgatcacagatgacattctgtccgtgatcctgagttggtttgggggcagtgatggagtggtgatgccggtgttttagcaaagtcggtacactgtcgaatctgaatcgcagttaggtaattactagacaatcgcatgttgcacaaccgcgagtctattttagtgattatccaa

SEQ ID NO: 7818 - DNA, 828 bp, Muscodor strobelii
  misc_feature: SGI cDNA ID NO. 562379
  misc_feature: Encodes the peptide sequence at SEQ ID NO 7819
atgtcgaattcacaatctgcccttggatatcgcacgcagccgatcgcaggtcgcaagttagtggatatgatcacaccgcctgagcgtgatcggatagccgcgctacgccagtcccttcttgaggagaggaaattgaaggagccgaattatcttccacccatttacttgaaaaaggaagaagaaaaagtgataagggcacagctttttaacgcggaattcgtttcgagatatcaacttgatcgccaagacttcttcactttcgttgccgcggatggtcagccgcgaccgcatgcggtccgtgttgggttggtaaaggacaattcgatatatttcgttgtcctcctgctcagctcgcatagccgtctttatcctcacccatcaccatcaccacggtctcgggatgcgtcgtattcataccaatcccaggcgtttactcaactaacacctatctcggggtctttcgatactggacgaccacggctatcggaccctgctagagagagcggcttcacgcagaggcagcttgaagcgtcggctcacttcgcttccaccctaagcccgggaatgagtcctaacgcaccatcttactcggcgtcagcgtcagcagcggtagtagggccagaccactccggtggtctatcacaccaaacacctagaagcgagattgggcttacgcgaccatctcagcaagccgaatatcagcttcctcctatccggggctcacagcagtcggcgttaccaggggagcccagctggcaacgggatgatcggacaagtatcggtgggctgctcgaaaagcctggtccattgccacgccgaagtccgtaa

SEQ ID NO: 7819 - protein, 275 aa, Muscodor strobelii
  misc_feature: SGI Peptide ID NO. 562379
  misc_feature (15)..(267): NCBI GI: 256726934 Blast Desc: NECHADRAFT_33882 [Nectria haematococca mpVI 77-13-4]
  misc_feature (15)..(267): NCBI GI: 261359747 Blast Desc: conserved [Verticillium albo-atrum VaMs.102]
  misc_feature (15)..(267): NCBI GI: 145612431 Blast Desc: MGG_12349 [Magnaporthe grisea 70-15] gi|145019591|gb|EDK03819.1| MGG_12349 [Magnaporthe grisea 70-15]
  misc_feature (15)..(267): NCBI GI: 46136421 Blast Desc: FG09726.1 [Gibberella zeae PH-1]
  misc_feature (15)..(269): NCBI GI: 85108169 Blast Desc: NCU08307 [Neurospora crassa OR74A] gi|28924128|gb|EAA33284.1| NCU08307 [Neurospora crassa OR74A]
  misc_feature (15)..(238): NCBI GI: 116196102 Blast Desc: CHGG_04649 [Chaetomium globosum CBS 148.51] gi|88180562|gb|EAQ88030.1| CHGG_04649 [Chaetomium globosum CBS 148.51]
  misc_feature (12)..(273): NCBI GI: 156049779 Blast Desc: SS1G_08596 [Sclerotinia sclerotiorum 1980] gi|154692995|gb|EDN92733.1| SS1G_08596 [Sclerotinia sclerotiorum 1980]
  misc_feature (20)..(268): NCBI GI: 171690548 Blast Desc: protein product [Podospora anserina] gi|170945222|emb|CAP71333.1| protein product [Podospora anserina]
  misc_feature (15)..(273): NCBI GI: 154289650 Blast Desc: BC1G_16051 [Botryotinia fuckeliana B05.10] gi|150848978|gb|EDN24171.1| BC1G_16051 [Botryotinia fuckeliana B05.10]
  misc_feature (15)..(118): NCBI GI: 169608061 Blast Desc: SNOG_07097 [Phaeosphaeria nodorum SN15] gi|111064628|gb|EAT85748.1| SNOG_07097 [Phaeosphaeria nodorum SN15]
MSNSQSALGYRTQPIAGRKLVDMITPPERDRIAALRQSLLEERKLKEPNYLPPIYLKKEEEKVIRAQLFNAEFVSRYQLDRQDFFTFVAADGQPRPHAVRVGLVKDNSIYFVVLLLSSHSRLYPHPSPSPRSRDASYSYQSQAFTQLTPISGSFDTGRPRLSDPARESGFTQRQLEASAHFASTLSPGMSPNAPSYSASASAAVVGPDHSGGLSHQTPRSEIGLTRPSQQAEYQLPPIRGSQQSALPGEPSWQRDDRTSIGGLLEKPGPLPRRSP

SEQ ID NO: 7820 - DNA, 2802 bp, Muscodor strobelii
  misc_feature: SGI cDNA ID NO. 562380
  misc_feature: Reduced expression when VOC is produced
  misc_feature: Encodes the peptide sequence at SEQ ID NO 7821
atggcgcctccgtcacagtcatccattgcgccccttattcctttagccaagggcaccgtcctcttccccggctccgtattgcgcattccagtgcctccgaaccgctccgacatacctgcccttctctccaacgtctactcgcgtgcttccgccgcctctaaacccgtcgatcagattcccgtcgtatgtgtacctctcaactcgccgcttttgagtcgccgtggccagcttctactggagaagaatccagaaaaatacaatgaagttctagaggccgagggtcgcaacataacaaaagaccgtctatacggttatggagtctctgcgaaaatcacgggtatccaaggtcaaaatggatcggaatttctgctgttagtgcagggcgtctcgcgcgtctcgatcgacaaagtcatgcagcagcaaccattctttgacgccaagattctatcccatccggacaagatgggccgcgagacagacacggccgaatttcaggagctttttggcctactcaaacgcctctcgcgggaattagtgtcctaccttcgtgtctctgccttccttctgtccagcggcagtgcaggtctcaatccgctgctttcccgccgactggaacagttcatcgctagaaagcagtcgaatgaggccggttcccttgccgacttcatgatgaatgtgattgaagcatcctacgaagataaacttcaagtgctagcagccgtggacgtgatgcaacgcatgcgaaaagtcattgagttgatggaacgacaggtcgacgacatcaaaggaaacatcaaagtcacaactgttaccagtacaaccattcccattcatattgatcaagaggatatggagaaaatgaacaagcgcaatatcaaaaagatacagattccggggatgggcccgccggctggatttagcttcaatggcatgcctggcggcggacaagctgagcagcaagatgccgacgacttgcaggagcttcagaagaaagtggaggctgcaaagctcccgcccgaggccgccaaggtcgctgagcgcgaattcaagcgcctcaagcaaatgatgcccgctcaggccgaataccaagttgtaaggacatatcttgagactctggccgagatcccttggtctatagtcaccgacgacccgatagggcagggcacattagaggctgcaaggaagcagctagatgatgaccattacggcatcgagaaagtgaagaaacgcctactatcttacctaactattgtgagattgatgcaatctgcaaacgaatcagtcgaccgacaggtcaaggaggctgagaaagagacaactgatctagaatccgcaaagactgaagcaaaggatgctccactcgacccagagctagaggaaaagatcagggccagcggcctgaaagtccaaatgttgaagagcaagcgagtggccgagaaagcccctattttgctgctggtcggtccgcctggtgtaggtaagacgagcatagctcgatcgattgctacagccttgggtcgaaaattccatcggatttcgctcggcggtgtgagagacgaagcggaaattcgcggtcatcgtcgaacctacgttgctgctatgccaggcttaattgtgcaaggtttgaagaaagtaggagttgcaaatcctgttttcttgttggacgaaattgataagctaggtatggcaaaccacaatggtgatcctgcagctgccatgcttgaggttcttgaccccgaacagaatcacgctttcagcgatcactatgtgaacacaccaatcgatctaagcaaggttctcttcattgctacagccaatagtctcgatacaattcctggcccactgctagatcgcatggaaactctagagttctccgggtacacgaccttggaaaagcgtcatattgccttgcgccacttggtccccaagcaaatacgagtaaatggtcttgcagaagaccaagtcaaattcaatgacgaagtggtgtccaaaatcattgaatcgtacactcgtgaatcaggtgttcggaatcttgagcgcgaaatcgggtcagtctgtcgcgctaaagctgtggagtatgtagaagccaacgatcgcggtcgtcctgaaacgtaccgggcagatttaaccactgaggacctcgaggctattcttgggatcgaaagattcgaggatgagatcgcagagaagagcagccagcccggcattgtcactggcctagtggcttacagcagtggtggtaacggcggtatcctcttcatcgaggtcctcgatatgcccggagatgggagcgtagagctcacaggcaatctcggtgaagtactgaaggagagtgtcaaggtggcgaggagctgggtacgaaaccatgcttacgagctaggcttgacccaagagccaacagaaaacgtcatgaagaatcgtagtctacacgtgcattgcccttccggggcagtgccaaaggacggcccttcaagtggtatggcgcaggccattgctttgatttcactcttatcaggccgacccgtcccaccgacaatggccatgactggtgaattccaactctctggccatgtgaagagagtgggaggaatcaaggaaaagctcataggtgcctatcgcgccggcgtaacgacggtgcttttgccggctcaaaacgaaaaggacgcgcgagaggtacccgctgaggtccgggacggcctcaagatcatttatgttagccatgtttgggaagccatccggcacatatggcccggcacggaatggcctcatgaagcgaatacccctatcacagctcgcttgtaa

SEQ ID NO: 7821 - protein, 933 aa, Muscodor strobelii
  misc_feature: SGI Peptide ID NO. 562380
  misc_feature (483)..(679): Pfam Id: PF00004 Pfam Desc: ATPase family associated with various cellular activities (AAA)
  misc_feature (483)..(627): Pfam Id: PF07728 Pfam Desc: ATPase family associated with various cellular activities (AAA)
  misc_feature (708)..(918): Pfam Id: PF05362 Pfam Desc: Lon protease (S16) C-terminal proteolytic domain
  misc_feature (484)..(512): Pfam Id: PF07726 Pfam Desc: ATPase family associated with various cellular activities (AAA)
  misc_feature (483)..(509): Pfam Id: PF07728 Pfam Desc: ATPase family associated with various cellular activities (AAA)
  misc_feature (5)..(929): NCBI GI: 258567588 Blast Desc: ATP-dependent protease La [Uncinocarpus reesii 1704] gi|237905984|gb|EEP80385.1| ATP-dependent protease La [Uncinocarpus reesii 1704]
  misc_feature (21)..(917): NCBI GI: 189206397 Blast Desc: ATP-dependent protease La [Pyrenophora tritici-repentis Pt-1C-BFP] gi|187975626|gb|EDU42252.1| ATP-dependent protease La [Pyrenophora tritici-repentis
  misc_feature (8)..(922): NCBI GI: 261359746 Blast Desc: ATP-dependent protease La 1 [Verticillium albo-atrum VaMs.102]
  misc_feature (323)..(922): NCBI GI: 171690542 Blast Desc: protein product [Podospora anserina] gi|170945219|emb|CAP71330.1| protein product [Podospora anserina]
  misc_feature (360)..(907): NCBI GI: 116196108 Blast Desc: CHGG_04652 [Chaetomium globosum CBS 148.51] gi|88180565|gb|EAQ88033.1| CHGG_04652 [Chaetomium globosum CBS 148.51]
  misc_feature (102)..(916): NCBI GI: 50556774 Blast Desc: YALI0F23595p [Yarrowia lipolytica] gi|49651665|emb|CAG78606.1| YALI0F23595p [Yarrowia lipolytica]
  misc_feature (11)..(933): NCBI GI: 85108152 Blast Desc: NCU08303 [Neurospora crassa OR74A] gi|28924124|gb|EAA33280.1| NCU08303 [Neurospora crassa OR74A]
  misc_feature (1)..(926): NCBI GI: 46136419 Blast Desc: FG09725.1 [Gibberella zeae PH-1]
  misc_feature (1)..(926): NCBI GI: 256726933 Blast Desc: [Nectria haematococca mpVI 77-13-4]
  misc_feature (4)..(933): NCBI GI: 261198288 Blast Desc: ATP-dependent protease La [Ajellomyces dermatitidis SLH14081] gi|239595509|gb|EEQ78090.1| ATP-dependent protease La [Ajellomyces dermatitidis SLH14081]
  misc_feature (1)..(913): SWISSPROT Homolog: EC 3.4.21.53 Endopeptidase La
  misc_feature: Useful for introducing or modulating the production of volatile compounds
MAPPSQSSIAPLIPLAKGTVLFPGSVLRIPVPPNRSDIPALLSNVYSRASAASKPVDQIPVVCVPLNSPLLSRRGQLLLEKNPEKYNEVLEAEGRNITKDRLYGYGVSAKITGIQGQNGSEFLLLVQGVSRVSIDKVMQQQPFFDAKILSHPDKMGRETDTAEFQELFGLLKRLSRELVSYLRVSAFLLSSGSAGLNPLLSRRLEQFIARKQSNEAGSLADFMMNVIEASYEDKLQVLAAVDVMQRMRKVIELMERQVDDIKGNIKVTTVTSTTIPIHIDQEDMEKMNKRNIKKIQIPGMGPPAGFSFNGMPGGGQAEQQDADDLQELQKKVEAAKLPPEAAKVAEREFKRLKQMMPAQAEYQVVRTYLETLAEIPWSIVTDDPIGQGTLEAARKQLDDDHYGIEKVKKRLLSYLTIVRLMQSANESVDRQVKEAEKETTDLESAKTEAKDAPLDPELEEKIRASGLKVQMLKSKRVAEKAPILLLVGPPGVGKTSIARSIATALGRKFHRISLGGVRDEAEIRGHRRTYVAAMPGLIVQGLKKVGVANPVFLLDEIDKLGMANHNGDPAAAMLEVLDPEQNHAFSDHYVNTPIDLSKVLFIATANSLDTIPGPLLDRMETLEFSGYTTLEKRHIALRHLVPKQIRVNGLAEDQVKFNDEVVSKIIESYTRESGVRNLEREIGSVCRAKAVEYVEANDRGRPETYRADLTTEDLEAILGIERFEDEIAEKSSQPGIVTGLVAYSSGGNGGILFIEVLDMPGDGSVELTGNLGEVLKESVKVARSWVRNHAYELGLTQEPTENVMKNRSLHVHCPSGAVPKDGPSSGMAQAIALISLLSGRPVPPTMAMTGEFQLSGHVKRVGGIKEKLIGAYRAGVTTVLLPAQNEKDAREVPAEVRDGLKIIYVSHVWEAIRHIWPGTEWPHEANTPITARL

SEQ ID NO: 7822 - DNA, 3495 bp, Muscodor strobelii
  misc_feature: SGI EST ID NO. CUFF.19558.0
  misc_feature: Variant of the nucleotide sequence at SEQ ID NO 7820
atcaaacctcggcaagtgcccgtgctcgcagtgtgatccgtgatccataccagtcgcgcgccctcgactctggatcctcgatgacccgaccaaccgacctcgaccccagcatcttttacgtggacaccattcaataaaagtaaatgcaatcgtacattccacgtatgtattgtgctagtaattcatccacttgacttgttgctgtcttcgtagacttaaatcttgtattcgattatacgtgctcgcgtttccatttaactttcatctgccctcgtctcgcataaacatctccgtaatcgctattctcatccagtgagacaccatcacgaaaccacgtcggcatggcgcctccgtcacagtcatccattgcgccccttattcctttagccaagggcaccgtcctcttccccggctccgtattgcgcattccagtgcctccgaaccgctccgacatacctgcccttctctccaacgtctactcgcgtgcttccgccgcctctaaacccgtcgatcagattcccgtcgtatgtgtacctctcaactcgccgcttttgagtcgccgtggccagcttctactggagaagaatccagaaaaatacaatgaagttctagaggccgagggtcgcaacataacaaaagaccgtctatacggttatggagtctctgcgaaaatcacgggtatccaaggtcaaaatggatcggaatttctgctgttagtgcagggcgtctcgcgcgtctcgatcgacaaagtcatgcagcagcaaccattctttgacgccaagattctatcccatccggacaagatgggccgcgagacagacacggccgaatttcaggagctttttggcctactcaaacgcctctcgcgggaattagtgtcctaccttcgtgtctctgccttccttctgtccagcggcagtgcaggtctcaatccgctgctttcccgccgactggaacagttcatcgctagaaagcagtcgaatgaggccggttcccttgccgacttcatgatgaatgtgattgaagcatcctacgaagataaacttcaagtgctagcagccgtggacgtgatgcaacgcatgcgaaaagtcattgagttgatggaacgacaggtcgacgacatcaaaggaaacatcaaagtcacaactgttaccagtacaaccattcccattcatattgatcaagaggatatggagaaaatgaacaagcgcaatatcaaaaagatacagattccggggatgggcccgccggctggatttagcttcaatggcatgcctggcggcggacaagctgagcagcaagatgccgacgacttgcaggagcttcagaagaaagtggaggctgcaaagctcccgcccgaggccgccaaggtcgctgagcgcgaattcaagcgcctcaagcaaatgatgcccgctcaggccgaataccaagttgtaaggacatatcttgagactctggccgagatcccttggtctatagtcaccgacgacccgatagggcagggcacattagaggctgcaaggaagcagctagatgatgaccattacggcatcgagaaagtgaagaaacgcctactatcttacctaactattgtgagattgatgcaatctgcaaacgaatcagtcgaccgacaggtcaaggaggctgagaaagagacaactgatctagaatccgcaaagactgaagcaaaggatgctccactcgacccagagctagaggaaaagatcagggccagcggcctgaaagtccaaatgttgaagagcaagcgagtggccgagaaagcccctattttgctgctggtcggtccgcctggtgtaggtaagacgagcatagctcgatcgattgctacagccttgggtcgaaaattccatcggatttcgctcggcggtgtgagagacgaagcggaaattcgcggtcatcgtcgaacctacgttgctgctatgccaggcttaattgtgcaaggtttgaagaaagtaggagttgcaaatcctgttttcttgttggacgaaattgataagctaggtatggcaaaccacaatggtgatcctgcagctgccatgcttgaggttcttgaccccgaacagaatcacgctttcagcgatcactatgtgaacacaccaatcgatctaagcaaggttctcttcattgctacagccaatagtctcgatacaattcctggcccactgctagatcgcatggaaactctagagttctccgggtacacgaccttggaaaagcgtcatattgccttgcgccacttggtccccaagcaaatacgagtaaatggtcttgcagaagaccaagtcaaattcaatgacgaagtggtgtccaaaatcattgaatcgtacactcgtgaatcaggtgttcggaatcttgagcgcgaaatcgggtcagtctgtcgcgctaaagctgtggagtatgtagaagccaacgatcgcggtcgtcctgaaacgtaccgggcagatttaaccactgaggacctcgaggctattcttgggatcgaaagattcgaggatgagatcgcagagaagagcagccagcccggcattgtcactggcctagtggcttacagcagtggtggtaacggcggtatcctcttcatcgaggtcctcgatatgcccggagatgggagcgtagagctcacaggcaatctcggtgaagtactgaaggagagtgtcaaggtggcgaggagctgggtacgaaaccatgcttacgagctaggcttgacccaagagccaacagaaaacgtcatgaagaatcgtagtctacacgtgcattgcccttccggggcagtgccaaaggacggcccttcaagtggtatggcgcaggccattgctttgatttcactcttatcaggccgacccgtcccaccgacaatggccatgactgtatgtgccacccgctattagattgcctaaccacgcatactgacattcgagaaagggtgaattccaactctctggccatgtgaagagagtgggaggaatcaaggaaaagctcataggtgcctatcgcgccggcgtaacgacggtgcttttgccggctcaaaacgaaaaggacgcgcgagaggtacccgctgaggtccgggacggcctcaagatcatttatgttagccatgtttgggaagccatccggcacatatggcccggcacggaatggcctcatgaagcgaatacccctatcacagctcgcttgtaacaaaaatttcgctaaggttctgctcatctagagaggatatagatacaggtagtggcgcattgtatggcgtttgatcgcgcagcttttgtcactagcgaggtattgttttgaataaacaaccaagtcattttagcacagcggtagtattcgatatacacaccagatggtgtttctctgcgatcgaaactcagatgccattcctgatccatggtgtcgtgcattggcgtaggcgatgacaaatagcaacaccgtagcctatatcatggtagccaaattcgattataataacactcccca

SEQ ID NO: 7823 - DNA, 810 bp, Muscodor strobelii
  misc_feature: SGI cDNA ID NO. 562381
  misc_feature: Reduced expression when VOC is produced
  misc_feature: Encodes the peptide sequence at SEQ ID NO 7824
atgagtgcatacggcggcggatattccaccacgtcctacggcggagggggtgaagatggcggcgcaggaggctacatgtggggttcgcaagccgggagccagtctgccaccaaggccatcaacgaagaatcactgcgtcccgtaaccattaagcaagtcatcgacgccgaggcctcctacgccggcgacgccaacttccgcatcgacggcctcgacatcaagcaggtcactctcgtaggcatggtccgctccatcaccccgcagaccaccaacatcacatacaagatcgacgacggcactggcaccatcgaggtgaagctgtggctcgactccgacaagcaggagtccgactcggccccgcagttcaaggaggaagactacgtccgtgtctggggccgcctgaagtccttcggcaacaagcgccacgtcggtgcgcacgtcatcaagcctatccgcgacttcaacgaagtcaactaccacctgctagaagccacctatgtccacctctacttcactcgcggcgctcccccacaggatggtggtgctgtcggcggcggcggcgatgacgggggcatgtttgttgatggtggcaacgacgcgaagctgagaggttgctccaacaaggcgaagcagatatacacctatctgagcggagtgcaggacagtaatggcgttaacacgcacgtgattgctcgggatacaggcttgactatccaggaagtcatgagtggtagtgaagagctccttggcaacggatctatctacacaaccctcgatgatgagacgtttgccgtactggagtcctactag

SEQ ID NO: 7824 - protein, 269 aa, Muscodor strobelii
  misc_feature: SGI Peptide ID NO. 562381
  misc_feature (76)..(151): Pfam Id: PF01336 Pfam Desc: OB-fold nucleic acid binding domain
  misc_feature (168)..(261): Pfam Id: PF08784 Pfam Desc: Replication protein A C terminal
  misc_feature (1)..(267): NCBI GI: 46136417 Blast Desc: FG09724.1 [Gibberella zeae PH-1]
  misc_feature (36)..(267): NCBI GI: 256727502 Blast Desc: NECHADRAFT_103427 [Nectria haematococca mpVI 77-13-4]
  misc_feature (25)..(267): NCBI GI: 85105463 Blast Desc: NCU07717 [Neurospora crassa OR74A] gi|28923556|gb|EAA32731.1| conserved [Neurospora crassa OR74A]
  misc_feature (2)..(267): NCBI GI: 145612441 Blast Desc: MGG_07124 [Magnaporthe grisea 70-15] gi|145019596|gb|EDK03824.1| MGG_07124 [Magnaporthe grisea 70-15]
  misc_feature (33)..(267): NCBI GI: 156049217 Blast Desc: SS1G_08315 [Sclerotinia sclerotiorum 1980] gi|154692714|gb|EDN92452.1| SS1G_08315 [Sclerotinia sclerotiorum 1980]
  misc_feature (33)..(267): NCBI GI: 154299714 Blast Desc: BC1G_11483 [Botryotinia fuckeliana B05.10] gi|150857173|gb|EDN32365.1| BC1G_11483 [Botryotinia fuckeliana B05.10]
  misc_feature (42)..(268): NCBI GI: 169608065 Blast Desc: SNOG_07099 [Phaeosphaeria nodorum SN15] gi|160701551|gb|EAT85750.2| SNOG_07099 [Phaeosphaeria nodorum SN15]
  misc_feature (1)..(268): NCBI GI: 171690528 Blast Desc: protein product [Podospora anserina] gi|170945212|emb|CAP71323.1| protein product [Podospora anserina]
  misc_feature (41)..(267): NCBI GI: 255956779 Blast Desc: Pc21g21700 [Penicillium chrysogenum Wisconsin 54-1255] gi|211590853|emb|CAP97067.1| Pc21g21700 [Penicillium chrysogenum Wisconsin 54-1255]
  misc_feature (41)..(267): NCBI GI: 121699890 Blast Desc: replication factor-a protein [Aspergillus clavatus NRRL 1] gi|119396352|gb|EAW06784.1| replication factor-a protein [Aspergillus clavatus NRRL 1]
  misc_feature: Useful for introducing or modulating the production of volatile compounds
MSAYGGGYSTTSYGGGGEDGGAGGYMWGSQAGSQSATKAINEESLRPVTIKQVIDAEASYAGDANFRIDGLDIKQVTLVGMVRSITPQTTNITYKIDDGTGTIEVKLWLDSDKQESDSAPQFKEEDYVRVWGRLKSFGNKRHVGAHVIKPIRDFNEVNYHLLEATYVHLYFTRGAPPQDGGAVGGGGDDGGMFVDGGNDAKLRGCSNKAKQIYTYLSGVQDSNGVNTHVIARDTGLTIQEVMSGSEELLGNGSIYTTLDDETFAVLESY

SEQ ID NO: 7825 - DNA, 2002 bp, Muscodor strobelii
  misc_feature: SGI EST ID NO. CUFF.19610.0
  misc_feature: Variant of the nucleotide sequence at SEQ ID NO 7823
cgcggttccccgttagtgtgacctgctttagaaactgcaggtgcgcattacaggtaacggtacctacatcataaagtctctatgaggtaggagtggaaaatcaattaaaacaccaagacgcgtcttgtgtctactcacgcgtctcccccaccatcattataccactttttatctcgacgccgtcatacccaaacttgaatactcctcagcccgacgccctcccttaatcacagacatgagtgcatacggcggcggatattccaccacgtcctacggcggagggggtgaagatggcggcgcaggaggctacatgtggggttcgcaagccgggagccagtctgccaccaaggccatcaacgaagaatcactgcgtcccgtaaccattaagcaagtcatcgacgccgaggcctcctacgccggcgacgccaacttccgcatcgacggcctcgacatcaagcaggtcactctcgtaggcatggtccgctccatcaccccgcagaccaccaacatcacatacaagatcgacgacggcactggcaccatcgaggtgaagctgtggctcgactccgacaagcaggagtccgactcggccccgcagttcaaggaggaagactacgtccgtgtctggggccgcctgaagtccttcggcaacaagcgccacgtcggtgcgcacgtcatcaagcctatccgcgacttcaacgaagtcaactaccacctgctagaagccacctatgtccacctctacttcactcgcggcgctcccccacaggatggtggtgctgtcggcggcggcggcgatgacgggggcatgtttgttgatggtggcaacgacgcgaagctgagaggttgctccaacaaggcgaagcagatatacacctatctgagcggagtgcaggacagtaatggcgttaacacgcacgtgattgctcgggatacaggcttgactatccaggaagtcatgagtggtagtgaagagctccttggcaacggatctatctacacaaccctcgatgatgagacgtttgccgtactggagtcctactagatgagatgatacaggaaattcggatgatgcgaaaagacataatatgcccggctgagcgatgagatgtgctagagctacgtggcgcatggcaacgacggcgttggtttgatatttacggcaatgagcaaagggatcacgattctgatgtgtatgcacccacatcacaaaaacggtattccgtacacgtttttacaggaaaagaacgactgtatgtatagatagcctagtctaaccgggctgaaagctaaagtgcacaaacataaaaggagtgctgggatagtataggatcccgaagtaccaatcaatgatgagctgtgttgaaacggcatcatatcttttcgtccatgttcaccaacaagtgttgaatatcataagcatcctggtctcgtcatgtggtcaaacgaacgactacaatcagttgcgaatcgcggaaagaagatgaaaacaatttgaaagagcaacgcgaggaataagtatctgcacgacgtaacgtcgacttcaaggggtctttgaatcgacattgatgcgatcgtcacaaaattcattagcaggtggtcaaactgttggttctggccacagctgtaaatgtgagagtataatgctgagcagcgagcgaaaagtgaatcgaaatttagcacagaagtctagccttcacgttaacaataacgacggcagttgttgaaactttccttctggcgtaggtccagtgatctgcgcattagatggcacggcgcgggaagccggcctgcagcttgatcgggattgacttgttgggtgctggcttacgtggctcacgaaccatgattgtgagggtcacgggtgcttcggaagacgtggtgatgttgccgttgactcccatgtagatggtgcgtttgatctcgaacccgaactttttgtagtattcgttgtttttctctgagctggattcaaggtacatcgcacggccctccgcatcag

SEQ ID NO: 7826 - DNA, 798 bp, Muscodor strobelii
  misc_feature: SGI cDNA ID NO. 562382
  misc_feature: Encodes the peptide sequence at SEQ ID NO 7827
atggcgcatgtaaccaataataacgtcaccttgattggcatgaagaaacgttctcttgtccccgaaaaatgggaagatcaagttcgtgccatccgcatctccgaatgtaaggaagcggctgttagcttggcgcaagcctttgctactgatgatctggcacagtatcttgtcgaggctgagaatcttagcgacgatgaagccaagtggagactccacgttgatatcttcaactatatcgttgctgctcattgcttgaaaggtgccgtgacgaccatcgggccagattatgaaggtgttgcgctttggatgccgcctggaaaggatgcagatgactttctcaccatccttcgcagtggtatgtggagactctactatcaactgtcagctgaaggccgtcgacgatactacactgaactacttccactccttcacgatacgaagcatgaggttatgggagatagagacaatgactgctattacctagtttatctcggtaccaagcccagcggccagaaacgcggctatggtaggaagttgatcgaacacatggctgcccaggctgatgcggagggccgtgcgatgtaccttgaatccagctcagagaaaaacaacgaatactacaaaaagttcgggttcgagatcaaacgcaccatctacatgggagtcaacggcaacatcaccacgtcttccgaagcacccgtgaccctcacaatcatggttcgtgagccacgtaagccagcacccaacaagtcaatcccgatcaagctgcaggccggcttcccgcgccgtgccatctaa

SEQ ID NO: 7827 - protein, 265 aa, Muscodor strobelii
  misc_feature: SGI Peptide ID NO. 562382
  misc_feature (132)..(213): Pfam Id: PF00583 Pfam Desc: Acetyltransferase (GNAT) family
  misc_feature (150)..(213): Pfam Id: PF00583 Pfam Desc: Acetyltransferase (GNAT) family
  misc_feature (1)..(246): NCBI GI: 256726932 Blast Desc: NECHADRAFT_32437 [Nectria haematococca mpVI 77-13-4]
  misc_feature (6)..(248): NCBI GI: 46136415 Blast Desc: FG09723.1 [Gibberella zeae PH-1]
  misc_feature (1)..(244): NCBI GI: 154299712 Blast Desc: BC1G_11482 [Botryotinia fuckeliana B05.10] gi|150857172|gb|EDN32364.1| BC1G_11482 [Botryotinia fuckeliana B05.10]
  misc_feature (4)..(244): NCBI GI: 156049219 Blast Desc: SS1G_08316 [Sclerotinia sclerotiorum 1980] gi|154692715|gb|EDN92453.1| SS1G_08316 [Sclerotinia sclerotiorum 1980]
  misc_feature (9)..(254): NCBI GI: 164423801 Blast Desc: NCU07718 [Neurospora crassa OR74A] gi|157070237|gb|EAA32732.2| conserved [Neurospora crassa OR74A]
  misc_feature (11)..(243): NCBI GI: 171690530 Blast Desc: protein product [Podospora anserina] gi|170945213|emb|CAP71324.1| protein product [Podospora anserina]
  misc_feature (26)..(243): NCBI GI: 189206349 Blast Desc: conserved [Pyrenophora tritici-repentis Pt-1C-BFP] gi|187975602|gb|EDU42228.1| conserved [Pyrenophora tritici-repentis Pt-1C-BFP]
  misc_feature (9)..(243): NCBI GI: 261359755 Blast Desc: conserved [Verticillium albo-atrum VaMs.102]
  misc_feature (26)..(245): NCBI GI: 169611680 Blast Desc: SNOG_08954 [Phaeosphaeria nodorum SN15] gi|160702345|gb|EAT84122.2| SNOG_08954 [Phaeosphaeria nodorum SN15]
  misc_feature (28)..(252): NCBI GI: 50554711 Blast Desc: YALI0E34243p [Yarrowia lipolytica] gi|49650633|emb|CAG80371.1| YALI0E34243p [Yarrowia lipolytica]
MAHVTNNNVTLIGMKKRSLVPEKWEDQVRAIRISECKEAAVSLAQAFATDDLAQYLVEAENLSDDEAKWRLHVDIFNYIVAAHCLKGAVTTIGPDYEGVALWMPPGKDADDFLTILRSGMWRLYYQLSAEGRRRYYTELLPLLHDTKHEVMGDRDNDCYYLVYLGTKPSGQKRGYGRKLIEHMAAQADAEGRAMYLESSSEKNNEYYKKFGFEIKRTIYMGVNGNITTSSEAPVTLTIMVREPRKPAPNKSIPIKLQAGFPRRAI

SEQ ID NO: 7828 - DNA, 3302 bp, Muscodor strobelii
  misc_feature: SGI EST ID NO. CUFF.19611.2
  misc_feature: Variant of the nucleotide sequence at SEQ ID NO 7826
cttacactgtgctttctctgtgctccggaactgcgttgtctctttgccactgtttaaggacgtcccccagacccgcagtcccttgtccctctctttctctctcgtctttcctcctgtgtatgtgaatgacaagcaactaaggaacaaagctgtctctcttcaggcactagtacaattgcccaagtgaagacacaattgaacacacaaaagtctgagtgattgccactgcaaatagcacccaaatccatatctgcatggtttgctaggtctatgcaaagccaacagacacttgattgtctttctgtcaaaacacattgtctgagattatactctcttctgataagatttgctcacttagcactcttagtctctattcaataagactaattgctgctcatttgtcccttccctacctacatacctcaacggttgctcgccagtgcaatttcgaccgcgacgaaagctgtcgttactcaccaagtacaactccacagcttgttaacagcctttagcacttacatcgacattgatgtctgttgacctacgaacgagcctcaattgcctgtcgcacccggggagatttatgcctatctcccgaagtcaactctccagagttcacacaggcgatagtatacagaatattaattccagtaattcgtagagtccacatttgctgccacccacccatcatggcgcatgtaaccaataataacgtcaccttgattggcatgaagaaacgttctcttgtccccgaaaaatgggaagatcaagttcgtgccatccgcatctccgaatgtaaggaagcggctgttagcttggcgcaagcctttgctactgatgatctggcacagtatcttgtcgaggctgagaatcttagcgacgatgaagccaagtggagactccacgttgatatcttcaactatatcgttgctgctcattgcttgaaaggtgccgtgacgaccatcgggccagattatgaaggtgttgcgctttggatgccgcctggaaaggatgcagatgactttctcaccatccttcgcagtggtatgtggagactctactatcaactgtcagctgaaggccgtcgacgatactacactgaactacttccactccttcacgatacgaagcatgaggttatgggagatagagacaatgactgctattacctagtttatctcggtaccaagcccagcggccagaaacgcggctatggtaggaagttgatcgaacacatggctgcccaggctgatgcggagggccgtgcgatgtaccttgaatccagctcagagaaaaacaacgaatactacaaaaagttcgggttcgagatcaaacgcaccatctacatgggagtcaacggcaacatcaccacgtcttccgaagcacccgtgaccctcacaatcatggttcgtgagccacgtaagccagcacccaacaagtcaatcccgatcaagctgcaggccggcttcccgcgccgtgccatctaatgcgcagatcactggacctacgccagaaggaaagtttcaacaactgccgtcgttattgttaacgtgaaggctagacttctgtgctaaatttcgattcacttttcgctcgctgctcagcattatactctcacatttacagctgtggccagaaccaacagtttgaccacctgctaatgaattttgtgacgatcgcatcaatgtcgattcaaagaccccttgaagtcgacgttacgtcgtgcagatacttattcctcgcgttgctctttcaaattgttttcatcttctttccgcgattcgcaactgattgtagtcgttcgtttgaccacatgacgagaccaggatgcttatgatattcaacacttgttggtgaacatggacgaaaagatatgatgccgtttcaacacagctcatcattgattggtacttcgggatcctatactatcccagcactccttttatgtttgtgcactttagctttcagcccggttagactaggctatctatacatacagtcgttcttttcctgtaaaaacgtgtacggaataccgtttttgtgatgtgggtgcatacacatcagaatcgtgatccctttgctcattgccgtaaatatcaaaccaacgccgtcgttgccatgcgccacgtagctctagcacatctcatcgctcagccgggcatattatgtcttttcgcatcatccgaatttcctgtatcatctcatctagtaggactccagtacggcaaacgtctcatcatcgagggttgtgtagatagatccgttgccaaggagctcttcactaccactcatgacttcctggatagtcaagcctgtatcccgagcaatcacgtgcgtgttaacgccattactgtcctgcactccgctcagataggtgtatatctgcttcgccttgttggagcaacctctcagcttcgcgtcgttgccaccatcaacaaacatgcccccgtcatcgccgccgccgccgacagcaccaccatcctgtgggggagcgccgcgagtgaagtagaggtggacataggtggcttctagcaggtggtagttgacttcgttgaagtcgcggataggcttgatgacgtgcgcaccgacgtggcgcttgttgccgaaggacttcaggcggccccagacacggacgtagtcttcctccttgaactgcggggccgagtcggactcctgcttgtcggagtcgagccacagcttcacctcgatggtgccagtgccgtcgtcgatcttgtatgtgatgttggtggtctgcggggtgatggagcggaccatgcctacgagagtgacctgcttgatgtcgaggccgtcgatgcggaagttggcgtcgccggcgtaggaggcctcggcgtcgatgacttgcttaatggttacgggacgcagtgattcttcgttgatggccttggtggcagactggctcccggcttgcgaaccccacatgtagcctcctgcgccgccatcttcaccccctccgccgtaggacgtggtggaatatccgccgccgtatgctacaaacggtcagttgggctgtggtttgtggagtgaaataatggtacggaccactcatgtctgtgattaagggagggcgtcgggctgaggagtattcaagtttgggtatgacggcgtcgagataaaaagtggtataatgatggtgggggagacgcgtgagtagacacaagacgcgtcttggtgttttaattgattttccactcctacctcatagagactttatgatgtaggtaccgttacctgtaatgcgcacctgcagtttctaaagcaggtcacactaacggggaaccgcg

SEQ ID NO: 7829 - DNA, 768 bp, Muscodor strobelii
  misc_feature: SGI cDNA ID NO. 562383
  misc_feature: Encodes the peptide sequence at SEQ ID NO 7830
atgactgtgactaccaccaccaccgtcacgcaggccacgccctcggctgagacgatcctgcggctgttccccgatatcgacaccagctcctccagcctcgagggccacgatgaggaacaaatccgcctgatggacgaggtctgcatcgtcctcgacaatgacgacaaccccattggcaccgccagcaagaagctatgccatctcatgaccaacatcgacaagggcctccttcaccgcgccttctccgttttcctcttcgacgaccagaaccgattgttgctccagcaacgtgccaccgagaagatcacgttccccgacatgtggactaacacgtgctgttctcaccctctacacataccaaccgagacaggctccaacctgccggactccattgccggtgtcaagcgcgcggcccagcgtaagcttgagcatgagcttggcataaagacggaacaggtccctttcgaagacttccacttcctgacacgaatccactacaaggcgcccagcgatggcaaatggggcgagcatgagatcgactatatccttttcatcaaagcgaacgtggatctcaatctcaacccgaacgaagtgcgcgatgctaaatatgtctcgccaagcgatctcaagacgttgttcaaggatcccaatctgaagttcacgccatggttcaagcttatttgcgagtcgatgctctttgagtggtgggagaaccttgattctggcctcgagaaattcaccaatgagcaagagatcagacggatgtag

SEQ ID NO: 7830 - protein, 255 aa, Muscodor strobelii
  misc_feature: SGI Peptide ID NO. 562383
  misc_feature (77)..(230): Pfam Id: PF00293 Pfam Desc: NUDIX domain
  misc_feature (15)..(255): NCBI GI: 46136413 Blast Desc: FG09722.1 [Gibberella zeae PH-1]
  misc_feature (1)..(255): NCBI GI: 171690532 Blast Desc: protein product [Podospora anserina] gi|170945214|emb|CAP71325.1| protein product [Podospora anserina]
  misc_feature (1)..(255): NCBI GI: 85105470 Blast Desc: isopentenyl-diphosphate delta-isomerase [Neurospora crassa OR74A] gi|28923558|gb|EAA32733.1| isopentenyl-diphosphate delta-isomerase [Neurospora crassa OR74A] isopentenyl diphosphate
  misc_feature (15)..(255): NCBI GI: 39971619 Blast Desc: conserved [Magnaporthe grisea 70-15] gi|145019597|gb|EDK03825.1| conserved [Magnaporthe grisea 70-15]
  misc_feature (2)..(255): NCBI GI: 189206347 Blast Desc: isopentenyl-diphosphate Delta-isomerase 1 [Pyrenophora tritici-repentis Pt-1C-BFP] gi|187975601|gb|EDU42227.1| isopentenyl-diphosphate Delta-isomerase 1 [Pyrenophora Pt-1C-BFP]
  misc_feature (4)..(255): NCBI GI: 169611682 Blast Desc: SNOG_08955 [Phaeosphaeria nodorum SN15] gi|111063003|gb|EAT84123.1| SNOG_08955 [Phaeosphaeria nodorum SN15]
  misc_feature (11)..(255): NCBI GI: 154299708 Blast Desc: conserved [Botryotinia fuckeliana B05.10] gi|150857170|gb|EDN32362.1| conserved [Botryotinia fuckeliana B05.10]
  misc_feature (3)..(255): NCBI GI: 119471862 Blast Desc: isopentenyl-diphosphate delta-isomerase [Neosartorya fischeri NRRL 181] gi|119406385|gb|EAW16336.1| isopentenyl-diphosphate delta-isomerase [Neosartorya fischeri
  misc_feature (3)..(255): NCBI GI: 145240455 Blast Desc: An08g07570 [Aspergillus niger] gi|134077392|emb|CAK40006.1| protein product [Aspergillus niger]
  misc_feature (3)..(255): NCBI GI: 255956785 Blast Desc: Pc21g21730 [Penicillium chrysogenum Wisconsin 54-1255] gi|211590856|emb|CAP97070.1| Pc21g21730 [Penicillium chrysogenum Wisconsin 54-1255]
  misc_feature (28)..(242): SWISSPROT Homolog: EC 5.3.3.2 Isopentenyl-diphosphate Delta-isomerase
  misc_feature: Useful for fungicidal and/or biocontrol applications
MTVTTTTTVTQATPSAETILRLFPDIDTSSSSLEGHDEEQIRLMDEVCIVLDNDDNPIGTASKKLCHLMTNIDKGLLHRAFSVFLFDDQNRLLLQQRATEKITFPDMWTNTCCSHPLHIPTETGSNLPDSIAGVKRAAQRKLEHELGIKTEQVPFEDFHFLTRIHYKAPSDGKWGEHEIDYILFIKANVDLNLNPNEVRDAKYVSPSDLKTLFKDPNLKFTPWFKLICESMLFEWWENLDSGLEKFTNEQEIRRM

SEQ ID NO: 7831 - DNA, 4239 bp, Muscodor strobelii
  misc_feature: SGI EST ID NO. CUFF.19512.0
  misc_feature: Variant of the nucleotide sequence at SEQ ID NO 7829
aagcgcggctgcaatcccataattgtaatgtttgagcttctttaaggcacctccttcaaggcatccttgtattccgcatctgctgatactagtttcagaaaaagctcagcggcgtttgtaacgtttacgcgttgacaggcgctggcagctcgtgcatctgattggctgtggtctttaaacttcattggctcatccttcgctttctactttattaacaacgccctctactacgttatacgcttgcgccagccccacgaacatcattattcacaatcacgcaagctccatctgcaatggcgagctccgtgcccattgcaggaagtgtcgggagaaattctctgaatttctcttcctcgttcacagcgggatctcctattgcccaggagatcctcgccagtgatctagcagagtattcagatgaagaggcagtcgagaacgatgattctgatgacgagtttggctatgtctctagctcagcgccggttctttacaagaacccgagtggtgtcgcctatgactacagacggcagagcatggtgaatgatatcatcagtgagccgatcttcacaagagaggaaattcagaaatctcgatccgcagaacgcagcttgctgagagataatcatttactgccgccgaaacatgggaatactggtatccttcataatctatttagcaccgaggtccgaaaagatgcagaatcacccggaagtcatcttggaccatctgaatcctcacctttgttgccaggggtcgctactccggatgccgaacatatcgatgcacaatgggaagccgctgttgctggtggtctcatagaaacaacttggcaacgagaagcgaaaaccatcgcctcttattcccgctctctggtcttgacttttgtattgcagtacagcatcaatataaccagtgttttcacagtggggaggctcggttcagtcgaactaggcgcagtttcgttgggcacaatgtctgcaaacattttctgctatgctttttttcagggcctttctacgagtctggacacactttgtgctcaggcttatggttctggtcgaaagcagctcgtgggcttgcaactgcagcggatgattttctttctatggctcttatctattcccctcgctgtgcttttcttcttcgctgaatatatcctcctagcgattattcccgaacccgactccgccaaattagctggcctctacctccgcgtggttctctttggcataccgggatacgcggcgttcgagggaggtaaacgtttcgtgcaagcccaagggctgtttgttgccacaacttacgtccttctgatcgctgcgccaataaatgtccttctcaattggctactggtctggcattttgagttgggtttcatcggcgcacccattgcagtggcgttcacacagaacctgatgccagtattgcttctcctatatgtgattttcgtcgatgggtcgcaatgctggtctggtatctcacgacgtgcttttaccaattggggacctatgatcaaattagcaattcccggtatgcttatggtggttgccgagtggcttgccttcgagatcctcacacttgcgtcgagccagtttggtccgtcgtatctggcagcgcagagtatacttgtcaccttaacgtcagcgacattcatgttgcccttccccgtgtctatagcagcttcaacacgaatcgccaatctcataggtgcgaatctggtcaaggctgcgcgcacatcggctaaagtggcgggaattgctggttgtttgcttggcctgattaacctcaccctccttgcgacattgcgatatcagctgcctagactgttcacggacgatgaagaagtcatctccattgtagcaacggtaatgcctctttgtgcagtgatgcagatttttgatggtttagctgcggttgcccacggtctgcttcgcgggatcggcaagcagtcgtttgggggctacgcaaatctcaccgcctactacattgttgccattcctttgtcgtttgcggccgcattcgcgttggattggaagctgatcggtctgtggcttggcaccacagtcggattgatgcttgtgtccgcagtcgaatattggtattgttacactagcgattgggaggtatctgttcgtgaagctgagcatcgcaacacgactggataggtaagattctgcttggatcttgataggttgagagactaggttgttcagaatgttctcgagttgtgccaccacattcagctctcaattgggccataatggctcccgatgccgtgcgcgcatcagcttaccgcatgtctacaagtacctaggaaggagcaaatgaatagaaaggcacgccgactggacaatacaaaaggcaggctgcgcgcaacaataccatcggtgatgtcgggaatctgaaacccgggattgtgcaaatgcaaaggcgacggatatctccgctcccgtatgcgtgcgtgtgcagtcgcgatggcatctccctgattgtaacattgtttgttacgaatgaggacatgttattattagtcgtaaacgggagtcgggggtcgggaatccttcatgagatgagggcgacctagcgtgaatccgctatgccgtggtctgtgccaggtcgttactgtatcatatggacgttggatggcagccgtgtgcagattgcaaatcagcgtgcgctaataaataagcaccatggactggccttgccccaatcatccatcctatgccgggctcgtaatcgggatctgtctcaactctgcacttttgaggagctaggggaactactagttcaggaaaagacccttgttgactgcgaggtggtgataataaagttaatggccacccctccacttgcctaaaccccaccaacaaccttggaagtcctctaggtcctcctctccctgcccttctcgtcgcaactcgcctcaccgactcacaaagcaaaagcacactcgcagttgggtcaagatgactgtgactaccaccaccaccgtcacgcaggccacgccctcggctgagacgatcctgcggctgttccccgatatcgacaccagctcctccagcctcgagggccacgatgaggaacaaatccgcctgatggacgaggtctgcatcgtcctcgacaatgacgacaaccccattggcaccgccagcaagaagctatgccatctcatgaccaacatcgacaagggcctccttcaccgcgccttctccgttttcctcttcgacgaccagaaccgattgttgctccagcaacgtgccaccgagaagatcacgttccccgacatgtggactaacacgtgctgttctcaccctctacacataccaaccgagacaggctccaacctgccggactccattgccggtgtcaagcgcgcggcccagcgtaagcttgagcatgagcttggcataaagacggaacaggtccctttcgaagacttccacttcctgacacgaatccactacaaggcgcccagcgatggcaaatggggcgagcatgagatcgactatatccttttcatcaaagcgaacgtggatctcaatctcaacccgaacgaagtgcgcgatgctaaatatgtctcgccaagcgatctcaagacgttgttcaaggatcccaatctgaagttcacgccatggttcaagcttatttgcgagtcgatgctctttgagtggtgggagaaccttgattctggcctcgagaaattcaccaatgagcaagagatcagacggatgtagataagaggacatcatttggtttagagcaagcaagcaaacaagaattaccagaccgcattggctcgcggggagcgcacagccggcgcacggggtggcttcgcgatgttacgccaatgcgagtgaagattgtctactcatagattccggggacgagcgagccaatggagcgatttttgagagcggcaggaaagatcatacatatacaaacgaatagagatctttggcttatcggtatacaacattgtggtgatacattgtcacagatggtagtcatcaatcattgaacaaactgaaagatccttggatcccatttgagtggcagttacctcgattggagccgtttcggggattagtcttccaacgggcttgtctgccagactatattctagtgccattcgtttattcccggcgcgcctcggttatctgtcgcgtatcttgataacttagttagttaatagctacgacttcgaccttccgagtggaaagcagtgccaggcaattg

SEQ ID NO: 7832 - DNA, 1872 bp, Muscodor strobelii
  misc_feature: SGI cDNA ID NO. 562384
  misc_feature: Encodes the peptide sequence at SEQ ID NO 7833
atggcgagctccgtgcccattgcaggaagtgtcgggagaaattctctgaatttctcttcctcgttcacagcgggatctcctattgcccaggagatcctcgccagtgatctagcagagtattcagatgaagaggcagtcgagaacgatgattctgatgacgagtttggctatgtctctagctcagcgccggttctttacaagaacccgagtggtgtcgcctatgactacagacggcagagcatggtgaatgatatcatcagtgagccgatcttcacaagagaggaaattcagaaatctcgatccgcagaacgcagcttgctgagagataatcatttactgccgccgaaacatgggaatactggtatccttcataatctatttagcaccgaggtccgaaaagatgcagaatcacccggaagtcatcttggaccatctgaatcctcacctttgttgccaggggtcgctactccggatgccgaacatatcgatgcacaatgggaagccgctgttgctggtggtctcatagaaacaacttggcaacgagaagcgaaaaccatcgcctcttattcccgctctctggtcttgacttttgtattgcagtacagcatcaatataaccagtgttttcacagtggggaggctcggttcagtcgaactaggcgcagtttcgttgggcacaatgtctgcaaacattttctgctatgctttttttcagggcctttctacgagtctggacacactttgtgctcaggcttatggttctggtcgaaagcagctcgtgggcttgcaactgcagcggatgattttctttctatggctcttatctattcccctcgctgtgcttttcttcttcgctgaatatatcctcctagcgattattcccgaacccgactccgccaaattagctggcctctacctccgcgtggttctctttggcataccgggatacgcggcgttcgagggaggtaaacgtttcgtgcaagcccaagggctgtttgttgccacaacttacgtccttctgatcgctgcgccaataaatgtccttctcaattggctactggtctggcattttgagttgggtttcatcggcgcacccattgcagtggcgttcacacagaacctgatgccagtattgcttctcctatatgtgattttcgtcgatgggtcgcaatgctggtctggtatctcacgacgtgcttttaccaattggggacctatgatcaaattagcaattcccggtatgcttatggtggttgccgagtggcttgccttcgagatcctcacacttgcgtcgagccagtttggtccgtcgtatctggcagcgcagagtatacttgtcaccttaacgtcagcgacattcatgttgcccttccccgtgtctatagcagcttcaacacgaatcgccaatctcataggtgcgaatctggtcaaggctgcgcgcacatcggctaaagtggcgggaattgctggttgtttgcttggcctgattaacctcaccctccttgcgacattgcgatatcagctgcctagactgttcacggacgatgaagaagtcatctccattgtagcaacggtaatgcctctttgtgcagtgatgcagatttttgatggtttagctgcggttgcccacggtctgcttcgcgggatcggcaagcagtcgtttgggggctacgcaaatctcaccgcctactacattgttgccattcctttgtcgtttgcggccgcattcgcgttggattggaagctgatcggtctgtggcttggcaccacagtcggattgatgcttgtgtccgcagtcgaatattggtattgttacactagcgattgggaggtatctgttcgtgaagctgagcatcgcaacacgactggatag

SEQ ID NO: 7833 - protein, 623 aa, Muscodor strobelii
  misc_feature: SGI Peptide ID NO. 562384
  misc_feature (192)..(352): Pfam Id: PF01554 Pfam Desc: MatE
  misc_feature (412)..(573): Pfam Id: PF01554 Pfam Desc: MatE
  misc_feature (16)..(623): NCBI GI: 164423798 Blast Desc: NCU07720 [Neurospora crassa OR74A] gi|157070236|gb|EAA32734.2| conserved [Neurospora crassa OR74A]
  misc_feature (1)..(623): NCBI GI: 261359758 Blast Desc: multidrug and toxin extrusion protein [Verticillium albo-atrum VaMs.102]
  misc_feature (18)..(592): NCBI GI: 256726879 Blast Desc: [Nectria haematococca mpVI 77-13-4]
  misc_feature (3)..(623): NCBI GI: 171690534 Blast Desc: protein product [Podospora anserina] gi|170945215|emb|CAP71326.1| protein product [Podospora anserina]
  misc_feature (19)..(619): NCBI GI: 171695788 Blast Desc: protein product [Podospora anserina] gi|170948136|emb|CAP60300.1| protein product [Podospora anserina]
  misc_feature (18)..(592): NCBI GI: 46123591 Blast Desc: FG06173.1 [Gibberella zeae PH-1]
  misc_feature (20)..(619): NCBI GI: 85111887 Blast Desc: NCU00755 [Neurospora crassa OR74A] gi|28925921|gb|EAA34916.1| conserved [Neurospora crassa OR74A]
  misc_feature (14)..(623): NCBI GI: 156049807 Blast Desc: SS1G_08611 [Sclerotinia sclerotiorum 1980] gi|154693009|gb|EDN92747.1| SS1G_08611 [Sclerotinia sclerotiorum 1980]
  misc_feature (14)..(619): NCBI GI: 171681220 Blast Desc: protein product [Podospora anserina] gi|170940568|emb|CAP65796.1| protein product [Podospora anserina]
  misc_feature (1)..(620): NCBI GI: 67516599 Blast Desc: AN0581.2 [Aspergillus nidulans FGSC A4] gi|40747524|gb|EAA66680.1| AN0581.2 [Aspergillus nidulans FGSC A4] gi|259489154|tpe|CBF89192.1| TPA: MATE efflux family protein
MASSVPIAGSVGRNSLNFSSSFTAGSPIAQEILASDLAEYSDEEAVENDDSDDEFGYVSSSAPVLYKNPSGVAYDYRRQSMVNDIISEPIFTREEIQKSRSAERSLLRDNHLLPPKHGNTGILHNLFSTEVRKDAESPGSHLGPSESSPLLPGVATPDAEHIDAQWEAAVAGGLIETTWQREAKTIASYSRSLVLTFVLQYSINITSVFTVGRLGSVELGAVSLGTMSANIFCYAFFQGLSTSLDTLCAQAYGSGRKQLVGLQLQRMIFFLWLLSIPLAVLFFFAEYILLAIIPEPDSAKLAGLYLRVVLFGIPGYAAFEGGKRFVQAQGLFVATTYVLLIAAPINVLLNWLLVWHFELGFIGAPIAVAFTQNLMPVLLLLYVIFVDGSQCWSGISRRAFTNWGPMIKLAIPGMLMVVAEWLAFEILTLASSQFGPSYLAAQSILVTLTSATFMLPFPVSIAASTRIANLIGANLVKAARTSAKVAGIAGCLLGLINLTLLATLRYQLPRLFTDDEEVISIVATVMPLCAVMQIFDGLAAVAHGLLRGIGKQSFGGYANLTAYYIVAIPLSFAAAFALDWKLIGLWLGTTVGLMLVSAVEYWYCYTSDWEVSVREAEHRNTTG

SEQ ID NO: 7834 - DNA, 4239 bp, Muscodor strobelii; identical to SEQ ID NO: 7831
  misc_feature: SGI EST ID NO. CUFF.19512.0
  misc_feature: Variant of the nucleotide sequence at SEQ ID NO 7832

SEQ ID NO: 7835 - DNA, 2082 bp, Muscodor strobelii
  misc_feature: SGI cDNA ID NO. 562385
  misc_feature: Encodes the peptide sequence at SEQ ID NO 7836
atggataaggtgagacggcttttcatgagcgaggaggagctcggcaagaaggacgacgaccacaagcccgtcaagatgcccggccaccgccgctcctcctcctggaagcccgcgcgggtgccggcccgacgctccatgcggcgcattgtcctcctcttcgtcgccgccgccttggtctacttcttcgttgccaacatccccgtgctcggccccgatgcgagaatgcgccgccccatataccctccctccgacgaattgcgacccgttctgcctcatgatgctcctccacagtctggcactccgcctcctgaccagctgccgcacgccccagatcctgttatgccgccggctcgactgcaggacaacgtggacggggcctacaacggttttattcggtatcctgctctagctgagtcgttgcaggctattgttgctaccagagggagtcagcctacgaaccagaatgtccttttcgcggccgcgagtctgaagagtgccgcttcgctgctaccagtcgcttgtcaaatgggaagggaagccaataactacgtccatttcgcgcttctgggccgcagcgccatccacctcgaacagctgcaaaggatcaatggtatagacaagacttgtccggtgatatttcacgacgcccgtcccgatcttgccactgcgtcttccgatataagactagaaaactctgtgtttcgaggcatgcatcatatcaactcctacatgcatccacaagccatcatacttgatgatctaagtgaagaagacagctactttgcccgtggtatcaaacgtcatctagcaaagttcaagaccgcattgattgaatatccctctaaagcagtgcgatctctatcttggataacaaagctagacagcgcggcgcttcgtatgtgggataaagtccatgtcgaaataataattcaagcggcgcccgactctgcaggaggtctaatacggctacttaagtctctcagtgccgctgactacacttcaagtgctgtcccacatattaccatcgatctgccataccagacacaggcccccataacaaaatatctggaatctttcacatggccacctttgcatgctcctaatccgaataacgctcgttttctttccattagacatcgactttccaaaaagcactccgacggagaacaagtctccacacgtttcttcgaatctttctggccttcgcatccacagcgcactcatgtacttgtactttcacctcaagtcgagctttcaccacaatattatcattatctccgctttatgttgcttcgataccgatactcttcgtccggaacatttgctcaccgggatcgccagctttttggcattagcttggagttgccttcactttccattgactccgaacgatcgttcactccccctctattactagactctgatatcacgaaccccaccgaagttgggaattcgaccccctttctttggcaagcgcccacgagtaatgctgtacttctcctcggcgagaggtgggcagaactccatgattttgtacacagatcgtcggaaacaagaagcgagctccacgatatctcgacgctcgtctcagagaagtggtacagtaagcagcatccatcttggctcgagtatgccctgagattgtcgcggataagaggctattggttcctctatccaggagcagatcttgcgcaaaatgcagccatcgtacatggcgagttatacaacataccagaagaatatcttgacgagagtccttccaaggaagatgactccgagggcactgaaaacgaggatttcggagagatccggcgaaaagcccgttcgaatcccgaaatacaattgtctcagatctcactactgatagacacactcccaaataatgggaaacttcgaacagttgacgagcttcccatcctatcgtgggatggccaaaggacgagcatcgacgaactatcttcccgggctctggctttcgaattgaaatttaaggacgaagtcggtcactgtgatactaactctcctgctggacacaagcgtcaagagcctttgtccacttcagatttattctgtaatgtctag

SEQ ID NO: 7836 - protein, 693 aa, Muscodor strobelii
  misc_feature: SGI Peptide ID NO. 562385
  misc_feature (7)..(691): NCBI GI: 116196078 Blast Desc: CHGG_04637 [Chaetomium globosum CBS 148.51] gi|88180550|gb|EAQ88018.1| CHGG_04637 [Chaetomium globosum CBS 148.51]
  misc_feature (7)..(692): NCBI GI: 261359744 Blast Desc: conserved [Verticillium albo-atrum VaMs.102]
  misc_feature (7)..(668): NCBI GI: 164423803 Blast Desc: NCU07715 [Neurospora crassa OR74A] gi|157070238|gb|EAA33065.2| [Neurospora crassa OR74A]
  misc_feature (6)..(692): NCBI GI: 156049269 Blast Desc: SS1G_08341 [Sclerotinia sclerotiorum 1980] gi|154692740|gb|EDN92478.1| SS1G_08341 [Sclerotinia sclerotiorum 1980]
  misc_feature (6)..(693): NCBI GI: 256726936 Blast Desc: NECHADRAFT_91011 [Nectria haematococca mpVI 77-13-4]
  misc_feature (1)..(691): NCBI GI: 145612443 Blast Desc: MGG_07127 [Magnaporthe grisea 70-15] gi|145019599|gb|EDK03827.1| MGG_07127 [Magnaporthe grisea 70-15]
  misc_feature (6)..(691): NCBI GI: 46136429 Blast Desc: FG09730.1 [Gibberella zeae PH-1]
  misc_feature (10)..(668): NCBI GI: 171690524 Blast Desc: protein product [Podospora anserina] gi|170945210|emb|CAP71321.1| protein product [Podospora anserina]
  misc_feature (6)..(692): NCBI GI: 154317419 Blast Desc: BC1G_03061 [Botryotinia fuckeliana B05.10] gi|150844235|gb|EDN19428.1| BC1G_03061 [Botryotinia fuckeliana B05.10]
  misc_feature (5)..(691): NCBI GI: 169621406 Blast Desc: SNOG_13912 [Phaeosphaeria nodorum SN15] gi|111057417|gb|EAT78537.1| SNOG_13912 [Phaeosphaeria nodorum SN15]
MDKVRRLFMSEEELGKKDDDHKPVKMPGHRRSSSWKPARVPARRSMRRIVLLFVAAALVYFFVANIPVLGPDARMRRPIYPPSDELRPVLPHDAPPQSGTPPPDQLPHAPDPVMPPARLQDNVDGAYNGFIRYPALAESLQAIVATRGSQPTNQNVLFAAASLKSAASLLPVACQMGREANNYVHFALLGRSAIHLEQLQRINGIDKTCPVIFHDARPDLATASSDIRLENSVFRGMHHINSYMHPQAIILDDLSEEDSYFARGIKRHLAKFKTALIEYPSKAVRSLSWITKLDSAALRMWDKVHVEIIIQAAPDSAGGLIRLLKSLSAADYTSSAVPHITIDLPYQTQAPITKYLESFTWPPLHAPNPNNARFLSIRHRLSKKHSDGEQVSTRFFESFWPSHPQRTHVLVLSPQVELSPQYYHYLRFMLLRYRYSSSGTFAHRDRQLFGISLELPSLSIDSERSFTPPLLLDSDITNPTEVGNSTPFLWQAPTSNAVLLLGERWAELHDFVHRSSETRSELHDISTLVSEKWYSKQHPSWLEYALRLSRIRGYWFLYPGADLAQNAAIVHGELYNIPEEYLDESPSKEDDSEGTENEDFGEIRRKARSNPEIQLSQISLLIDTLPNNGKLRTVDELPILSWDGQRTSIDELSSRALAFELKFKDEVGHCDTNSPAGHKRQEPLSTSDLFCNV

SEQ ID NO: 7837 - DNA, 3928 bp, Muscodor strobelii
  misc_feature: SGI EST ID NO. CUFF.19496.1
  misc_feature: Variant of the nucleotide sequence at SEQ ID NO 7835
gagaatttaaatacatgtatatttgggtaaactacatacaggtggatagagttaaggtacaatataaagacgggatcaacccaatacatggtagcttgccgaggcttccggataatcatgacccccgagctttgagtagattgcaaataaacgatccactaaacgtagtcttagttgtgaagtcctgatatcgaatagacaaggacattgagtggcgactagaaagattcgaatttgttggtctccaaagaaaggacgtgggcaagtccgctgagctgctcggcgggcagatgcagcttggcggttcggcatctcattagagtcgggaccccatacaagccgcaggacaggggagccccttagcacccatttctatgccccattaggtaagtacagtcccagcagcagggaggttgagaggagaatggaagggtccagggcgacactgtccccgactgcgacacgccgtgtggtataatcgctggagcacctggcaagcggccacggagatcgaggtgaaccgatctttgcaatacaaatcactccatccatgcttgattattggagaacaagcgccagatataacgttgcttgcttgcgaaaggggaggaaaaggtaacggggcgatttgactattcgattgtcctgcaagcgcataggctcgccagtcgagctagcttcgctgcccggccgtccagtcgagaacagctcgccttccgaatctcacgatatgtcacatgaagtaccaccgggctctttctcgacctccatgtaaccgccggcccgcccccagtgtcctttcgtttgccgccggtcgtcgtcgttgccgtgggaggcgctctgggtcggcatggataaggtgagacggcttttcatgagcgaggaggagctcggcaagaaggacgacgaccacaagcccgtcaagatgcccggccaccgccgctcctcctcctggaagcccgcgcgggtgccggcccgacgctccatgcggcgcattgtcctcctcttcgtcgccgccgccttggtctacttcttcgttgccaacatccccgtgctcggccccgatgcgagaatgcgccgccccatataccctccctccgacgaattgcgacccgttctgcctcatgatgctcctccacagtctggcactccgcctcctgaccagctgccgcacgccccagatcctgttatgccgccggctcgactgcaggacaacgtggacggggcctacaacggttttattcggtatcctgctctagctgagtcgttgcaggctattgttgctaccagagggagtcagcctacgaaccagaatgtccttttcgcggccgcgagtctgaagagtgccgcttcgctgctaccagtcgcttgtcaaatgggaagggaagccaataactacgtccatttcgcgcttctgggccgcagcgccatccacctcgaacagctgcaaaggatcaatggtatagacaagacttgtccggtgatatttcacgacgcccgtcccgatcttgccactgcgtcttccgatataagactagaaaactctgtgtttcgaggcatgcatcatatcaactcctacatgcatccacaagccatcatacttgatgatctaagtgaagaagacagctactttgcccgtggtatcaaacgtcatctagcaaagttcaagaccgcattgattgaatatccctctaaagcagtgcgatctctatcttggataacaaagctagacagcgcggcgcttcgtatgtgggataaagtccatgtcgaaataataattcaagcggcgcccgactctgcaggaggtctaatacggctacttaagtctctcagtgccgctgactacacttcaagtgctgtcccacatattaccatcgatctgccataccagacacaggcccccataacaaaatatctggaatctttcacatggccacctttgcatgctcctaatccgaataacgctcgttttctttccattagacatcgactttccaaaaagcactccgacggagaacaagtctccacacgtttcttcgaatctttctggccttcgcatccacagcgcactcatgtacttgtactttcacctcaagtcgagctttcaccacaatattatcattatctccgctttatgttgcttcgataccgatactcttcgtccggaacatttgctcaccgggatcgccagctttttggcattagcttggagttgccttcactttccattgactccgaacgatcgttcactccccctctattactagactctgatatcacgaaccccaccgaagttgggaattcgaccccctttctttggcaagcgcccacgagtaatgctgtacttctcctcggcgagaggtgggcagaactccatgattttgtacacagatcgtcggaaacaagaagcgagctccacgatatctcgacgctcgtctcagagaagtggtacagtaagcagcatccatcttggctcgagtatgccctgagattgtcgcggataagaggctattggttcctctatccaggagcagatcttgcgcaaaatgcagccatcgtacatggcgagttatacaacataccagaagaatatcttgacgagagtccttccaaggaagatgactccgagggcactgaaaacgaggatttcggagagatccggcgaaaagcccgttcgaatcccgaaatacaattgtctcagatctcactactgatagacacactcccaaataatgggaaacttcgaacagttgacgagcttcccatcctatcgtgggatggccaaaggacgagcatcgacgaactatcttcccgggctctggctttcgaattgaaatttaaggacgaagtcggtcactgtgatactaactctcctgctggacacaagcgtcaagagcctttgtccacttcagatttattctgtaatgtctagacaactgcaagagtatctagagcaacaagtcacttataatactgctatataaagtttcaaaaatgcatgctaaattccaagcgtctttcataagcatcgaccctgcgatgaaattgtgaagtgataatcttgaaatgttgttgtcaaaatccagtccaatattccttttgcctacttttgatcgcaacggccgccctttttgtattcctatgttggatatgtacaggtctttcccacttaaaactttaagtgcgcccccatcaacagtagaccctatctcgcacaacgccaaaccgggagcctagaaccagatcactattttcatcagattctgatgaaatggcttcatcctcaagcactgtagtctcctccagtgcagagcacgtatgtcgcctgagagtggtaatggcttatggcccgaggcagcgaccagacatggcaatcgccaaatcttctgaatgtccgaacaagtattcctcatcctacaagccattcattaatcgaatccaaacatcgataaggctaaaattgcaagtattccaaatcgcccggcaattcgccataccgcaccgcacacactcatctatactgaatcttctcaatgaccaataaaataacacaagtccccgtaatcgaaatagcaataagactcatgatcgactgtgtgcgccacccactctggacgattgctgcttttcgtccgtacttgttcaccgtcttgatgtagttacctagccctgcggctaaacatgctgcggagagaagcacgaagacgagccctaacggcatggccatccgcttctcgagtgctgttggggcagaacgtaggtggaaggatagtgcgattgctattgacacgatggacatatagactgagaggcgggcgtaggataggaaagctaacgtttggttagtggtgatgcactagtcatggaaggacggatgaaggttgcgtgtttgaatgcctttcccccttttgcttgaggctacgttttg

SEQ ID NO: 7838 - DNA, 654 bp, Muscodor strobelii
  misc_feature: SGI cDNA ID NO. 562386
  misc_feature: Encodes the peptide sequence at SEQ ID NO 7839
atgtcgcccaaggaggagaacgatgacaaagatgcgctcgatgcgctggaatcagaggctaaggaattcgacaaggatgccgagatagatcgtatactcaaagccttccgtcttgatgcctacgccgtcctaggccttatgccaggagtcccggagtctgatatcaagatcacctatcgcaaaaagtcgctactgatccatccggacaagaccaagaacccccaggcgcccgatgccttcgaccgcctcaagaaagcccagaccgagctgatggacgagaagcaccgcgagcgcctcgacgaagccatcgccgacgcccgcatgttgctgatccgcgagaacaagtggaccgtcgacagccccgagctcaagaccgactcatttgccaacaagtggcgcgacaagacccgggaggtcctcatcgacaacgagatgcgccgcaagcgccagatgaaggcccagatgcaggaggaaggtcgcgagcagcgcagggccgacgaggagctagaggagcgcaagcgcaagcgccagcacgagcaggactgggagtccacacgcgaccagcgcatcgacagctggcgtcagttccagaagggcaaggggggcgatgacggcggcaagaagaaaaagaagaagctcaagcccatcggttga

SEQ ID NO: 7839 - protein, 217 aa, Muscodor strobelii
  misc_feature: SGI Peptide ID NO. 562386
  misc_feature (39)..(100): Pfam Id: PF00226 Pfam Desc: DnaJ domain
  misc_feature (1)..(217): NCBI GI: 256726951 Blast Desc: NECHADRAFT_76447 [Nectria haematococca mpVI 77-13-4]
  misc_feature (1)..(197): NCBI GI: 46136503 Blast Desc: FG09767.1 [Gibberella zeae PH-1]
  misc_feature (8)..(217): NCBI GI: 116196074 Blast Desc: CHGG_04635 [Chaetomium globosum CBS 148.51] gi|88180548|gb|EAQ88016.1| CHGG_04635 [Chaetomium globosum CBS 148.51]
  misc_feature (11)..(197): NCBI GI: 261359742 Blast Desc: DnaJ domain-containing protein [Verticillium albo-atrum VaMs.102]
  misc_feature (8)..(203): NCBI GI: 171690520 Blast Desc: protein product [Podospora anserina] gi|170945208|emb|CAP71319.1| protein product [Podospora anserina]
  misc_feature (8)..(196): NCBI GI: 39944338 Blast Desc: MGG_04180 [Magnaporthe grisea 70-15] gi|145014916|gb|EDJ99484.1| MGG_04180 [Magnaporthe grisea 70-15]
  misc_feature (8)..(217): NCBI GI: 85107035 Blast Desc: NCU07713 [Neurospora crassa OR74A] gi|28923901|gb|EAA33063.1| conserved [Neurospora crassa OR74A]
  misc_feature (8)..(196): NCBI GI: 156049425 Blast Desc: SS1G_08419 [Sclerotinia sclerotiorum 1980] gi|154692818|gb|EDN92556.1| SS1G_08419 [Sclerotinia sclerotiorum 1980]
  misc_feature (7)..(200): NCBI GI: 119471801 Blast Desc: DnaJ domain protein [Neosartorya fischeri NRRL 181] gi|119406378|gb|EAW16329.1| DnaJ domain protein [Neosartorya fischeri NRRL 181]
  misc_feature (7)..(197): NCBI GI: 212539818 Blast Desc: DnaJ domain protein [Penicillium marneffei ATCC 18224] gi|210067363|gb|EEA21455.1| DnaJ domain protein [Penicillium marneffei ATCC 18224]
MSPKEENDDKDALDALESEAKEFDKDAEIDRILKAFRLDAYAVLGLMPGVPESDIKITYRKKSLLIHPDKTKNPQAPDAFDRLKKAQTELMDEKHRERLDEAIADARMLLIRENKWTVDSPELKTDSFANKWRDKTREVLIDNEMRRKRQMKAQMQEEGREQRRADEELEERKRKRQHEQDWESTRDQRIDSWRQFQKGKGGDDGGKKKKKKLKPIG

SEQ ID NO: 7840 - DNA, 2711 bp, Muscodor strobelii
  misc_feature: SGI EST ID NO. CUFF.19520.0
  misc_feature: Variant of the nucleotide sequence at SEQ ID NO 7838
ccaacgaccaggtgcgttatacatcttacacatagacagcacgttaccttccaacatccgctatgtcgcccaaggaggagaacgatgacaaagatgcgctcgatgcgctggaatcagaggctaaggaattcgacaaggatgccgagatagatcgtatactcaaagccttccgtcttgatgcctacgccgtcctaggccttatgccaggagtcccggagtctgatatcaagatcacctatcgcaaaaagtcgctactgatccatccggacaagaccaagaacccccaggcgcccgatgccttcgaccgcctcaagaaagcccagaccgagctgatggacgagaagcaccgcgagcgcctcgacgaagccatcgccgacgcccgcatgttgctgatccgcgagaacaagtggaccgtcgacagccccgagctcaagaccgactcatttgccaacaagtggcgcgacaagacccgggaggtcctcatcgacaacgagatgcgccgcaagcgccagatgaaggcccagatgcaggaggaaggtcgcgagcagcgcagggccgacgaggagctagaggagcgcaagcgcaagcgccagcacgagcaggactgggagtccacacgcgaccagcgcatcgacagctggcgtcagttccagaagggcaaggggggcgatgacggcggcaagaagaaaaagaagaagctcaagcccatcggttgattcggtcgatgatcattcggattaccagtcggataatcagtcgggttgatgcatggttaattatacccatacacagtcgtcgtactgtcagcttatacacgaggcaacacgaggctcggaagtgagtttttattgatagatcaatttctctttttatgaccctaactcccttagttcttgacactcacgctttgcctatcactttgagcccctggtcacgcaatcgtggcttgatatggaggtaagttcccaccaaactattagtcgctacatatttgagaccattacctactcttgaactattccagttatggcggtccatgtagagcatgatctcagcttctcccgacttgattactgcttcctcgttacaccactgcccaatatcctcatgaaggtcggtgcttattcttatactggataaatctgaccaggttcagacttgcttcctctgctcgagtccgcagttctgtcgaatttcttttgtctatcgtcttcaccatcgacttgaccttcggtattgtggcttccatgtgtttcaagaagttatctgcccagaacaccggcttgtcgtggacgctgttttcgtccccgtaaatgtcgaacaattgattaagtgcctctacggcgtcggctgctggcgtttctggaagccctgtcaccacagtcacaaggaagacgccaatctcgcggtttaactcgaccagtgccgggtcgagagcaagctggcccagtactccgatacacctaactcctagactctggaatgcgtcttctggatttccggctatgttccgagatgcgtggtagagtgacatgaactttttttcttcctgaccctctaggtacttctcaccatgcagggtgcgcgtcaaagcccacgcgagactggtgaccactgtagccacttcgacatctgatgtgtcacttgcaagtactggagctattgctctctgccaaatgagttgagcgactggaacccaagcatgtcttacggcggcgtttgccccttcgttgaagtcgatacagctgatagtccaggcgcagttgtttaatgtggagagagcgtgtgtacgtatcatggtgcccgattcgtcctggccttggacactgttaaagacgttgagaatttgaggtatcgctctttgaatgagctctttcaacgttggcagatcgtcgatacccgaaagcgcttcactgtcgtcaactcctgtgaccatttccatatctgcttcaagctcgtcctcgtccatttcatcgtcgtcatcctcctctagcccatcatggccagaggattcgccatcttcgtccgcatccatggcatcgtctttctcgactggtccccgctgtaccttatccttggatgatccgagagaatcctcgagagttgtgccgattgacgctagaacctcgagagctacccgtagaatgtctattgaatccgtggcaccgtgaccgttggccgtcgtaatgctcaaagttgcgcgttctagggcatgtgacaagattggaacaagcacggcgtcgcaagcatggtctaagccggggcgctggtcattccacttcataagcgagaagacattgtgcagaaccccacaagcaagaacactcttgaaaccgtcatcaccctttatggaggttagagccttgtagcattgtgtgttctcgaggatgttgtcgacaaatgcgcggttgtcttccgacagagtgatcatgcatgacagcacactgttcaagactgtttccgtagtcgccttattggagagcaacgtaaaaagaaagcgattaatgtttgcgctaccgctaatcgcgatcagtgcttcgtcatgagcctctgccaatgaagacaggataaccgcgagtgactcagcaatattcgagacgaaatcctgctcgattttgggtctcttggtgaagggcggagttgatgaggagagagtctcggtggtctatgattgcaatcagactcgtgttttgataaggaccatacgtgtg

SEQ ID NO: 7841 - DNA, 516 bp, Muscodor strobelii
  misc_feature: SGI cDNA ID NO. 562387
  misc_feature: Encodes the peptide sequence at SEQ ID NO 7842
atgccaggagtcccggagtctgatatcaagatcacctatcgcaaaaagtcgctactgatccatccggacaagaccaagaacccccaggcgcccgatgccttcgaccgcctcaagaaagcccagaccgagctgatggacgagaagcaccgcgagcgcctcgacgaagccatcgccgacgcccgcatgttgctgatccgcgagaacaagtggaccgtcgacagccccgagctcaagaccgactcatttgccaacaagtggcgcgacaagacccgggaggtcctcatcgacaacgagatgcgccgcaagcgccagatgaaggcccagatgcaggaggaaggtcgcgagcagcgcagggccgacgaggagctagaggagcgcaagcgcaagcgccagcacgagcaggactgggagtccacacgcgaccagcgcatcgacagctggcgtcagttccagaagggcaaggggggcgatgacggcggcaagaagaaaaagaagaagctcaagcccatcggttga

SEQ ID NO: 7842 - protein, 171 aa, Muscodor strobelii
  misc_feature: SGI Peptide ID NO. 562387
  misc_feature (2)..(54): Pfam Id: PF00226 Pfam Desc: DnaJ domain
  misc_feature (6)..(54): Pfam Id: PF00226 Pfam Desc: DnaJ domain
  misc_feature (2)..(171): NCBI GI: 256726951 Blast Desc: NECHADRAFT_76447 [Nectria haematococca mpVI 77-13-4]
  misc_feature (2)..(171): NCBI GI: 116196074 Blast Desc: CHGG_04635 [Chaetomium globosum CBS 148.51] gi|88180548|gb|EAQ88016.1| CHGG_04635 [Chaetomium globosum CBS 148.51]
  misc_feature (2)..(151): NCBI GI: 46136503 Blast Desc: FG09767.1 [Gibberella zeae PH-1]
  misc_feature (2)..(151): NCBI GI: 261359742 Blast Desc: DnaJ domain-containing protein [Verticillium albo-atrum VaMs.102]
  misc_feature (2)..(171): NCBI GI: 85107035 Blast Desc: NCU07713 [Neurospora crassa OR74A] gi|28923901|gb|EAA33063.1| conserved [Neurospora crassa OR74A]
  misc_feature (2)..(157): NCBI GI: 171690520 Blast Desc: protein product [Podospora anserina] gi|170945208|emb|CAP71319.1| protein product [Podospora anserina]
  misc_feature (2)..(150): NCBI GI: 39944338 Blast Desc: MGG_04180 [Magnaporthe grisea 70-15] gi|145014916|gb|EDJ99484.1| MGG_04180 [Magnaporthe grisea 70-15]
  misc_feature (2)..(150): NCBI GI: 156049425 Blast Desc: SS1G_08419 [Sclerotinia sclerotiorum 1980] gi|154692818|gb|EDN92556.1| SS1G_08419 [Sclerotinia sclerotiorum 1980]
  misc_feature (2)..(171): NCBI GI: 169608059 Blast Desc: SNOG_07096 [Phaeosphaeria nodorum SN15] gi|160701549|gb|EAT85747.2| SNOG_07096 [Phaeosphaeria nodorum SN15]
  misc_feature (2)..(154): NCBI GI: 21627811 Blast Desc: DNA j domain containing protein [Aspergillus fumigatus]
MPGVPESDIKITYRKKSLLIHPDKTKNPQAPDAFDRLKKAQTELMDEKHRERLDEAIADARMLLIRENKWTVDSPELKTDSFANKWRDKTREVLIDNEMRRKRQMKAQMQEEGREQRRADEELEERKRKRQHEQDWESTRDQRIDSWRQFQKGKGGDDGGKKKKKKLKPIG

SEQ ID NO: 7843 - DNA, 2711 bp, Muscodor strobelii; identical to SEQ ID NO: 7840
  misc_feature: SGI EST ID NO. CUFF.19520.0
  misc_feature: Variant of the nucleotide sequence at SEQ ID NO 7841

SEQ ID NO: 7844 - DNA, 1326 bp, Muscodor strobelii
  misc_feature: SGI cDNA ID NO. 562388
  misc_feature: Encodes the peptide sequence at SEQ ID NO 7845
atgatcactctgtcggaagacaaccgcgcatttgtcgacaacatcctcgagaacacacaatgctacaaggctctaacctccataaagggtgatgacggtttcaagagtgttcttgcttgtggggttctgcacaatgtcttctcgcttatgaagtggaatgaccagcgccccggcttagaccatgcttgcgacgccgtgcttgttccaatcttgtcacatgccctagaacgcgcaactttgagcattacgacggccaacggtcacggtgccacggattcaatagacattctacgggtagctctcgaggttctagcgtcaatcggcacaactctcgaggattctctcggatcatccaaggataaggtacagcggggaccagtcgagaaagacgatgccatggatgcggacgaagatggcgaatcctctggccatgatgggctagaggaggatgacgacgatgaaatggacgaggacgagcttgaagcagatatggaaatggtcacaggagttgacgacagtgaagcgctttcgggtatcgacgatctgccaacgttgaaagagctcattcaaagagcgatacctcaaattctcaacgtctttaacagtgtccaaggccaggacgaatcgggcaccatgatacgtacacacgctctctccacattaaacaactgcgcctggactatcagctgtatcgacttcaacgaaggggcaaacgccgccgtaagacatgcttgggttccagtcgctcaactcatttggcagagagcaatagctccagtacttgcaagtgacacatcagatgtcgaagtggctacagtggtcaccagtctcgcgtgggctttgacgcgcaccctgcatggtgagaagtacctagagggtcaggaagaaaaaaagttcatgtcactctaccacgcatctcggaacatagccggaaatccagaagacgcattccagagtctaggagttaggtgtatcggagtactgggccagcttgctctcgacccggcactggtcgagttaaaccgcgagattggcgtcttccttgtgactgtggtgacagggcttccagaaacgccagcagccgacgccgtagaggcacttaatcaattgttcgacatttacggggacgaaaacagcgtccacgacaagccggtgttctgggcagataacttcttgaaacacatggaagccacaataccgaaggtcaagtcgatggtgaagacgatagacaaaagaaattcgacagaactgcggactcgagcagaggaagcaagtctgaacctggtcagatttatccagtataagaataagcaccgaccttcatga

SEQ ID NO: 7845 - protein, 441 aa, Muscodor strobelii
  misc_feature: SGI Peptide ID NO. 562388
  misc_feature (1)..(441): NCBI GI: 39971621 Blast Desc: MGG_07126 [Magnaporthe grisea 70-15] gi|145019598|gb|EDK03826.1| MGG_07126 [Magnaporthe grisea 70-15]
  misc_feature (1)..(441): NCBI GI: 154299706 Blast Desc: BC1G_11479 [Botryotinia fuckeliana B05.10] gi|150857169|gb|EDN32361.1| BC1G_11479 [Botryotinia fuckeliana B05.10]
  misc_feature (1)..(441): NCBI GI: 156049225 Blast Desc: SS1G_08319 [Sclerotinia sclerotiorum 1980] gi|154692718|gb|EDN92456.1| SS1G_08319 [Sclerotinia sclerotiorum 1980]
  misc_feature (1)..(440): NCBI GI: 116196076 Blast Desc: CHGG_04636 [Chaetomium globosum CBS 148.51] gi|88180549|gb|EAQ88017.1| CHGG_04636 [Chaetomium globosum CBS 148.51]
  misc_feature (1)..(440): NCBI GI: 261359743 Blast Desc: conserved [Verticillium albo-atrum VaMs.102]
  misc_feature (1)..(440): NCBI GI: 85107040 Blast Desc: NCU07714 [Neurospora crassa OR74A] gi|28923902|gb|EAA33064.1| [Neurospora crassa OR74A]
  misc_feature (1)..(440): NCBI GI: 46136427 Blast Desc: FG09729.1 [Gibberella zeae PH-1]
  misc_feature (1)..(440): NCBI GI: 256727503 Blast Desc: [Nectria haematococca mpVI 77-13-4]
  misc_feature (1)..(440): NCBI GI: 171690522 Blast Desc: protein product [Podospora anserina] gi|170945209|emb|CAP71320.1| protein product [Podospora anserina]
  misc_feature (143)..(441): NCBI GI: 19112990 Blast Desc: armadillo repeat protein, biological role [Schizosaccharomyces pombe] gi|74638751|sp|Q9P7W7.1|YGQ3_SCHPO RecName: Full=Uncharacterized ARM-like repeat-containing protein
MITLSEDNRAFVDNILENTQCYKALTSIKGDDGFKSVLACGVLHNVFSLMKWNDQRPGLDHACDAVLVPILSHALERATLSITTANGHGATDSIDILRVALEVLASIGTTLEDSLGSSKDKVQRGPVEKDDAMDADEDGESSGHDGLEEDDDDEMDEDELEADMEMVTGVDDSEALSGIDDLPTLKELIQRAIPQILNVFNSVQGQDESGTMIRTHALSTLNNCAWTISCIDFNEGANAAVRHAWVPVAQLIWQRAIAPVLASDTSDVEVATVVTSLAWALTRTLHGEKYLEGQEEKKFMSLYHASRNIAGNPEDAFQSLGVRCIGVLGQLALDPALVELNREIGVFLVTVVTGLPETPAADAVEALNQLFDIYGDENSVHDKPVFWADNFLKHMEATIPKVKSMVKTIDKRNSTELRTRAEEASLNLVRFIQYKNKHRPS

SEQ ID NO: 7846 - DNA, 2787 bp, Muscodor strobelii
  misc_feature: SGI EST ID NO. CUFF.19521.1
  misc_feature: Variant of the nucleotide sequence at SEQ ID NO 7844
gaagaggcagatttctgcgttcacctgtatcgactggacataatcacggccattgagcacgctgctatcaagaccaccgagactctctcctcatcaactccgcccttcaccaagagacccaaaatcgagcaggatttcgtctcgaatattgctgagtcactcgcggttatcctgtcttcattggcagaggctcatgacgaagcactgatcgcgattagcggtagcgcaaacattaatcgctttctttttacgttgctctccaataaggcgactacggaaacagtcttgaacagtgtgctgtcatgcatgatcactctgtcggaagacaaccgcgcatttgtcgacaacatcctcgagaacacacaatgctacaaggctctaacctccataaagggtgatgacggtttcaagagtgttcttgcttgtggggttctgcacaatgtcttctcgcttatgaagtggaatgaccagcgccccggcttagaccatgcttgcgacgccgtgcttgttccaatcttgtcacatgccctagaacgcgcaactttgagcattacgacggccaacggtcacggtgccacggattcaatagacattctacgggtagctctcgaggttctagcgtcaatcggcacaactctcgaggattctctcggatcatccaaggataaggtacagcggggaccagtcgagaaagacgatgccatggatgcggacgaagatggcgaatcctctggccatgatgggctagaggaggatgacgacgatgaaatggacgaggacgagcttgaagcagatatggaaatggtcacaggagttgacgacagtgaagcgctttcgggtatcgacgatctgccaacgttgaaagagctcattcaaagagcgatacctcaaattctcaacgtctttaacagtgtccaaggccaggacgaatcgggcaccatgatacgtacacacgctctctccacattaaacaactgcgcctggactatcagctgtatcgacttcaacgaaggggcaaacgccgccgtaagacatgcttgggttccagtcgctcaactcatttggcagagagcaatagctccagtacttgcaagtgacacatcagatgtcgaagtggctacagtggtcaccagtctcgcgtgggctttgacgcgcaccctgcatggtgagaagtacctagagggtcaggaagaaaaaaagttcatgtcactctaccacgcatctcggaacatagccggaaatccagaagacgcattccagagtctaggagttaggtgtatcggagtactgggccagcttgctctcgacccggcactggtcgagttaaaccgcgagattggcgtcttccttgtgactgtggtgacagggcttccagaaacgccagcagccgacgccgtagaggcacttaatcaattgttcgacatttacggggacgaaaacagcgtccacgacaagccggtgttctgggcagataacttcttgaaacacatggaagccacaataccgaaggtcaagtcgatggtgaagacgatagacaaaagaaattcgacagaactgcggactcgagcagaggaagcaagtctgaacctggtcagatttatccagtataagaataagcaccgaccttcatgaggatattgggcagtggtgtaacgaggaagcagtaatcaagtcgggagaagctgagatcatgctctacatggaccgccataactggaatagttcaagagtaggtaatggtctcaaatatgtagcgactaatagtttggtgggaacttacctccatatcaagccacgattgcgtgaccaggggctcaaagtgataggcaaagcgtgagtgtcaagaactaagggagttagggtcataaaaagagaaattgatctatcaataaaaactcacttccgagcctcgtgttgcctcgtgtataagctgacagtacgacgactgtgtatgggtataattaaccatgcatcaacccgactgattatccgactggtaatccgaatgatcatcgaccgaatcaaccgatgggcttgagcttcttctttttcttcttgccgccgtcatcgccccccttgcccttctggaactgacgccagctgtcgatgcgctggtcgcgtgtggactcccagtcctgctcgtgctggcgcttgcgcttgcgctcctctagctcctcgtcggccctgcgctgctcgcgaccttcctcctgcatctgggccttcatctggcgcttgcggcgcatctcgttgtcgatgaggacctcccgggtcttgtcgcgccacttgttggcaaatgagtcggtcttgagctcggggctgtcgacggtccacttgttctcgcggatcagcaacatgcgggcgtcggcgatggcttcgtcgaggcgctcgcggtgcttctcgtccatcagctcggtctgggctttcttgaggcggtcgaaggcatcgggcgcctgggggttcttggtcttgtccggatggatcagtagcgactttttgcgataggtgatcttgatatcagactccgggactcctggcataaggcctaggacggcgtaggcatcaagacggaaggctttgagtatacgatctatctcggcatcctgcgaggtcgcgttagcatgggcactgcgccagggatgcgctttcttaccttgtcgaattccttagcctctgattccagcgcatcgagcgcatctttgtcatcgttctcctccttgggcgacatagcggatgttggaaggtaacgtgctgtctatgtgtaagatgtataacgcacctggtcgttgg

SEQ ID NO: 7847 - DNA, 2787 bp, Muscodor strobelii
  misc_feature: SGI cDNA ID NO. 562389
  misc_feature: Encodes the peptide sequence at SEQ ID NO 7848
atgcctaggcgcgccgtgtcgcccgcgcagtccgagaatgaggccgatattctcggatcattgctcacaggcgatgatgagacttctcataccgagacgaaaggtcctgcaagcttcgcatttgatgctgctgagcttttcgatgcagacgacggtgaggaagatgatggcgacgaagccttcattgccttgaagcaggctgctgctttcaggaagtcaaccaatctgaagggtaccacggtaaagaaaggaggcggcttccaagctatgggcctcaatggaaatctcttgagagcaatcacgaaaaagggattcaaagtacccacaccaattcaacgaaaagttattccatcaattctgcagcggaaggacgtgctggctatggcccgtactggttccggaaagaccgctgcttttctcatacccatggtgcaattcttgaaggcgcactcaccgacgatgggtgcccgtgccttggtgctgagccccagtcgcgagcttgccatacaaacgctaagcgtcacgaaagaattcacccgagggactgatctcaaaaccatgctatgcgtgggtggcgactctttagatgagcagttcgccaatatgagcgcaaatccagacattatcatagccacgcccggccgattcctccacctgttagttgagatgggcttgaatgtgactggtttagcaaaagtacaatatgtcgtgttcgatgaagcagatcgattatttgagatgggtttcgctgcccagctcgaggaaattctacattctttacccccgactcgccagacgcttctattctccgccactctaccttcctctgtgactgaattcgtacgagcgggttgtcaagacccgatattagtccgactggatacggactcgaagatgagtcccgacctcgaagctgcgttcttcagtgtgaaagggggcgagaagctcggtacccttctgcatatcctgcacgatgtcatcaaaatgcctacaggcttgccagaaggtgccgtggacccggctgagaacaactcgaagaagcggaagagaggcaaaggcgacggatatcatggcaaagagaaaccgagccctaattccacaatcattttcacatctacgaaacatgatgtggaatttttacagactatgctaaatctcgcgggatttgcagtgtcgtacgtctacggttcacttgatcaggttgctcgcagggagcaagttgaggctttccgtcgtgggcagacaaatatccttgttgtcaccgatgttgcagcaagaggtgttgatattcctcttctctcgaacgcaatcaatttttctttcccagctacgccaaaattgtacattcacagagtgggccgtgtcgcgcgtgcgggaatgcgaggctgggcatatacactcgtaaaagataccgatgtgccgtatctcatcgatctccagctatttctcaaccagaagcttgttcttggtaaggaggagaaggaagcacctgttttcaccaaagatatgatcattggtgcgcctatgcggagcaaagtagagaactacgtggagtggctcaataagcttcttggcgaagactcggacctttatgcccttcagcgtgtttctgaaaaagccgagaagctttacttgaagacccggaactcggccagtgctcagagcgtgcgccgtgcgcgagaggtcgtttcgtccaagggcttttcacaagtgcatgccatttatggggatgagcagggtgagatcgaagatcagcgtgccgacatgttggccaggattggtggatacaaaccccaagaatcgatattcgagatagcgagacctaagaaggcagcaaagagcgaagcggcggaaatcatgaagacaatgcgacagcgctattctcggaaatcggccgctactgaaaacgaagatgtagatatggaggatccagttgccgattccccatctgctgcaacaggagacgatggagatgtattcgacgaagaggaagagcaagccgcatccgacgacgacgacgtcgacatagacgagcacgcattttccgattcggacgtcgaagtaacaatagccaatcacaacgacccaaacagttcaaagacctccaaatccaaaaacaattcatcatcagacgacttccgagacccagagttcatggcctacgagccacgcacagtcaacgcggccgaagagcgcggctacggcgtccactcaggcgggcaagcaaacacgaacttctacgaagcggcgcgcagcgcaacattcgacctcaccaacgacgaaggcgccaaatccttcggcatcccgacgcgcgcggggctccgctgggacaagaagaacgccaaatacgtatcccgcaataacgacgaggacggcagtcgcggcggcggtaagatggtccgcggcgagtctggggtcaagatcgcggcgtccttccaaagcgggcggttcgaaaaatggaagaaagaacagcgcatgggccgtatgccgcgcgtcggcgagtcagagagacgtggaccggcgaccgcgggaacgaagggaaatacgattggtggtggaccgaggtataaacataaacaggagaaggcacccaagatggccgacaaattccgcgatgattaccacgtgcggaagaagcgcgtggctgaggctaaggagaaccgtattggtcggtttaaggacggcgagggaagcaagaaggagcttaagaatgcggatgatatccgcaaggcacgtaaaatcaaggagcagcgtcgcgagaagaatggtaggccggcgaggcggtga

SEQ ID NO: 7848 - protein, 928 aa, Muscodor strobelii
  misc_feature: SGI Peptide ID NO. 562389
  misc_feature (756)..(824): Pfam Id: PF08147 Pfam Desc: DBP10CT (NUC160) domain
  misc_feature (109)..(280): Pfam Id: PF00270 Pfam Desc: DEAD/DEAH box helicase
  misc_feature (383)..(459): Pfam Id: PF00271 Pfam Desc: Helicase conserved C-terminal domain
  misc_feature (1)..(928): NCBI GI: 46136501 Blast Desc: FG09766.1 [Gibberella zeae PH-1] gi|91206536|sp|Q4HZ42.1|DBP10_GIBZE RecName: Full=ATP-dependent RNA helicase DBP10
  misc_feature (1)..(928): NCBI GI: 256727522 Blast Desc: [Nectria haematococca mpVI 77-13-4]
  misc_feature (1)..(928): NCBI GI: 171690518 Blast Desc: protein product [Podospora anserina] gi|170945207|emb|CAP71318.1| protein product [Podospora anserina]
  misc_feature (1)..(928): NCBI GI: 85107031 Blast Desc: NCU07712 [Neurospora crassa OR74A] gi|74696531|sp|Q7S9J4.1|DBP10_NEUCR RecName: Full=ATP-dependent RNA helicase dbp-10 gi|28923900|gb|EAA33062.1| NCU07712 crassa
  misc_feature (1)..(928): NCBI GI: 160380704 Blast Desc: NCU07712 [Neurospora crassa OR74A] gi|74696531|sp|Q7S9J4.1|DBP10_NEUCR RecName: Full=ATP-dependent RNA helicase dbp-10 gi|28923900|gb|EAA33062.1| NCU07712 crassa
  misc_feature (1)..(928): NCBI GI: 145607341 Blast Desc: MGG_04179 [Magnaporthe grisea 70-15] gi|152013475|sp|A4R5B8.1|DBP10_MAGGR RecName: Full=ATP-dependent RNA helicase DBP10 gi|145014915|gb|EDJ99483.1| MGG_04179 grisea
  misc_feature (1)..(928): NCBI GI: 261359741 Blast Desc: ATP-dependent RNA helicase DBP10 [Verticillium albo-atrum VaMs.102]
  misc_feature (1)..(928): NCBI GI: 258573243 Blast Desc: [Uncinocarpus reesii 1704] gi|237901069|gb|EEP75470.1| [Uncinocarpus reesii 1704]
  misc_feature (90)..(928): NCBI GI: 156049231 Blast Desc: SS1G_08322 [Sclerotinia sclerotiorum 1980] gi|154692721|gb|EDN92459.1| SS1G_08322 [Sclerotinia sclerotiorum 1980]
  misc_feature (1)..(928): NCBI GI: 67516603 Blast Desc: AN0583.2 [Aspergillus nidulans FGSC A4] gi|74681494|sp|Q5BFU7.1|DBP10_EMENI RecName: Full=ATP-dependent RNA helicase dbp10 gi|40747526|gb|EAA66682.1| AN0583.2 nidulans
MPRRAVSPAQSENEADILGSLLTGDDETSHTETKGPASFAFDAAELFDADDGEEDDGDEAFIALKQAAAFRKSTNLKGTTVKKGGGFQAMGLNGNLLRAITKKGFKVPTPIQRKVIPSILQRKDVLAMARTGSGKTAAFLIPMVQFLKAHSPTMGARALVLSPSRELAIQTLSVTKEFTRGTDLKTMLCVGGDSLDEQFANMSANPDIIIATPGRFLHLLVEMGLNVTGLAKVQYVVFDEADRLFEMGFAAQLEEILHSLPPTRQTLLFSATLPSSVTEFVRAGCQDPILVRLDTDSKMSPDLEAAFFSVKGGEKLGTLLHILHDVIKMPTGLPEGAVDPAENNSKKRKRGKGDGYHGKEKPSPNSTIIFTSTKHDVEFLQTMLNLAGFAVSYVYGSLDQVARREQVEAFRRGQTNILVVTDVAARGVDIPLLSNAINFSFPATPKLYIHRVGRVARAGMRGWAYTLVKDTDVPYLIDLQLFLNQKLVLGKEEKEAPVFTKDMIIGAPMRSKVENYVEWLNKLLGEDSDLYALQRVSEKAEKLYLKTRNSASAQSVRRAREVVSSKGFSQVHAIYGDEQGEIEDQRADMLARIGGYKPQESIFEIARPKKAAKSEAAEIMKTMRQRYSRKSAATENEDVDMEDPVADSPSAATGDDGDVFDEEEEQAASDDDDVDIDEHAFSDSDVEVTIANHNDPNSSKTSKSKNNSSSDDFRDPEFMAYEPRTVNAAEERGYGVHSGGQANTNFYEAARSATFDLTNDEGAKSFGIPTRAGLRWDKKNAKYVSRNNDEDGSRGGGKMVRGESGVKIAASFQSGRFEKWKKEQRMGRMPRVGESERRGPATAGTKGNTIGGGPRYKHKQEKAPKMADKFRDDYHVRKKRVAEAKENRIGRFKDGEGSKKELKNADDIRKARKIKEQRREKNGRPARR

SEQ ID NO: 7849 - DNA, 2715 bp, Muscodor strobelii
  misc_feature: SGI cDNA ID NO. 562390
  misc_feature: Encodes the peptide sequence at SEQ ID NO 7850
atggctccccccaacgactcggccaagcccaccgctaagggcaagggcaaggctgttgagccgcctgccgacgaagccaacaaggggaaggatggccagccccaatccaagccagatgatgacaagatcgacgctaccgaggagctgagcgaggaggaccagcagctcaagagcgagctcgacatgctcgtcgagcgcctgaccgaatcagatgcctcgctctataagcctgctctcgaggctatgaagacctcgatcaagacctccacttcgtctatgacggctgtacccaagcccttgaaattcctcagaccacactacgagcccatgaccaaattatacgagacatggcccgaaggcgacaacaaagcttccctcgccgatgttctgtccgtcattggcatgaccttttccgatgaggaccgccaggacaccctgaaatacaggctcctgtccccatcgcaggatatcggatcctggggccacgaatacgttcgtcacctggcactcgagattggagaagtgtacggcaagcgcgtcacagccgacgagcctgtcaaggatctcaccgatctcgccctcgtgcttatccccctcttcctgcagagcaacgccgaagccgacgctgtcgacttgatgagcgagctggagatgatcgacgagctgcccaagtttgttgacgagaacacatatcccagggtctgcttgtacctcgtcagcatggtcaaccttctgacctacccagagaatgagcagtttctgcgcgtggcccacaccatctataagacgtataaccagcacacccaagccttgtccatagccatccgcctcaacgacgtggatctcattgccgctagcttcaacggaatcgaagacgtcgccttgaggaaacagttagccttcatgataggccgtcaaaaaatcattctggacctgtccaatgacgacgtggcccaggatagtcaggacatcgaggaggcgctaggcaacatcaagctgtccgagtatttcaagacccttggcaaggagctcaatattttagaacccaagaccaccgaggatatctacaagagccacctcgagagcagccgagtcgctggcatgaccaacttggactcggcccgacataacctggctgctgcatttgtcaacgccttcgtcaatgcgggtttcggcaacgacaagatgatgctggtggagcaggataaagaaagctgggtttggaagacaaaagaggagggcatgatgtcgactgttgcgtcgctcggaacattactcatgtgggatgttgagaatggcctggacaagatcgataaattcacatactccaacgagccacagatcctagctggtgccatgctggccattggtatcatgaactccgggacaaggatagacagtgagccggctctggccttgttgggcgataccgataagctggagcacaagaaccctctggtacggaccgccgctatcatgggtctaggtctttcgtatgccgggtcgcagaaggacgatcttatggaatacctgcttcccatcgtcagcaactcagaccaggacatgcagatatcggccatggcggcattgtcattgggtcttatatatgtgggttccggtaattccgatattactgaggtcattttaccatttttgctggatgacaataacaaagctcaactcaccgataaatggtcacgattcctcgcccttggactgggtctgttatatttcggtcgtcaagaagatgtcgatgttatcttggagacgctgaaggcagttgaccatccaatggccaggcctacctcgattctcttagagatctgtgcgtgggcaggcactggtgctgttcttaagatccaggagctgctgcacatctgcaacgaacatatcgaagactcagacgagaagaagggcgatgagctactacaagcctatgccgtcatcggaattgcgttagtggcaatgggtgaagatgtaggacaagaaatggtgctgcgacatttcggacatcttatgcactatggcgaagccaacattcgccgcgctgttcctttggctatggggttgatcagcccaagtaacccacaaatgaaggtctacgacacgctctcccgatacagtcacgacaacgacaatgatgtggctatcaatgcgatttttgctatgggcttgttaggagccggtaccaacaacgccagactagctcagcttctgcgacagctggccagttattatcatagagaccaggaatccttattcatggtccgcattgcacagggcttgttgcacatgggtaagggcacaatgaccctaaaccccttccacaccgatcggcaaatcctatcaagggtgtctaccgctggtttgctcgccgtcctcgtggctatgatcgacgccaaacaattcattacatccaactcgcattacctcctctacttccttgttaccgccatgcaccctcggttccttgtcacccttgatgaggacctcaagcccttaaccgtcaacgtacgggtaggccaggctgtcgatgtggttggacaggccggccggccgaagactattaccgggtggcagacacaaagcacgccggtgctgttggcctatggtgagagagcagagcttgaggacgaggagtacatcagcttaagtagtactttggaaggactcgtcattctccgcaagaatcctgactgggaagatggaaagtag

SEQ ID NO: 7850 - protein, 904 aa, Muscodor strobelii
  misc_feature: SGI Peptide ID NO. 562390
  misc_feature (490)..(524): Pfam Id: PF01851 Pfam Desc: Proteasome/cyclosome repeat
  misc_feature (718)..(752): Pfam Id: PF01851 Pfam Desc: Proteasome/cyclosome repeat
  misc_feature (527)..(561): Pfam Id: PF01851 Pfam Desc: Proteasome/cyclosome repeat
  misc_feature (23)..(901): NCBI GI: 149731170 Blast Desc: : proteasome (prosome, macropain) 26S subunit, non-ATPase, 2 [Equus caballus]
  misc_feature (4)..(901): NCBI GI: 74198146 Blast Desc: protein product [Mus musculus]
  misc_feature (1)..(904): NCBI GI: 116196118 Blast Desc: CHGG_04657 [Chaetomium globosum CBS 148.51] gi|88180570|gb|EAQ88038.1| CHGG_04657 [Chaetomium globosum CBS 148.51]
  misc_feature (1)..(904): NCBI GI: 171690504 Blast Desc: protein product [Podospora anserina] gi|170945200|emb|CAP71311.1| protein product [Podospora anserina]
  misc_feature (1)..(904): NCBI GI: 164423796 Blast Desc: 26S proteasome regulatory subunit rpn1 [Neurospora crassa OR74A] gi|182705247|sp|Q7S8R8.2|RPN1_NEUCR RecName: Full=26S proteasome regulatory subunit rpn-1 26S proteasome rpn1
  misc_feature (1)..(904): NCBI GI: 154317741 Blast Desc: BC1G_03222 [Botryotinia fuckeliana B05.10] gi|150844396|gb|EDN19589.1| BC1G_03222 [Botryotinia fuckeliana B05.10]
  misc_feature (1)..(904): NCBI GI: 156049799 Blast Desc: SS1G_08607 [Sclerotinia sclerotiorum 1980] gi|154693005|gb|EDN92743.1| SS1G_08607 [Sclerotinia sclerotiorum 1980]
  misc_feature (1)..(904): NCBI GI: 261359757 Blast Desc: 26S proteasome regulatory subunit rpn-1 [Verticillium albo-atrum VaMs.102]
  misc_feature (5)..(902): NCBI GI: 255953941 Blast Desc: Pc21g06810 [Penicillium chrysogenum Wisconsin 54-1255] gi|211589434|emb|CAP95578.1| Pc21g06810 [Penicillium chrysogenum Wisconsin 54-1255]
  misc_feature (5)..(902): NCBI GI: 169621610 Blast Desc: SNOG_14016 [Phaeosphaeria nodorum SN15] gi|160704295|gb|EAT78641.2| SNOG_14016 [Phaeosphaeria nodorum SN15]
MAPPNDSAKPTAKGKGKAVEPPADEANKGKDGQPQSKPDDDKIDATEELSEEDQQLKSELDMLVERLTESDASLYKPALEAMKTSIKTSTSSMTAVPKPLKFLRPHYEPMTKLYETWPEGDNKASLADVLSVIGMTFSDEDRQDTLKYRLLSPSQDIGSWGHEYVRHLALEIGEVYGKRVTADEPVKDLTDLALVLIPLFLQSNAEADAVDLMSELEMIDELPKFVDENTYPRVCLYLVSMVNLLTYPENEQFLRVAHTIYKTYNQHTQALSIAIRLNDVDLIAASFNGIEDVALRKQLAFMIGRQKIILDLSNDDVAQDSQDIEEALGNIKLSEYFKTLGKELNILEPKTTEDIYKSHLESSRVAGMTNLDSARHNLAAAFVNAFVNAGFGNDKMMLVEQDKESWVWKTKEEGMMSTVASLGTLLMWDVENGLDKIDKFTYSNEPQILAGAMLAIGIMNSGTRIDSEPALALLGDTDKLEHKNPLVRTAAIMGLGLSYAGSQKDDLMEYLLPIVSNSDQDMQISAMAALSLGLIYVGSGNSDITEVILPFLLDDNNKAQLTDKWSRFLALGLGLLYFGRQEDVDVILETLKAVDHPMARPTSILLEICAWAGTGAVLKIQELLHICNEHIEDSDEKKGDELLQAYAVIGIALVAMGEDVGQEMVLRHFGHLMHYGEANIRRAVPLAMGLISPSNPQMKVYDTLSRYSHDNDNDVAINAIFAMGLLGAGTNNARLAQLLRQLASYYHRDQESLFMVRIAQGLLHMGKGTMTLNPFHTDRQILSRVSTAGLLAVLVAMIDAKQFITSNSHYLLYFLVTAMHPRFLVTLDEDLKPLTVNVRVGQAVDVVGQAGRPKTITGWQTQSTPVLLAYGERAELEDEEYISLSSTLEGLVILRKNPDWEDGK

SEQ ID NO: 7851 - DNA, 6284 bp, Muscodor strobelii
  misc_feature: SGI EST ID NO. CUFF.19466.0
  misc_feature: Variant of the nucleotide sequence at SEQ ID NO 7849
cccgcctttgcctggtggccttgccatgcccagcccgaaactggagctcgaacaccaggttggagctgtaatccgtaacgtgcatcatccaatccgcagtactactccatccagcaccttccatcccacatactcacctcttccacacttcgcagtcccaccacgacattatactcaactctgaggcggcgcaacccccttccttgacctcggaactcggcggactatctatctctgtttctgttcattctgcccgtggccctgtcccgctgtcgccgccgctctagttgctgtattgcgacacaacctcaccagctctgttggcgacagctctggccacaactctccgccatataccctccgcccgcattcccataaattctctagcctcctccagactccagcgacaatggctccccccaacgactcggccaagcccaccgctaagggcaagggcaaggctgttgagccgcctgccgacgaagccaacaaggggaaggatggccagccccaatccaagccagatgatgacaagatcgacgctaccgaggagctgagcgaggaggaccagcagctcaagagcgagctcgacatgctcgtcgagcgcctgaccgaatcagatgcctcgctctataagcctgctctcgaggctatgaagacctcgatcaagacctccacttcgtctatgacggctgtacccaagcccttgaaattcctcagaccacactacgagcccatgaccaaattatacgagacatggcccgaaggcgacaacaaagcttccctcgccgatgttctgtccgtcattggcatgaccttttccgatgaggaccgccaggacaccctgaaatacaggctcctgtccccatcgcaggatatcggatcctggggccacgaatacgttcgtcacctggcactcgagattggagaagtgtacggcaagcgcgtcacagccgacgagcctgtcaaggatctcaccgatctcgccctcgtgcttatccccctcttcctgcagagcaacgccgaagccgacgctgtcgacttgatgagcgagctggagatgatcgacgagctgcccaagtttgttgacgagaacacatatcccagggtctgcttgtacctcgtcagcatggtcaaccttctgacctacccagagaatgagcagtttctgcgcgtggcccacaccatctataagacgtataaccagcacacccaagccttgtccatagccatccgcctcaacgacgtggatctcattgccgctagcttcaacggaatcgaagacgtcgccttgaggaaacagttagccttcatgataggccgtcaaaaaatcattctggacctgtccaatgacgacgtggcccaggatagtcaggacatcgaggaggcgctaggcaacatcaagctgtccgagtatttcaagacccttggcaaggagctcaatattttagaacccaagaccaccgaggatatctacaagagccacctcgagagcagccgagtcgctggcatgaccaacttggactcggcccgacataacctggctgctgcatttgtcaacgccttcgtcaatgcgggtttcggcaacgacaagatgatgctggtggagcaggataaagaaagctgggtttggaagacaaaagaggagggcatgatgtcgactgttgcgtcgctcggaacattactcatgtgggatgttgagaatggcctggacaagatcgataaattcacatactccaacgagccacagatcctagctggtgccatgctggccattggtatcatgaactccgggacaaggatagacagtgagccggctctggccttgttgggcgataccgataagctggagcacaagaaccctctggtacggaccgccgctatcatgggtctaggtctttcgtatgccgggtcgcagaaggacgatcttatggaatacctgcttcccatcgtcagcaactcagaccaggacatgcagatatcggccatggcggcattgtcattgggtcttatatatgtgggttccggtaattccgatattactgaggtcattttaccatttttgctggatgacaataacaaagctcaactcaccgataaatggtcacgattcctcgcccttggactgggtctgttatatttcggtcgtcaagaagatgtcgatgttatcttggagacgctgaaggcagttgaccatccaatggccaggcctacctcgattctcttagagatctgtgcgtgggcaggcactggtgctgttcttaagatccaggagctgctgcacatctgcaacgaacatatcgaagactcagacgagaagaagggcgatgagctactacaagcctatgccgtcatcggaattgcgttagtggcaatgggtgaagatgtaggacaagaaatggtgctgcgacatttcggacatcttatgcactatggcgaagccaacattcgccgcgctgttcctttggctatggggttgatcagcccaagtaacccacaaatgaaggtctacgacacgctctcccgatacagtcacgacaacgacaatgatgtggctatcaatgcgatttttgctatgggcttgttaggagccggtaccaacaacgccagactagctcagcttctgcgacagctggccagttattatcatagagaccaggaatccttattcatggtccgcattgcacagggcttgttgcacatgggtaagggcacaatgaccctaaaccccttccacaccgatcggcaaatcctatcaagggtgtctaccgctggtttgctcgccgtcctcgtggctatgatcgacgccaaacaattcattacatccaactcgcattacctcctctacttccttgttaccgccatgcaccctcggttccttgtcacccttgatgaggacctcaagcccttaaccgtcaacgtacgggtaggccaggctgtcgatgtggttggacaggccggccggccgaagactattaccgggtggcagacacaaagcacgccggtgctgttggcctatggtgagagagcagagcttgaggacgaggagtacatcagcttaagtagtactttggaaggactcgtcattctccgcaagaatcctgactgggaagatggaaagtagactgtgaggcacccacactatgcatggatgaggaaataatcatgagagaagagcgttctggaactagtgatccacaaaaggaagacgctgaatatgtaactattatgaaaatgagactcagtcgtcctcgtccactgagcacggtatttggtagaaatgggcttggcgatgcgcaatagatcatgaacgttgtaaacacatttcaccactgtcttcacacgcattgaattatgggcgttattattctgcacacgcatgtatgttgcagcgtagaattaatttcatgatactgggcttctaccgtccactcaccgcctcgccggcctaccattcttctcgcgacgctgctccttgattttacgtgccttgcggatatcatccgcattcttaagctccttcttgcttccctcgccgtccttaaaccgaccaatacggttctccttagcctcagccacgcgcttcttccgcacgtggtaatcatcgcggaatttgtcggccatcttgggtgccttctcctgtttatgtttatacctcggtccaccaccaatcgtatttcccttcgttcccgcggtcgccggtccacgtctctctgactcgccgacgcgcggcatacggcccatgcgctgttctttcttccatttttcgaaccgcccgctttggaaggacgccgcgatcttgaccccagactcgccgcggaccatcttaccgccgccgcgactgccgtcctcgtcgttattgcgggatacgtatttggcgttcttcttgtcccagcggagccccgcgcgcgtcgggatgccgaaggatttggcgccttcgtcgttggtgaggtcgaatgttgcgctgcgcgccgcttcgtagaagttcgtgtttgcttgcccgcctgagtggacgccgtagccgcgctcttcggccgcgttgactgtgcgtggctcgtaggccatgaactctgggtctcggaagtcgtctgatgatgaattgtttttggatttggaggtctttgaactgtttgggtcgttgtgattggctattgttacttcgacgtccgaatcggaaaatgcgtgctcgtctatgtcgacgtcgtcgtcgtcggatgcggcttgctcttcctcttcgtcgaatacatctccatcgtctcctgttgcagcagatggggaatcggcaactggatcctccatatctacatcttcgttttcagtagcggccgatttccgagaatagcgctgtcgcattgtcttcatgatttccgccgcttcgctctttgctgccttcttaggtctcgctatctcgaatatcgattcttggggtttgtatccaccaatcctggccaacatgtcggcacgctgatcttcgatctcaccctgctcatccccataaatggcatgcacttgtgaaaagcccttggacgaaacgacctctcgcgcacggcgcacgctctgagcactggccgagttccgggtcttcaagtaaagcttctcggctttttcagaaacacgctgaagggcataaaggtccgagtcttcgccaagaagcttattgagccactccacgtagttctctactttgctccgcataggcgcaccaatgatcatatctttggtgaaaacaggtgcttccttctcctccttaccaagaacaagcttctggttgagaaatagctggagatcgatgagatacggcacatcggtatcttttacgagtgtatatgcccagcctcgcattcccgcacgcgcgacacggcccactctgtgaatgtacaattttggcgtagctgggaaagaaaaattgattgcgttcgagagaagaggaatatcaacacctcttgctgcaacatcggtgacaacaaggatatttgtctgcccacgacggaaagcctcaacttgctccctgcgagcaacctgatcaagtgaaccgtagacgtacgacactgcaaatcccgcgagatttagcatagtctgtaaaaattccacatcatgtttcgtagatgtgaaaatgattgtggaattagggctcggtttctctttgccatgatatccgtcgcctttgcctctcttccgcttcttcgagttgttctcagccgggtccacggcaccttctggcaagcctgtaggcattttgatgacatcgtgcaggatatgcagaagggtaccgagcttctcgccccctttcacactgaagaacgcagcttcgaggtcgggactcatcttcgagtccgtatccagtcggactaatatcgggtcttgacaacccgctcgtacgaattcagtcacagaggaaggtagagtggcggagaatagaagcgtctggcgagtcgggggtaaagaatgtagaatttcctcgagctgggcagcgaaacccatctcaaataatcgatctgcttcatcgaacacgacatattgtacttttgctaaaccagtcacattcaagcccatctcaactaacaggtggaggaatcggccgggcgtggctatgataatgtctggatttgcgctcatattggcgaactgctcatctaaagagtcgccacccacgcatagcatggttttgagatcagtccctcgggtgaattctttcgtgacgcttagcgtttgtatggcaagctcgcgactggggctcagcaccaaggcacgggcacccatcgtcggtgagtgcgccttcaagaattgcaccatgggtatgagaaaagcagcggtctttccggaaccagtacgggccatagccagcacgtccttccgctgcagaattgatggaataacttttcgttgaattggtgtgggtactttgaatccctttttcgtgattgctctcaagagatttccattgaggcccatagcttggaagccgcctcctttctttaccgtggtacccttcagattggttgacttcctgaaagcagcagcctgcttcaaggcaatgaaggcttcgtcgccatcatcttcctcaccgtcgtctgcatcgaaaagctcagcagcatcaaatgcgaagcttgcaggacctttcgtctcggtatgagaagtctcatcatcgcctgtgagcaatgatccgagaatatcggcctcattctcggactgcgcgggcgacacggcgcgcctaggcatttcgtttggtgaggctgcaaatatcttatgtatgctcctctttgcttcgcctttgcaacaggcag

SEQ ID NO: 7852 - DNA, 1308 bp, Muscodor strobelii
  misc_feature: SGI cDNA ID NO. 562391
  misc_feature: Reduced expression when VOC is produced
  misc_feature: Encodes the peptide sequence at SEQ ID NO 7853
atgcatctcgacagcaaggccatgcgccacctcacccccgaggactggcgtgtgttagtagcagtcgagataggcagcaagaaccatgaagtagtcccgaccaaattaatagagtccctctctaagctgcgcggcgggcccggccgcgtccaccactccatcagcgccctcgccaaagtcggcctgatcgcacgaaccaaggaggccaagtacgacggctaccgtctcacctacggcggcctcgactatctcgccctgcacacctactccacccagaaggccgtctactccgtcggcaaccgcatcggcgtcggcaaggagagcgacatcatggtcgtcgccgacgagaccggcacccagcgcgtcctcaagatccaccgcctcggccgcatctccttccgcaccgtcaagtctaaccgagactacctgcgccggcgccagggcggctcctggatgtatctctcgcgcctcgctgccgagaaggagtatgccttcatgcaagccctgcgcgacgagggctttctcgtccccaaacccctatcccagagccgccacaccatcctcatgtcccttgtcgacgccttccccttgcgccagatcgtgagcgtccccgatcccgccagcctctacgccgacctcatcgccctgattctgcgccttgccaagcacggcctcatccacggcgacttcaacgagttcaacatcctcataaaagaggagcctctagacgagaacgagaacgagatagatcaaccgaaagaaaagcagcagcaggcccaagacacggaggaagccgaagactcaccaaggataaaggtgaccccggtattaatcgacttcccccagatggtctccatggaccacgtcaacgccgacatgtacttcgacagagacgtcgcctgcgtgaagcgcttcttcgagcggcgtttccatttcgtgagcacccagcccggccctttcttcaaggatgccaagaagacggtcggcaaagacggcgcccgacgcctcgatgccgccgtcgaggcttccggcttctccaagaaggccctgaaagacctcgaggccgccatacgggagcagcaggatgcgagggggcccgatggcgagcagtcttcggcttctaccgacgacgaggaagacgatgataatgacgaaggggatgagaatgagaatgagaatgagggcgacgatgatgaggagcagacaaacacatatgatccaataagtgacagaaatgatgccccttcagacaggacaaaggatccgaacataagcttctcgagtttgaccctcgagactgggacgtaa

SEQ ID NO: 7853 - protein, 435 aa, Muscodor strobelii
  misc_feature: SGI Peptide ID NO. 562391
  misc_feature (109)..(319): Pfam Id: PF01163 Pfam Desc: RIO1 family
  misc_feature (8)..(92): Pfam Id: PF09202 Pfam Desc: Rio2, N-terminal
  misc_feature (109)..(240): Pfam Id: PF01163 Pfam Desc: RIO1 family
  misc_feature (275)..(310): Pfam Id: PF01163 Pfam Desc: RIO1 family
  misc_feature (1)..(361): NCBI GI: 116196116 Blast Desc: CHGG_04656 [Chaetomium globosum CBS 148.51] gi|88180569|gb|EAQ88037.1| CHGG_04656 [Chaetomium globosum CBS 148.51]
  misc_feature (1)..(362): NCBI GI: 46136537 Blast Desc: FG09784.1 [Gibberella zeae PH-1]
  misc_feature (24)..(361): NCBI GI: 164423794 Blast Desc: NCU07722 [Neurospora crassa OR74A] gi|157070234|gb|EAA32736.2| NCU07722 [Neurospora crassa OR74A]
  misc_feature (1)..(386): NCBI GI: 145612423 Blast Desc: MGG_07119 [Magnaporthe grisea 70-15] gi|145019587|gb|EDK03815.1| MGG_07119 [Magnaporthe grisea 70-15]
  misc_feature (1)..(361): NCBI GI: 261359756 Blast Desc: serine/threonine-protein kinase RIO2 [Verticillium albo-atrum VaMs.102]
  misc_feature (1)..(369): NCBI GI: 154317743 Blast Desc: BC1G_03223 [Botryotinia fuckeliana B05.10] gi|150844397|gb|EDN19590.1| BC1G_03223 [Botryotinia fuckeliana B05.10]
  misc_feature (1)..(402): NCBI GI: 240106808 Blast Desc: RIO1 family protein [Coccidioides posadasii C735 delta SOWgp]
  misc_feature (1)..(402): NCBI GI: 119174388 Blast Desc: CIMG_09176 [Coccidioides immitis RS]
  misc_feature (1)..(369): NCBI GI: 156049797 Blast Desc: SS1G_08606 [Sclerotinia sclerotiorum 1980] gi|154693004|gb|EDN92742.1| SS1G_08606 [Sclerotinia sclerotiorum 1980]
  misc_feature (1)..(364): NCBI GI: 171690502 Blast Desc: protein product [Podospora anserina] gi|170945199|emb|CAP71310.1| protein product [Podospora anserina]
  misc_feature (8)..(372): SWISSPROT Homolog: EC 2.7.11.1 Non-specific serine/threonine protein kinase
  misc_feature: Useful for introducing or modulating the production of volatile compounds
MHLDSKAMRHLTPEDWRVLVAVEIGSKNHEVVPTKLIESLSKLRGGPGRVHHSISALAKVGLIARTKEAKYDGYRLTYGGLDYLALHTYSTQKAVYSVGNRIGVGKESDIMVVADETGTQRVLKIHRLGRISFRTVKSNRDYLRRRQGGSWMYLSRLAAEKEYAFMQALRDEGFLVPKPLSQSRHTILMSLVDAFPLRQIVSVPDPASLYADLIALILRLAKHGLIHGDFNEFNILIKEEPLDENENEIDQPKEKQQQAQDTEEAEDSPRIKVTPVLIDFPQMVSMDHVNADMYFDRDVACVKRFFERRFHFVSTQPGPFFKDAKKTVGKDGARRLDAAVEASGFSKKALKDLEAAIREQQDARGPDGEQSSASTDDEEDDDNDEGDENENENEGDDDEEQTNTYDPISDRNDAPSDRTKDPNISFSSLTLETGT

SEQ ID NO: 7854 - DNA, 3813 bp, Muscodor strobelii
  misc_feature: SGI EST ID NO. CUFF.19453.0
  misc_feature: Variant of the nucleotide sequence at SEQ ID NO 7852
ctcacattgatcgatctttcttgttatattaaatcagacgtgagtgaggcgtgagcaatgaattgatgatttacttaggctctttataaatagagctcattgtatttcttgcctttgcgatcggagtactcacattactccctttgatctttatttactaagcttcaagaccacaaaatacacacattagacaaaaccaggagacgacgcatagcccacgatgcatctcgacagcaaggccatgcgccacctcacccccgaggactggcgtgtgttagtagcagtcgagataggcagcaagaaccatgaagtagtcccgaccaaattaatagagtccctctctaagctgcgcggcgggcccggccgcgtccaccactccatcagcgccctcgccaaagtcggcctgatcgcacgaaccaaggaggccaagtacgacggctaccgtctcacctacggcggcctcgactatctcgccctgcacacctactccacccagaaggccgtctactccgtcggcaaccgcatcggcgtcggcaaggagagcgacatcatggtcgtcgccgacgagaccggcacccagcgcgtcctcaagatccaccgcctcggccgcatctccttccgcaccgtcaagtctaaccgagactacctgcgccggcgccagggcggctcctggatgtatctctcgcgcctcgctgccgagaaggagtatgccttcatgcaagccctgcgcgacgagggctttctcgtccccaaacccctatcccagagccgccacaccatcctcatgtcccttgtcgacgccttccccttgcgccagatcgtgagcgtccccgatcccgccagcctctacgccgacctcatcgccctgattctgcgccttgccaagcacggcctcatccacggcgacttcaacgagttcaacatcctcataaaagaggagcctctagacgagaacgagaacgagatagatcaaccgaaagaaaagcagcagcaggcccaagacacggaggaagccgaagactcaccaaggataaaggtgaccccggtattaatcgacttcccccagatggtctccatggaccacgtcaacgccgacatgtacttcgacagagacgtcgcctgcgtgaagcgcttcttcgagcggcgtttccatttcgtgagcacccagcccggccctttcttcaaggatgccaagaagacggtcggcaaagacggcgcccgacgcctcgatgccgccgtcgaggcttccggcttctccaagaaggccctgaaagacctcgaggccgccatacgggagcagcaggatgcgagggggcccgatggcgagcagtcttcggcttctaccgacgacgaggaagacgatgataatgacgaaggggatgagaatgagaatgagaatgagggcgacgatgatgaggagcagacaaacacatatgatccaataagtgacagaaatgatgccccttcagacaggacaaaggatccgaacataagcttctcgagtttgaccctcgagactgggacgtaataaaagcaaaagatatcattaatttcgacttgacgcacgtccccaatttttccgcctccttctacgcataaacaaacccactcaacgtgttcttttactgcaccattacttgacctcttccacaacatgtcgacgagccaagtgccctctcatcacgcatgattattgttgaggctggacatattagtagaacaatgtgttgtgcatgtagagatactgtctatcagactaaactacaaagcctctaccccttctctggcggtacaagatgaaaagatgtgtctggtaaagatgagacacacaagcttcaggccactccaccgggagcccccagagatctaatctcacacgcctacatactcggatcatcctttttgagtaacccgaagactcgacaagttagccacactgttgcaagaaaaaccagaatcaagtaatcatgtctgccgaccaatggcggacccccccacgccagacaacaacggcaaggacagatgtgccaaggtgatgttagatcatgccagtgcaaaacaagacaagatatgatgccgtgcccctacacaagactacgaagctcgagcttactccttcttctccggcttcgcaggagacgatcgacagctgccgttcgccaccagaggagagttgacatgcaccgtaacaccctcgtcgctcgatccatcctctgacgtcgccgctccattttcaggattgacgatgccgggtctaacgcagagagatggtcagcaatcacatgaagggttctccaatgtagaattccgcatcatcggcatcgctagcatggggagcaggcgagcccggatggaacttgtccatgaactgggcataagcaaggggctgggaaagggtgggagtgggagtgtgagcgctgtggctgcgctgtaggtgttggtcatgctcggaggaatgaatacgctggtggtgatgggcaggctggatgtaacaataagcaggcagcatgggagcatactcggtctgagcgacacccaaactacggccttggccacgacgattgatgaagctaactcggctgttgaagtcggcactattcgaagacagacagtgtcagtaaatatccaagagtcaacgacagccaaacgggaggaacttacgcaggtgcattgaacggacggcgagggccggcagcctgctggttatacatggtagtgccaactccgaccatagtcgttccgtaggcgccaacattgtactcgttggtgcggaactgtcggcgctcagccgtgacgcgcttgagctctttctgagccggagtgtcagcatagcgaatctgcatggccaagccatcaggcccaaggttgacgccctgatactcctcaatgacggcgtcgcagatctcgcgagactcgaatcttgaaccggttgttagtgagccgagttgggtatctgagagagcaaagtgagtttgtgcttaccgtgcaaagcccacgccacgactgttgcccatagggtcacggaggatcttgctggacaagatcgtgtagcccatgaaaacggcaccgagttcctattcagtcagcgtgctgcgcttgagatcgggacgatgatacgtacagcctcggtgtaatgtctcgggaggttggagatgtagagattggtagagtcatcatcgccctccgccttgagacgagagttgaaggactcctggaagaagccatcaaagttagcattcttgtaaaaaccatcaagatagatcgcggtctctggggccaagccactgggcttgacagcaagcgtcttggggatacgagagggcacggtcaggagagacggtctcttgggctcgggtttgggactgcttgcccgtgcgaagccaacttcgtatcccagacggtagaacccccggatgcacatctccgagtcgcgaacgtcgtagaacttggagaagccgaaactagattgaggattagctcacgcgcaccgccacgatgagagagtgtacggaccctttgcaagctccggtggtagtatcaatgatcgctttggaggtctcgaccttgccgaatcgctcagcgtatctaagcagaaggtcatcatcagtagtcgggtggagtccgcggatgtagacgttgcgattgccggggatgttgttgaccaagctctgatcgagagtcttcatgctcttacgcggagtgaagaccgcaggaacagcttggggaatggccggctcctgggccaccaaggcgtcaaggtcgcggtcgacaggcacagtgtaggtgtagatggccttgggattctgagcgacg

SEQ ID NO: 7855 - DNA, 1881 bp, Muscodor strobelii
  misc_feature: SGI cDNA ID NO. 562392
  misc_feature: Encodes the peptide sequence at SEQ ID NO 7856
atggccgccgacaccacctacgacgccaagcgagctgtagctactcgagctgctcagggaggcatgcctgccaccaacaacggcaatggtcctcagcatccgcaacactatgtcaccgctcctctccatgaggctccctccaacatgactgctcgcggaatccagggctccgcagacggtggcatgtctgctgtggtcaatcagctcggtggactgggcatcagctcaggccccgtcggcccgaatggcactgtcccaggcatgatgggttcttatgttgcgaccactactgatggtcaagttatgtatcctgccggctatgctcccgccggcttcccggctctcggctacgcccaggctcccgatgctgctagtgctggcttcccgccctacatcgctcagcccaacttccaggcttatgttccttacccctatgtcccctacactccccgtggtatcttgacggagcgctctgatgtcaacgccaaggaggttcccgctctcgagaaccgtcgatcgtcctattcgaccaacgagtctacccctgccactcctttctttggtggtagcatggccgctcgtgatcaggcttcccgtgtggctgtctttgaccgctctacctacacgactccgtcgccgcagcagtatcttgcggctgcaccgggacctggcgtcgctcagaatcccaaggccatctacacctacactgtgcctgtcgaccgcgaccttgacgccttggtggcccaggagccggccattccccaagctgttcctgcggtcttcactccgcgtaagagcatgaagactctcgatcagagcttggtcaacaacatccccggcaatcgcaacgtctacatccgcggactccacccgactactgatgatgaccttctgcttagatacgctgagcgattcggcaaggtcgagacctccaaagcgatcattgatactaccaccggagcttgcaaaggtttcggcttctccaagttctacgacgttcgcgactcggagatgtgcatccgggggttctaccgtctgggatacgaagttggcttcgcacgggcaagcagtcccaaacccgagcccaagagaccgtctctcctgaccgtgccctctcgtatccccaagacgcttgctgtcaagcccagtggcttggccccagagaccgcgatctatcttgatggtttttacaagaatgctaactttgatggcttcttccaggagtccttcaactctcgtctcaaggcggagggcgatgatgactctaccaatctctacatctccaacctcccgagacattacaccgaggctgaactcggtgccgttttcatgggctacacgatcttgtccagcaagatcctccgtgaccctatgggcaacagtcgtggcgtgggctttgcacgattcgagtctcgcgagatctgcgacgccgtcattgaggagtatcagggcgtcaaccttgggcctgatggcttggccatgcagattcgctatgctgacactccggctcagaaagagctcaagcgcgtcacggctgagcgccgacagttccgcaccaacgagtacaatgttggcgcctacggaacgactatggtcggagttggcactaccatgtataaccagcaggctgccggccctcgccgtccgttcaatgcacctgctgccgacttcaacagccgagttagcttcatcaatcgtcgtggccaaggccgtagtttgggtgtcgctcagaccgaacccggcatcgtcaatcctgaaaatggagcggcgacgtcagaggatggatcgagcgacgagggtgttacggtgcatgtcaactctcctctggtggcgaacggcagctgtcgatcgtctcctgcgaagccggagaagaaggagtaa

SEQ ID NO: 7856 - protein, 626 aa, Muscodor strobelii
  misc_feature: SGI Peptide ID NO. 562392
  misc_feature (284)..(352): Pfam Id: PF00076 Pfam Desc: RNA recognition motif. (a.k.a. RRM, RBD, or RNP domain)
  misc_feature (425)..(496): Pfam Id: PF00076 Pfam Desc: RNA recognition motif. (a.k.a. RRM, RBD, or RNP domain)
  misc_feature (284)..(341): Pfam Id: PF00076 Pfam Desc: RNA recognition motif. (a.k.a. RRM, RBD, or RNP domain)
  misc_feature (425)..(488): Pfam Id: PF00076 Pfam Desc: RNA recognition motif. (a.k.a. RRM, RBD, or RNP domain)
  misc_feature (141)..(619): NCBI GI: 171690500 Blast Desc: protein product [Podospora anserina] gi|170945198|emb|CAP71309.1| protein product [Podospora anserina]
  misc_feature (139)..(543): NCBI GI: 261359760 Blast Desc: sporulation-specific protein [Verticillium albo-atrum VaMs.102]
  misc_feature (41)..(624): NCBI GI: 116196114 Blast Desc: CHGG_04655 [Chaetomium globosum CBS 148.51] gi|88180568|gb|EAQ88036.1| CHGG_04655 [Chaetomium globosum CBS 148.51]
  misc_feature (62)..(625): NCBI GI: 85112972 Blast Desc: NCU09742 [Neurospora crassa OR74A] gi|28926226|gb|EAA35208.1| conserved [Neurospora crassa OR74A]
  misc_feature (14)..(619): NCBI GI: 145612421 Blast Desc: MGG_07118 [Magnaporthe grisea 70-15] gi|145019586|gb|EDK03814.1| MGG_07118 [Magnaporthe grisea 70-15]
  misc_feature (69)..(620): NCBI GI: 256727539 Blast Desc: NECHADRAFT_91062 [Nectria haematococca mpVI 77-13-4]
  misc_feature (141)..(607): NCBI GI: 46136539 Blast Desc: FG09785.1 [Gibberella zeae PH-1]
  misc_feature (53)..(610): NCBI GI: 154317745 Blast Desc: BC1G_03224 [Botryotinia fuckeliana B05.10] gi|150844398|gb|EDN19591.1| BC1G_03224 [Botryotinia fuckeliana B05.10]
  misc_feature (50)..(528): NCBI GI: 156049795 Blast Desc: SS1G_08605 [Sclerotinia sclerotiorum 1980] gi|154693003|gb|EDN92741.1| SS1G_08605 [Sclerotinia sclerotiorum 1980]
  misc_feature (36)..(523): NCBI GI: 240275047 Blast Desc: RNA binding protein MSSP-2 [Ajellomyces capsulatus H143]
MAADTTYDAKRAVATRAAQGGMPATNNGNGPQHPQHYVTAPLHEAPSNMTARGIQGSADGGMSAVVNQLGGLGISSGPVGPNGTVPGMMGSYVATTTDGQVMYPAGYAPAGFPALGYAQAPDAASAGFPPYIAQPNFQAYVPYPYVPYTPRGILTERSDVNAKEVPALENRRSSYSTNESTPATPFFGGSMAARDQASRVAVFDRSTYTTPSPQQYLAAAPGPGVAQNPKAIYTYTVPVDRDLDALVAQEPAIPQAVPAVFTPRKSMKTLDQSLVNNIPGNRNVYIRGLHPTTDDDLLLRYAERFGKVETSKAIIDTTTGACKGFGFSKFYDVRDSEMCIRGFYRLGYEVGFARASSPKPEPKRPSLLTVPSRIPKTLAVKPSGLAPETAIYLDGFYKNANFDGFFQESFNSRLKAEGDDDSTNLYISNLPRHYTEAELGAVFMGYTILSSKILRDPMGNSRGVGFARFESREICDAVIEEYQGVNLGPDGLAMQIRYADTPAQKELKRVTAERRQFRTNEYNVGAYGTTMVGVGTTMYNQQAAGPRRPFNAPAADFNSRVSFINRRGQGRSLGVAQTEPGIVNPENGAATSEDGSSDEGVTVHVNSPLVANGSCRSSPAKPEKKE

SEQ ID NO: 7857 - DNA, 2082 bp, Muscodor strobelii
  misc_feature: SGI cDNA ID NO. 562393
  misc_feature: Reduced expression when VOC is produced
  misc_feature: Encodes the peptide sequence at SEQ ID NO 7858
atggctgcgcaacttgatactctggacatcattgtcctggccgttatccttatgggcacggccgcctacttcaccaagggcaagtactggggcatcgtcaaagatccgtatgctgcatcccttgcgaacgccaatggcgccaaggccggcaagactagaaatatcatagagaagatggaggaatccggaaagaactgcgtcattttctacggctcgcaaaccggtaccgctgaagactatgcctctaggctggccaaggagggaaagagtcgtttcggtcttgagactatggtagctgatctagaagactacgactacgagaacctcgactccttccccgcggacaaggtggccatgtttgttctcgcaacctacggcgagggtgagcccactgataacgcagttgatttctatgagttcatctacggcgaggacccaactttcgccgattcaaatgacccgcctctgggtaaccttacttatgtcgcatttggtcttggtaacaacacgtatgagcactacaactcaatggttcgcaacgtagacaaggctctcgagaagctcggagccaccagagtcggcactgccggcgagggtgatgatggcgccggtactatggaagaagactttctcgcttggaaagatcccatgtgggctgctcttgctgagaagatgaacctcgaagaacgtgaggctgtttatgagcccatctttggtattgttgagcgagacaacttgactaaggactcgcccgaagtctacttaggcgagcctaacaagatgcatctcgagggaacggccaggggtcctttcaatgcccacaacccgtacatcgctcctatcgccgagtcgtacgaactgtttagcgtcaaggatcgtaactgcctccacatggaagttgatatctcaggttctaacctctcgtaccaaaccggcgaccatctggcagtctggcccaccaaccccggccaagaagtggattatatgctgaatgtcctgggtttggaagacaagaaagattcagtcatcagtgtcaaagctctcgagcccaccgccaaggttcctttccctacgcccacaacgtatgacgcgattatccgataccatcttgaaatttgcgctcctgtttctcgccagttcctcggtactctcgctgcattcgcccctgatgaggagaccaaagctgagatggccaaacttggtggcgacaaggactactttcaagataagatcagcaagtaccactacaacatttcgcaaactctcagtgtcgtcagcggtggaaagaagtggaccaacatcccgttctctgctttcatcgaaagtcttaacaagctccagcctcgttactattctatctcgtcgtcctctctcgtgcagccaaagaaaatttccgttactgcagtcgtcgaaagtcaacagatccctgaccgaaaggaacctttccgaggtgtcgccactaattacctactagctctcaagcagaagcagaacggcgatcccaatcccacagcctttggtctcacctacgaaatcatgggtccccggaacaaatacgatggcattcatgttcctgtgcacgtccgtcactctaacttcaagcttccctcggacccgtctaagcctgtcattctgattggaccgggtactggtgttgcccccatgcgcggctttgtccaggagcgtgccaagcaagcggaatctggccagaacgttggaaagacaattcttttcttcggttgccgaaaaagcactgaggacttcttgtatgagtctgagtggaaggaatacaagaaggtcttaggtgataacttcgagttggtcacggcattctctcgagagggttccaagaaggtttacgtccagcatcgcctcaaggaaaaggcgaaggaagtcaacgaacttctccagcaaaaggcgtacctttatgtctgtggtgacgctgccaacatggctcgggaagtcaacaccgttttgggccagatcattgcagaacagcgcggtcttcctgagagcaagggtgaggagattgtgaagaatatgagagctgcaaaccagtaccaggaggatgtttggtcatga

SEQ ID NO: 7858 - protein, 693 aa, Muscodor strobelii
  misc_feature: SGI Peptide ID NO. 562393
  misc_feature (269)..(489): Pfam Id: PF00667 Pfam Desc: FAD binding domain
  misc_feature (68)..(213): Pfam Id: PF00258 Pfam Desc: Flavodoxin
  misc_feature (544)..(657): Pfam Id: PF00175 Pfam Desc: Oxidoreductase NAD-binding domain
  misc_feature (3)..(693): NCBI GI: 39971603 Blast Desc: MGG_07117 [Magnaporthe grisea 70-15] gi|145019585|gb|EDK03813.1| MGG_07117 [Magnaporthe grisea 70-15]
  misc_feature (3)..(693): NCBI GI: 85112967 Blast Desc: NADPH-cytochrome P450 reductase [Neurospora crassa OR74A] gi|28926225|gb|EAA35207.1| NADPH-cytochrome P450 reductase [Neurospora crassa OR74A]
  misc_feature (3)..(693): NCBI GI: 171690498 Blast Desc: protein product [Podospora anserina] gi|170945197|emb|CAP71308.1| protein product [Podospora anserina]
  misc_feature (3)..(693): NCBI GI: 256727540 Blast Desc: [Nectria haematococca mpVI 77-13-4]
  misc_feature (3)..(688): NCBI GI: 32562989 Blast Desc: cytochrome P450 oxidoreductase [Gibberella fujikuroi]
  misc_feature (3)..(693): NCBI GI: 116196112 Blast Desc: conserved [Chaetomium globosum CBS 148.51] gi|88180567|gb|EAQ88035.1| conserved [Chaetomium globosum CBS 148.51]
  misc_feature (1)..(693): NCBI GI: 154317749 Blast Desc: BC1G_03226 [Botryotinia fuckeliana B05.10] gi|49523481|emb|CAE76653.1| NADPH cytochrome P450 oxidoreductase [Botryotinia fuckeliana] gi|150844400|gb|EDN19593.1| BC1G_03226
  misc_feature (3)..(688): NCBI GI: 46136541 Blast Desc: FG09786.1 [Gibberella zeae PH-1]
  misc_feature (1)..(693): NCBI GI: 156049791 Blast Desc: SS1G_08602 [Sclerotinia sclerotiorum 1980] gi|154693001|gb|EDN92739.1| SS1G_08602 [Sclerotinia sclerotiorum 1980]
  misc_feature (3)..(693): NCBI GI: 158998772 Blast Desc: cytochrome P450 reductase 1 [Cochliobolus lunatus]
  misc_feature (3)..(693): SWISSPROT Homolog: EC 1.6.2.4 NADPH--hemoprotein reductase
  misc_feature: Useful for introducing or modulating the production of volatile compounds
MAAQLDTLDIIVLAVILMGTAAYFTKGKYWGIVKDPYAASLANANGAKAGKTRNIIEKMEESGKNCVIFYGSQTGTAEDYASRLAKEGKSRFGLETMVADLEDYDYENLDSFPADKVAMFVLATYGEGEPTDNAVDFYEFIYGEDPTFADSNDPPLGNLTYVAFGLGNNTYEHYNSMVRNVDKALEKLGATRVGTAGEGDDGAGTMEEDFLAWKDPMWAALAEKMNLEEREAVYEPIFGIVERDNLTKDSPEVYLGEPNKMHLEGTARGPFNAHNPYIAPIAESYELFSVKDRNCLHMEVDISGSNLSYQTGDHLAVWPTNPGQEVDYMLNVLGLEDKKDSVISVKALEPTAKVPFPTPTTYDAIIRYHLEICAPVSRQFLGTLAAFAPDEETKAEMAKLGGDKDYFQDKISKYHYNISQTLSVVSGGKKWTNIPFSAFIESLNKLQPRYYSISSSSLVQPKKISVTAVVESQQIPDRKEPFRGVATNYLLALKQKQNGDPNPTAFGLTYEIMGPRNKYDGIHVPVHVRHSNFKLPSDPSKPVILIGPGTGVAPMRGFVQERAKQAESGQNVGKTILFFGCRKSTEDFLYESEWKEYKKVLGDNFELVTAFSREGSKKVYVQHRLKEKAKEVNELLQQKAYLYVCGDAANMAREVNTVLGQIIAEQRGLPESKGEEIVKNMRAANQYQEDVWS

SEQ ID NO: 7859 - DNA, 3294 bp, Muscodor strobelii
  misc_feature: SGI EST ID NO. CUFF.19475.0
  misc_feature: Variant of the nucleotide sequence at SEQ ID NO 7857
cggttacagcccactatcattagtcgtttgtccgctgggatgggaagtgtacttccacaatggcctcgggacagtgtagcctcgtagtcatagagcaccagtggaagtacaatgctgtagtgtgtgtcggtcggttcaatgttacaggtcccatttactcagaggaggcccggactaacaggtctgaggtggttacctaattggaccttgcagacagacggtgacccggacgcacgcttatcacaaggagtgatggcacgataaaaactgctggccgccacagcccgcccgctcgcccatcttctccgtctgtctgtccccttctcttcgatctcgctgccctcaccgacccaacgatcggccgacttgatagcagctctcggctgggtgtcgacacctcgagactgcaccattcagcgtagcttaatttgcatttttgctctttcctctgtttgtctcgtctcccctgagcacccgtcgcacccttttgtagcccgcctagtttcagtcgggagttcagaggccctccctatccccgccacctcgcgctgaagttgccacctgtcgcattgcctcgttccttatcgcatttgatacattcgtatttcggcgaacggcctatcatttaatctgccgtaaggctgagacccctaaaccccaatttacgcgacaaatcgccttaggcaattattgcacacgcacatcatggctgcgcaacttgatactctggacatcattgtcctggccgttatccttatgggcacggccgcctacttcaccaagggcaagtactggggcatcgtcaaagatccgtatgctgcatcccttgcgaacgccaatggcgccaaggccggcaagactagaaatatcatagagaagatggaggaatccggaaagaactgcgtcattttctacggctcgcaaaccggtaccgctgaagactatgcctctaggctggccaaggagggaaagagtcgtttcggtcttgagactatggtagctgatctagaagactacgactacgagaacctcgactccttccccgcggacaaggtggccatgtttgttctcgcaacctacggcgagggtgagcccactgataacgcagttgatttctatgagttcatctacggcgaggacccaactttcgccgattcaaatgacccgcctctgggtaaccttacttatgtcgcatttggtcttggtaacaacacgtatgagcactacaactcaatggttcgcaacgtagacaaggctctcgagaagctcggagccaccagagtcggcactgccggcgagggtgatgatggcgccggtactatggaagaagactttctcgcttggaaagatcccatgtgggctgctcttgctgagaagatgaacctcgaagaacgtgaggctgtttatgagcccatctttggtattgttgagcgagacaacttgactaaggactcgcccgaagtctacttaggcgagcctaacaagatgcatctcgagggaacggccaggggtcctttcaatgcccacaacccgtacatcgctcctatcgccgagtcgtacgaactgtttagcgtcaaggatcgtaactgcctccacatggaagttgatatctcaggttctaacctctcgtaccaaaccggcgaccatctggcagtctggcccaccaaccccggccaagaagtggattatatgctgaatgtcctgggtttggaagacaagaaagattcagtcatcagtgtcaaagctctcgagcccaccgccaaggttcctttccctacgcccacaacgtatgacgcgattatccgataccatcttgaaatttgcgctcctgtttctcgccagttcctcggtactctcgctgcattcgcccctgatgaggagaccaaagctgagatggccaaacttggtggcgacaaggactactttcaagataagatcagcaagtaccactacaacatttcgcaaactctcagtgtcgtcagcggtggaaagaagtggaccaacatcccgttctctgctttcatcgaaagtcttaacaagctccagcctcgttactattctatctcgtcgtcctctctcgtgcagccaaagaaaatttccgttactgcagtcgtcgaaagtcaacagatccctgaccgaaaggaacctttccgaggtgtcgccactaattacctactagctctcaagcagaagcagaacggcgatcccaatcccacagcctttggtctcacctacgaaatcatgggtccccggaacaaatacgatggcattcatgttcctgtgcacgtccgtcactctaacttcaagcttccctcggacccgtctaagcctgtcattctgattggaccgggtactggtgttgcccccatgcgcggctttgtccaggagcgtgccaagcaagcggaatctggccagaacgttggaaagacaattcttttcttcggttgccgaaaaagcactgaggacttcttgtatgagtctgagtggaaggaatacaagaaggtcttaggtgataacttcgagttggtcacggcattctctcgagagggttccaagaaggtttacgtccagcatcgcctcaaggaaaaggcgaaggaagtcaacgaacttctccagcaaaaggcgtacctttatgtctgtggtgacgctgccaacatggctcgggaagtcaacaccgttttgggccagatcattgcagaacagcgcggtcttcctgagagcaagggtgaggagattgtgaagaatatgagagctgcaaaccagtaccaggaggatgtttggtcatgataaaaatatagacagaaagagcatgtcgtatattggcggcactgcccttaattccatgcatgagaggcgttttatctggcatagacctttttggtggtccctggtggagttctgtgaggtctgggcttgcactacgagaccaaaggcattcaacaagaatgctgagacatggacttacggtgttgatttgctttggcatagaggctgatatggcaccatcactccatatagacgagacttcaaaagactgatcttatacgtaagtcgtcttcgaatccgaagagtattgacgacaaccattctgtacgtgccttttacattccagatagggaaatattcatattttgaaatatcaagccgaaaccaaacttcaaggcatatagtttcaggttagcttggattggattggcctgaatgagcctactccacaagctccagggaaataagcgttccgaaagtagtcaaagtctgacagtgattcgagacagcaactagtgctttacaaac

SEQ ID NO: 7860 - DNA, 7365 bp, Muscodor strobelii
  misc_feature: SGI cDNA ID NO. 562394
  misc_feature: Encodes the peptide sequence at SEQ ID NO 7861
atgccgctatccccttcgctgacccccctgtcacatcatgtagctccgtcccataaggacagcagccgttcagcctcgcgcctcaatgtccgggacgatgacagcgattcctgggacaacaccctcaaacctctgcctcacgacgcagccgtaagccgcgccattgcccactcgcgcgaatcctcgctggagaagctccagtcgggtgcgttggctggcatccccgaatcgccccattttgcgccctcctcatcctcgacctcctcgccaggcatccggaccccggccgctcgtccgggcataggcgccgtcatcgagcgtgcgatagactccaagatagcagcgtatggacatcaccgtcagacttcgatcgtacatggtatccagcattcgcggaatggaagccacagctcctcctcgagtcctctgagccctcagatcatagccgctgccggagctggcttgcacccggaacgacctgacatccccgtcacggcggcgcgcccggaaatggatacatctggtggctcgcgaccgcccacggccctgtcaggatccacggtgtccccctcggtgcatccactggagcggaccctgtctgtctcggagaccagcaccctgacacagaggaccttcgagcgcatgcacagcacgagtcgccgtgaccattcacatcatcattcgcactcgtcaaggcaccatagagacgagcagaagacagtcggggagtatgcactacatgtgctgttcacttccttcattgctcatgccgaagaaaaactcaatgagtgtattacagtcccttttgaccccgagcccaggatcgaaaggatctgtggtcctggttcggacccagcctttgaccagttcatcgtggcccttggtcatatcgctagtcccaaacccaagtctctgatcgattctatcatgctgtggaggaaatacaaaagtgaagccgccaacgaggctcgtagccagcttcagcaactcaaatcttcccagcttcccccaggtctcattagacgtaatactgagcctgtgcaagtgactgtagctaatgcttcattggacgcttccacacccacgggcgcggcctcgctggccgcgaaacaggagtacgtggcccacgctgagcggcgatctatcgtttccatctacatactgtgtcgcgttcttcttgaagttatatcacagagtagccttgcctccattacacctgagatggaagacaagctagaaggcatcatttttggccaactgaagattgcagaggttgagcaattggccatgtctcctctcaaaatggccaactggaaattgtttgctcagttacttggcgccatgagtgcaattaatttcgcaagcgttgcggaccgatttatcgccgacctgagtcgctcgttgcatgatttgaccgggcgtagcccgaccttaccgcctgctcatatcgaaggccaggtggaactcgttctcggtggcatgtcgcatctacgactgaaaatcaattccgaggaagcgtgggatcaggcttgccgtttcttgacgtcactgggacgcctttttgcgaactcgcgaggccaaacggtgaaatcggctttctgccggatactggacacactgcttcttcccgttgcagctacaggaacaaataatcattttatgcatccgaaatggcaggaagttctaagcaacataagtccacgactgggtacaatattcgccaagcctcggtactggatcatcggctataagcataccgagtattgctgcaagaatatcatcttccctttgattaacgccgagtcctttaactcgaataaggaactcaaagttgaacaactcgaaccggatagaatggtcattggtattcgatcatttcttgccgttttatctgacctcgagcaaggcaacggggccgcccaccatttccacaagaatcttcgctctcccagaaactcttcacctaattctgacgaggctctgacccctcccgttcagctaggcgcgttgagcgactccgtgcgagattactataggaaattttccgagatactgggcaaaatcacgattatttgtgataatacatttggcggacaggcggtacttgatgagaaatttagcagtaacggacctaaaacaccaattacggaatcattcaacttttcacgacgtgatgaccatcaaaccccagcagacttaaagcacgccttctataggcttctccatgttgcggtacacgctttacctcgctgcctgtctcctgctatacctttcaacccgcttgtcaatctgttatgtacaggcactgctcacgtccagggcggaatcgcccaatcctctgctcaatctctaaagtcaattgccaaacaatcccatgcccaccaggtaactatggggtttgctcggttcatattcaactttgatgatcgctatgcgacgatgtcagacgggggtatgctgggtcatagccacatcgagaacacacttcgactttatgttgagcttctacaaatttggagagacgagataagacagaaaacgatggacgcaacgtccgaggtcaccgaagacgtctcgtatgatagacgaggcctgaagctcgacttgtcgagtatctgggccgaggtagaacatgtggaggctcgtggtctcttctttctctgctcccagtcccgacgagtcagacatttcgcaattactgttcttaggctcatcaaagaattcgatgctgcgttgggaaaagatcacactcaagaaaaggacaatgttcgtcttattgatattctagaaaacgactcatttcaagtgatgagcttgaaagacgaacatctatcggtggccgaacgaagtcggcttcaacgaggaatacaaaatacgaatagcaagggtgcgctcatagacctttgtaccagcgatgtctcgtacgatactacgctgtggttcaaaatatttcccaacttgatacgcattgcatacgaccaatgcccgttcactgttaccattggccgcgacttaatctgcaaccggattttgcagatgtacgcggctatatacacactgtccgagcctataaggggtttgtattatggttctgatcctgctagtgcccgtcagaacggaagaactccgacaacgcagccggaggtcttggttgaacagtggaaactgtatttgactttcgcctgcactactgtggcagacacgggcaaccctattaatggcgcaacacaaggaagtcaacacttaagaaagggctcgaagtccagtgacaggattgtctcagcgagagttctattcaaatatttaatcccactactctcagtctcttctgcttcggttcgggaagcagtagtcctctcaatgggctccataaacatccacatctatcgaactctgctagaagagttgcaggggcaggtttccagatgcaacgacgaagcgagagcaagattacaccaacgaaccaatagcagtccaagtcgaaaccgcaagatggatctcttgtggaccgaactcacacatgtttataagctcacttcacactttctgaaggaccctgacgtgtatcaagacgaatggattctaaacaacctttgtacctacacgcgtgatttaaaactatttctcatggatggagaagtacaaaacgactgggaattccagaaactccgaaggcattattgtggcttgatggaggaactattcgaaggcatcaaccgaacccaagacccttcacgctggatgacattcgaatctcgcaagtcggccttcactttgatggaagactggtgtggattctcccccaaccaacagcagatccgtctgagagaagacactatgaggcagtcgttgattaaccagcaatcactgggtgagcgcggaaccatcactgctgctatggaaattgaaaagagaaacctgagaacggcggcactgagtgcaatggcagcgctttgtgctggtgctgtcagtgtcacgactgagagtggcgcagttttgcagttcgacttgagacgcatgcttacttggatagaggcaattttcagctcaggaagcgatcgagtcaatgtcatcggccggctggctttgaagaacctgattgtgtataaccagggatcgccttacctgttagaacactgcattgctcgctgctatttgacagacaccccgaaagtcttagagagctactttgcggtcatcaccgatgttcttctcgatcaccttgattacccattaccattttggaaattgttgggactgtgtttattcacattaggaaatgacctcagtgaaattcggtcccaagccgcacggattctgagagcattggaggaaagacagcaaagcggaaggagttctaagatccaagatttcgatatcagcatttctgacaaaaccaaagctgtctacaaactggctcaattcgagatctccaagcgacttgcaaagcaacatactgaacttgcatttcacatattctctgagttcactctgtatttcaagagcctccagccgggtgcacaaagaaacgtggtggcagttcttctcccatggatccagctgattgaactcaagattgatccaaatggaggtcctatcgctcaatcgtatgtgttgcttgccaatctcattgagataaccatcaagtcaagtgctgcgttgcataacgaagttcaagcgttatggcaagctttagcgactggtccgtatcctggaaatgttcgacttgtccttgacttcatcatttccctgtgtcttgaacgcagagagcaaaactttgttgagtatgccaagcagatcgttgttttcttatctagcactacaaccacaccaggcatcaaagttgtcgaatttcttctactacagatcacgcccaaagccatggttccaaacgaaaagaaagaagctgtccctccaccgccagacatcaaccagctaccgtactgcgcggatttgtctgaagcattgccagttggcaccaaacaggctggtctctcactgggccaactggctctcatcctcttggttgatctgatgatcgccccagtacagctcacagccgacaatttacctatccttttacaggttgtcactgtcctatgggatcactatacacctctagtgcaagagcaagcacgggaaatgcttgtacatttgattcatgaactggtaatttcaagaatggacgaaactacgcagcctgaagtcaagaagtcgatagaagacttgattgacgcagtgcgccagcacgatcgctcagttgtttggagctacgaagacagcaatggtaaggtggacgagcgtgacaataaggttccgcaaagtatggacttcctcacaactgaagttgtgaagacattcggggtcaccttccctggtatcaaggagcaatggagtcgtttgtcactcaactgggcaacgtcctgccctgttcgtcacttagcttgccgttcattccaaatcttccgatgcatactcacgtcggtagaccaaatgatgctaggcgatatgctagcacgactatcgaatacgattgccgacgaagactccgaaattcaaaccttctctatggagattcttacaaccttgaagacattgattgtcaagctcgaacctgagcagcttctgtcgtatccgcaattattttggactacttgtgcttgcctagagtcgatcaacgagctcgaattcctggaagctgttgggatgcttgacgagtatgttgagaagctcgatttcagttctcctcacattcgaaggacgctactagagggacagcctccgcgatgggatggcatatttgatggagtgcagcctttactctacaagggactgaggtcctcattgtgtctccaacctacgcttgatctcatggacaagctagtgcaactaccaagcgacccgctcatcggtgatgataatcgactgtttttctccattattgccaatttccctcgatgtttgcaagggatggaacagaaatttatcgatgagcgaaccaaacagacagtggagatcttgcttgcggtggcggaagcacaagaatttgtcccgatctgtgatgcactgggtggctttcttgatgcgagcttcccgtcaagccaagacatgatgacacagctatttgcggctgttcgcgaattctttctaccgcagcttgacttcaagatgctcaccatgctcatgggctttttaaccaatagcatttcatcggtcaaattgatgaccatgcggcttctatgtgtcgtcattcctggtatcgagatgaggaaacctgagattgccggacacgggcccgatctcatctcgccactacttcgcttgctgcaaaccgagttctgtatggaagcattggttgttcttgacaaggttgtagccgtatccgggtcttcgatggaaagacatcatctccgaatgagtatgacccgctcatcgtctagagccattagaaaggaatacgaacggacgcaaagcttgtttgggatacctgaagaatctggttgggccattcctgcgcctgccaagaagaccgatgcgactcgcgctaatatacatgccgcattctatatgtgtcaggcagaagcagaaaatggagtgccgaccgatccaacccccacacccgaagtcgcattccatgccgatgactatcggtacggctacttcgaaatgccagacagaacagaaactatgatgtcggatgacgcgcgtggagaagggcatatgggcgatctggtcactaagcttgacagcttggacgacttttttgacgatatgtctcaaacctcgcctagcgagggccggtcatcgaggactgtcaccgagttcacgccagataattacgaatcgggggctaggctctacgacgatgtactacccatcctacatcaggcatcaaataacacatcgtttcaaaacgggttcgatagattgcccgtgaccaaagagagcaacaccaatgcgatgaatcctggggcgttcaactcgaccatttcgcaaacaagtgtgcgaccggtgcttcatgcgcgatccatcacgtcgccctcgacaccggcatcctatcaaccacagctggccgagttcacatcggacgaggagctgacggaagacctcttctccgacggcgaagaagagcgtcaagggttctcgggtcaggctcccgctgagagctccttcttccttgagaacatgatcaaacctatcaagcaaacgacaaagacgcatatgcgccggctaacaggcggacggtcgcgcgaaatggaccgacagcgggagctatttcgtgccgcgcagcaaatctcgccagtgcccaaagtccccagcacgtttcttcagcacaaaacgaatccatccagcgacatgctttga

SEQ ID NO: 7861 - protein, 2454 aa, Muscodor strobelii
  misc_feature: SGI Peptide ID NO. 562394
  misc_feature (580)..(2424): NCBI GI: 46136543 Blast Desc: FG09787.1 [Gibberella zeae PH-1]
  misc_feature (580)..(2418): NCBI GI: 116196110 Blast Desc: CHGG_04653 [Chaetomium globosum CBS 148.51] gi|88180566|gb|EAQ88034.1| CHGG_04653 [Chaetomium globosum CBS 148.51]
  misc_feature (580)..(2280): NCBI GI: 261359762 Blast Desc: cell morphogenesis protein PAG1 [Verticillium albo-atrum VaMs.102]
  misc_feature (580)..(2418): NCBI GI: 171690496 Blast Desc: protein product [Podospora anserina] gi|170945196|emb|CAP71307.1| protein product [Podospora anserina]
  misc_feature (580)..(2378): NCBI GI: 164422759 Blast Desc: NCU09740 [Neurospora crassa OR74A] gi|157069809|gb|EAA35206.2| NCU09740 [Neurospora crassa OR74A]
  misc_feature (580)..(2454): NCBI GI: 145612417 Blast Desc: MGG_07116 [Magnaporthe grisea 70-15] gi|145019583|gb|EDK03811.1| MGG_07116 [Magnaporthe grisea 70-15]
  misc_feature (84)..(2453): NCBI GI: 154286500 Blast Desc: conserved [Ajellomyces capsulatus NAm1] gi|150407686|gb|EDN03227.1| conserved [Ajellomyces capsulatus NAm1]
  misc_feature (7)..(2451): NCBI GI: 145240515 Blast Desc: An08g07870 [Aspergillus niger] gi|134077426|emb|CAK45680.1| protein product [Aspergillus niger]
  misc_feature (580)..(2451): NCBI GI: 119471793 Blast Desc: cell morphogenesis protein (PAG1), [Neosartorya fischeri NRRL 181] gi|119406374|gb|EAW16325.1| cell morphogenesis protein (PAG1), [Neosartorya fischeri NRRL 181]
  misc_feature (580)..(2451): NCBI GI: 159124556 Blast Desc: cell morphogenesis protein (PAG1), [Aspergillus fumigatus A1163]
MPLSPSLTPLSHHVAPSHKDSSRSASRLNVRDDDSDSWDNTLKPLPHDAAVSRAIAHSRESSLEKLQSGALAGIPESPHFAPSSSSTSSPGIRTPAARPGIGAVIERAIDSKIAAYGHHRQTSIVHGIQHSRNGSHSSSSSPLSPQIIAAAGAGLHPERPDIPVTAARPEMDTSGGSRPPTALSGSTVSPSVHPLERTLSVSETSTLTQRTFERMHSTSRRDHSHHHSHSSRHHRDEQKTVGEYALHVLFTSFIAHAEEKLNECITVPFDPEPRIERICGPGSDPAFDQFIVALGHIASPKPKSLIDSIMLWRKYKSEAANEARSQLQQLKSSQLPPGLIRRNTEPVQVTVANASLDASTPTGAASLAAKQEYVAHAERRSIVSIYILCRVLLEVISQSSLASITPEMEDKLEGIIFGQLKIAEVEQLAMSPLKMANWKLFAQLLGAMSAINFASVADRFIADLSRSLHDLTGRSPTLPPAHIEGQVELVLGGMSHLRLKINSEEAWDQACRFLTSLGRLFANSRGQTVKSAFCRILDTLLLPVAATGTNNHFMHPKWQEVLSNISPRLGTIFAKPRYWIIGYKHTEYCCKNIIFPLINAESFNSNKELKVEQLEPDRMVIGIRSFLAVLSDLEQGNGAAHHFHKNLRSPRNSSPNSDEALTPPVQLGALSDSVRDYYRKFSEILGKITIICDNTFGGQAVLDEKFSSNGPKTPITESFNFSRRDDHQTPADLKHAFYRLLHVAVHALPRCLSPAIPFNPLVNLLCTGTAHVQGGIAQSSAQSLKSIAKQSHAHQVTMGFARFIFNFDDRYATMSDGGMLGHSHIENTLRLYVELLQIWRDEIRQKTMDATSEVTEDVSYDRRGLKLDLSSIWAEVEHVEARGLFFLCSQSRRVRHFAITVLRLIKEFDAALGKDHTQEKDNVRLIDILENDSFQVMSLKDEHLSVAERSRLQRGIQNTNSKGALIDLCTSDVSYDTTLWFKIFPNLIRIAYDQCPFTVTIGRDLICNRILQMYAAIYTLSEPIRGLYYGSDPASARQNGRTPTTQPEVLVEQWKLYLTFACTTVADTGNPINGATQGSQHLRKGSKSSDRIVSARVLFKYLIPLLSVSSASVREAVVLSMGSINIHIYRTLLEELQGQVSRCNDEARARLHQRTNSSPSRNRKMDLLWTELTHVYKLTSHFLKDPDVYQDEWILNNLCTYTRDLKLFLMDGEVQNDWEFQKLRRHYCGLMEELFEGINRTQDPSRWMTFESRKSAFTLMEDWCGFSPNQQQIRLREDTMRQSLINQQSLGERGTITAAMEIEKRNLRTAALSAMAALCAGAVSVTTESGAVLQFDLRRMLTWIEAIFSSGSDRVNVIGRLALKNLIVYNQGSPYLLEHCIARCYLTDTPKVLESYFAVITDVLLDHLDYPLPFWKLLGLCLFTLGNDLSEIRSQAARILRALEERQQSGRSSKIQDFDISISDKTKAVYKLAQFEISKRLAKQHTELAFHIFSEFTLYFKSLQPGAQRNVVAVLLPWIQLIELKIDPNGGPIAQSYVLLANLIEITIKSSAALHNEVQALWQALATGPYPGNVRLVLDFIISLCLERREQNFVEYAKQIVVFLSSTTTTPGIKVVEFLLLQITPKAMVPNEKKEAVPPPPDINQLPYCADLSEALPVGTKQAGLSLGQLALILLVDLMIAPVQLTADNLPILLQVVTVLWDHYTPLVQEQAREMLVHLIHELVISRMDETTQPEVKKSIEDLIDAVRQHDRSVVWSYEDSNGKVDERDNKVPQSMDFLTTEVVKTFGVTFPGIKEQWSRLSLNWATSCPVRHLACRSFQIFRCILTSVDQMMLGDMLARLSNTIADEDSEIQTFSMEILTTLKTLIVKLEPEQLLSYPQLFWTTCACLESINELEFLEAVGMLDEYVEKLDFSSPHIRRTLLEGQPPRWDGIFDGVQPLLYKGLRSSLCLQPTLDLMDKLVQLPSDPLIGDDNRLFFSIIANFPRCLQGMEQKFIDERTKQTVEILLAVAEAQEFVPICDALGGFLDASFPSSQDMMTQLFAAVREFFLPQLDFKMLTMLMGFLTNSISSVKLMTMRLLCVVIPGIEMRKPEIAGHGPDLISPLLRLLQTEFCMEALVVLDKVVAVSGSSMERHHLRMSMTRSSSRAIRKEYERTQSLFGIPEESGWAIPAPAKKTDATRANIHAAFYMCQAEAENGVPTDPTPTPEVAFHADDYRYGYFEMPDRTETMMSDDARGEGHMGDLVTKLDSLDDFFDDMSQTSPSEGRSSRTVTEFTPDNYESGARLYDDVLPILHQASNNTSFQNGFDRLPVTKESNTNAMNPGAFNSTISQTSVRPVLHARSITSPSTPASYQPQLAEFTSDEELTEDLFSDGEEERQGFSGQAPAESSFFLENMIKPIKQTTKTHMRRLTGGRSREMDRQRELFRAAQQISPVPKVPSTFLQHKTNPSSDML

SEQ ID NO: 7862 - DNA, 9622 bp, Muscodor strobelii
  misc_feature: SGI EST ID NO. CUFF.19575.0
  misc_feature: Variant of the nucleotide sequence at SEQ ID NO 7860
ggacggtgtccagctgtgtgcgtgcgcgcgagcgtatcaagtagaccctcaaggaccctgtcttttcttgtgcctgtcgcgcgtggagagccgcagcttcggctccatctgcagcttggtggcggcctgcgaccttgtttcctgacgtcccatcacgacgggttctgcaccacggattctgcagacgtgtatctgccgccacgactgtgctgctgctgctgctgctgctgcgcctatcccactcgctggtgccaatcgctgcctggtgctcgctgtgctgccacggcagactcgtcctgtttcacaagagaggggacactcccctccctcgcccgtgtgttcctatgccgctatccccttcgctgacccccctgtcacatcatgtagctccgtcccataaggacagcagccgttcagcctcgcgcctcaatgtccgggacgatgacagcgattcctgggacaacaccctcaaacctctgcctcacgacgcagccgtaagccgcgccattgcccactcgcgcgaatcctcgctggagaagctccagtcgggtgcgttggctggcatccccgaatcgccccattttgcgccctcctcatcctcgacctcctcgccaggcatccggaccccggccgctcgtccgggcataggcgccgtcatcgagcgtgcgatagactccaagatagcagcgtatggacatcaccgtcagacttcgatcgtacatggtatccagcattcgcggaatggaagccacagctcctcctcgagtcctctgagccctcagatcatagccgctgccggagctggcttgcacccggaacgacctgacatccccgtcacggcggcgcgcccggaaatggatacatctggtggctcgcgaccgcccacggccctgtcaggatccacggtgtccccctcggtgcatccactggagcggaccctgtctgtctcggagaccagcaccctgacacagaggaccttcgagcgcatgcacagcacgagtcgccgtgaccattcacatcatcattcgcactcgtcaaggcaccatagagacgagcagaagacagtcggggagtatgcactacatgtgctgttcacttccttcattgctcatgccgaagaaaaactcaatgagtgtattacagtcccttttgaccccgagcccaggatcgaaaggatctgtggtcctggttcggacccagcctttgaccagttcatcgtggcccttggtcatatcgctagtcccaaacccaagtctctgatcgattctatcatgctgtggaggaaatacaaaagtgaagccgccaacgaggctcgtagccagcttcagcaactcaaatcttcccagcttcccccaggtctcattagacgtaatactgagcctgtgcaagtgactgtagctaatgcttcattggacgcttccacacccacgggcgcggcctcgctggccgcgaaacaggagtacgtggcccacgctgagcggcgatctatcgtttccatctacatactgtgtcgcgttcttcttgaagttatatcacagagtagccttgcctccattacacctgagatggaagacaagctagaaggcatcatttttggccaactgaagattgcagaggttgagcaattggccatgtctcctctcaaaatggccaactggaaattgtttgctcagttacttggcgccatgagtgcaattaatttcgcaagcgttgcggaccgatttatcgccgacctgagtcgctcgttgcatgatttgaccgggcgtagcccgaccttaccgcctgctcatatcgaaggccaggtggaactcgttctcggtggcatgtcgcatctacgactgaaaatcaattccgaggaagcgtgggatcaggcttgccgtttcttgacgtcactgggacgcctttttgcgaactcgcgaggccaaacggtgaaatcggctttctgccggatactggacacactgcttcttcccgttgcagctacaggaacaaataatcattttatgcatccgaaatggcaggaagttctaagcaacataagtccacgactgggtacaatattcgccaagcctcggtactggtcggtgtcattcccactgactacaacaatgctttgcgtgtctcctcccgagagcgccagtgcccaatggctccaattaattcgaacgcttcagcctcgcctaagagatagcaaggtgcggcagacatgcttgctagctatttctcgcctactctggtcctacttgtataggttgaacgaaacaggggctagtgtcacgcgaaagctagatgaagtcatgcaacttgtattgcccccgactaagcgtacattttcggagcatgatactgcctcaaatggtcctcttattcaaataatcaggatcatcggctataagcataccgagtattgctgcaagaatatcatcttccctttgattaacgccgagtcctttaactcgaataaggaactcaaagttgaacaactcgaaccggatagaatggtcattggtattcgatcatttcttgccgttttatctgacctcgagcaaggcaacggggccgcccaccatttccacaagaatcttcgctctcccagaaagttgataatattcccgattcacctgcctctgtcccgggctatgcaatgttttcgaccgatagctcttcacctaattctgacgaggctctgacccctcccgttcagctaggcgcgttgagcgactccgtgcgagattactataggaaattttccgagatactgggcaaaatcacgattatttgtgataatacatttggcggacaggcggtacttgatgagaaatttagcagtaacggacctaaaacaccaattacggaatcattcaacttttcacgacgtgatgaccatcaaaccccagcagacttaaagcacgccttctataggcttctccatgttgcggtacacgctttacctcgctgcctgtctcctgctatacctttcaacccgcttgtcaatctgttatgtacaggcactgctcacgtccagggcggaatcgcccaatcctctgctcaatctctaaagtcaattgccaaacaatcccatgcccaccaggtaactatggggtttgctcggttcatattcaactttgatgatcgctatgcgacgatgtcagacgggggtatgctgggtcatagccacatcgagaacacacttcgactttatgttgagcttctacaaatttggagagacgagataagacagaaaacgatggacgcaacgtccgaggtcaccgaagacgtctcgtatgatagacgaggcctgaagctcgacttgtcgagtatctgggccgaggtagaacatgtggaggctcgtggtctcttctttctctgctcccagtcccgacgagtcagacatttcgcaattactgttcttaggctcatcaaagaattcgatgctgcgttgggaaaagatcacactcaagaaaaggacaatgttcgtcttattgatattctagaaaacgactcatttcaagtgatgagcttgaaagacgaacatctatcggtggccgaacgaagtcggcttcaacgaggaatacaaaatacgaatagcaagggtgcgctcatagacctttgtaccagcgatgtctcgtacgatactacgctgtggttcaaaatatttcccaacttgatacgcattgcatacgaccaatgcccgttcactgttaccattggccgcgacttaatctgcaaccggattttgcagatgtacgcggctatatacacactgtccgagcctataaggggtttgtattatggttctgatcctgctagtgcccgtcagaacggaagaactccgacaacgcagccggaggtcttggttgaacagtggaaactgtatttgactttcgcctgcactactgtggcagacacgggcaaccctattaatggcgcaacacaaggaagtcaacacttaagaaagggctcgaagtccagtgacaggattgtctcagcgagagttctattcaaatatttaatcccactactctcagtctcttctgcttcggttcgggaagcagtagtcctctcaatgggctccataaacatccacatctatcgaactctgctagaagagttgcaggggcaggtttccagatgcaacgacgaagcgagagcaagattacaccaacgaaccaatagcagtccaagtcgaaaccgcaagatggatctcttgtggaccgaactcacacatgtttataagctcacttcacactttctgaaggaccctgacgtgtatcaagacgaatggattctaaacaacctttgtacctacacgcgtgatttaaaactatttctcatggatggagaagtacaaaacgactgggaattccagaaactccgaaggcattattgtggcttgatggaggaactattcgaaggcatcaaccgaacccaagacccttcacgctggatgacattcgaatctcgcaagtcggccttcactttgatggaagactggtgtggattctcccccaaccaacagcagatccgtctgagagaagacactatgaggcagtcgttgattaaccagcaatcactgggtgagcgcggaaccatcactgctgctatggaaattgaaaagagaaacctgagaacggcggcactgagtgcaatggcagcgctttgtgctggtgctgtcagtgtcacgactgagagtggcgcagttttgcagttcgacttgagacgcatgcttacttggatagaggcaattttcagctcaggaagcgatcgagtcaatgtcatcggccggctggctttgaagaacctgattgtgtataaccagggatcgccttacctgttagaacactgcattgctcgctgctatttgacagacaccccgaaagtcttagagagctactttgcggtcatcaccgatgttcttctcgatcaccttgattacccattaccattttggaaattgttgggactgtgtttattcacattaggaaatgacctcagtgaaattcggtcccaagccgcacggattctgagagcattggaggaaagacagcaaagcggaaggagttctaagatccaagatttcgatatcagcatttctgacaaaaccaaagctgtctacaaactggctcaattcgagatctccaagcgacttgcaaagcaacatactgaacttgcatttcacatattctctgagttcactctgtatttcaagagcctccagccgggtgcacaaagaaacgtggtggcagttcttctcccatggatccagctgattgaactcaagattgatccaaatggaggtcctatcgctcaatcgtatgtgttgcttgccaatctcattgagataaccatcaagtcaagtgctgcgttgcataacgaagttcaagcgttatggcaagctttagcgactggtccgtatcctggaaatgttcgacttgtccttgacttcatcatttccctgtgtcttgaacgcagagagcaaaactttgttgagtatgccaagcagatcgttgttttcttatctagcactacaaccacaccaggcatcaaagttgtcgaatttcttctactacagatcacgcccaaagccatggttccaaacgaaaagaaagaagctgtccctccaccgccagacatcaaccagctaccgtactgcgcggatttgtctgaagcattgccagttggcaccaaacaggctggtctctcactgggccaactggctctcatcctcttggttgatctgatgatcgccccagtacagctcacagccgacaatttacctatccttttacaggttgtcactgtcctatgggatcactatacacctctagtgcaagagcaagcacgggaaatgcttgtacatttgattcatgaactggtaatttcaagaatggacgaaactacgcagcctgaagtcaagaagtcgatagaagacttgattgacgcagtgcgccagcacgatcgctcagttgtttggagctacgaagacagcaatggtaaggtggacgagcgtgacaataaggttccgcaaagtatggacttcctcacaactgaagttgtgaagacattcggggtcaccttccctggtatcaaggagcaatggagtcgtttgtcactcaactgggcaacgtcctgccctgttcgtcacttagcttgccgttcattccaaatcttccgatgcatactcacgtcggtagaccaaatgatgctaggcgatatgctagcacgactatcgaatacgattgccgacgaagactccgaaattcaaaccttctctatggagattcttacaaccttgaagacattgattgtcaagctcgaacctgagcagcttctgtcgtatccgcaattattttggactacttgtgcttgcctagagtcgatcaacgagctcgaattcctggaagctgttgggatgcttgacgagtatgttgagaagctcgatttcagttctcctcacattcgaaggacgctactagagggacagcctccgcgatgggatggcatatttgatggagtgcagcctttactctacaagggactgaggtcctcattgtgtctccaacctacgcttgatctcatggacaagctagtgcaactaccaagcgacccgctcatcggtgatgataatcgactgtttttctccattattgccaatttccctcgatgtttgcaagggatggaacagaaatttatcgatgagcgaaccaaacagacagtggagatcttgcttgcggtggcggaagcacaagaatttgtcccgatctgtgatgcactgggtggctttcttgatgcgagcttcccgtcaagccaagacatgatgacacagctatttgcggctgttcgcgaattctttctaccgcagcttgacttcaagatgctcaccatgctcatgggctttttaaccaatagcatttcatcggtcaaattgatgaccatgcggcttctatgtgtcgtcattcctggtatcgagatgaggaaacctgagattgccggacacgggcccgatctcatctcgccactacttcgcttgctgcaaaccgagttctgtatggaagcattggttgttcttgacaaggttgtagccgtatccgggtcttcgatggaaagacatcatctccgaatgagtatgacccgctcatcgtctagagccattagaaaggaatacgaacggacgcaaagcttgtttgggatacctgaagaatctggttgggccattcctgcgcctgccaagaagaccgatgcgactcgcgctaatatacatgccgcattctatatgtgtcaggcagaagcagaaaatggagtgccgaccgatccaacccccacacccgaagtcgcattccatgccgatgactatcggtacggctacttcgaaatgccagacagaacagaaactatgatgtcggatgacgcgcgtggagaagggcatatgggcgatctggtcactaagcttgacagcttggacgacttttttgacgatatgtctcaaacctcgcctagcgagggccggtcatcgaggactgtcaccgagttcacgccagataattacgaatcgggggctaggctctacgacgatgtactacccatcctacatcaggcatcaaataacacatcgtttcaaaacgggttcgatagattgcccgtgaccaaagagagcaacaccaatgcgatgaatcctggggcgttcaactcgaccatttcgcaaacaagtgtgcgaccggtgcttcatgcgcgatccatcacgtcgccctcgacaccggcatcctatcaaccacagctggccgagttcacatcggacgaggagctgacggaagacctcttctccgacggcgaagaagagcgtcaagggttctcgggtcaggctcccgctgagagctccttcttccttgagaacatgatcaaacctatcaagcaaacgacaaagacgcatatgcgccggctaacaggcggacggtcgcgcgaaatggaccgacagcgggagctatttcgtgccgcgcagcaaatctcgccagtgcccaaagtccccagcacgtttcttcagcacaaaacgaatccatccagcgacatgctttgatgggaaattttatgaaaagactatgagacatgtagttgagcaaagatacccctcgtgtgtttctattgtatcctagaggcttcgttccggacgagtaaatattttagcggcatctgtagtatcgtacatcattcctctatcatagatcgatgtggttttcatgtatcatcatagtttccgcgagccggaatctcatcgtattagctctagatcaacgaagcaataatcgaaacatgatatttggctgtttaatcggaataaactatacatggactctccaaactcgcttaccctggtggctaagggatactcatttcgggcttgaagcctaacttctcgttgagacaagcaaacactactgtgctagatcttaagatcatcacgtcgtacggtaagtgattctgagcacggccaaagatcagtaagtgtgcgccgctcgcctgcgaagtaactttgatttaattccatatatttataatacatcattcactctttttactctatttatagtgtctttggtccttgtccgaaatgcgtaagaaatgcgtgcgcatccgaccctccctctcgcacacaataggtggttatacagcactcgctttagtctatccgttggtaaccggtttttaaaaaaatgattttcgaatggatagtgcaattcgattgaaacaatttacgggaatcttcaaagcaaagtaactatacgctttaaacacgttccatgtaccaaatgtcagtagctctatatgattgtggtgagcctaaagctagatatccggtaccgtatcacgtgtcacgagttcatcaagcagatgtagaagacatcggtcttgggttaggaaggattgcaagtcacggtgttgatgagagaaaacacgacatcacaagtcttagcgacgggtcacaactttccaagttgatggccccatcgacgacaaagaggcgagaatatcaagaaaggcgtacctgggaatgggaacgaaatcactaatgatgtggagaataggacattagcatcttcagattcagagagattcttatttgagcagtgagaccaaccctatgtgaagacaacaattcctctctacgtgcgtcatccgcccttcgtcatgtatgggtatattgtttgtttgttcgcctccggcaagcacgtatcctttctttcccagttaagtagatagacgataaatcagtatcggtagcgggtggagtagtccttggggctgacgacgagaccgcggcccttcttggcgccgcggtagacggtctcgatgatgtcgatgagctcctgcttgtcctcgaggacgaagttgagcttgttgttgtttccggagccgagatcgaccatgatgagcttgttgcggaagaagaacatgatggtcatggggtcgaagagctcgtacatgacgttgaagtcggggacctggtcgatgtcgcacaggtagaccacggcgaagttcttgaccttgtcggcgatgcggtagagcacttcgtcctgcagcatgcagtcggggtcggagtcgcggccgaagcggatgacgacgacgcgct

SEQ ID NO: 7863 - DNA, 429 bp, Muscodor strobelii
  misc_feature: SGI cDNA ID NO. 562395
  misc_feature: Encodes the peptide sequence at SEQ ID NO 7864
atgtctttcgtccttccccacctgaacaccggctggcacgttgaccaggccatcctatccgaagaagagcgcgtcgtcgtcatccgcttcggccgcgactccgaccccgactgcatgctgcaggacgaagtgctctaccgcatcgccgacaaggtcaagaacttcgccgtggtctacctgtgcgacatcgaccaggtccccgacttcaacgtcatgtacgagctcttcgaccccatgaccatcatgttcttcttccgcaacaagctcatcatggtcgatctcggctccggaaacaacaacaagctcaacttcgtcctcgaggacaagcaggagctcatcgacatcatcgagaccgtctaccgcggcgccaagaagggccgcggtctcgtcgtcagccccaaggactactccacccgctaccgatactga

SEQ ID NO: 7864 - protein, 142 aa, Muscodor strobelii
  misc_feature: SGI Peptide ID NO. 562395
  misc_feature (4)..(136): Pfam Id: PF02966 Pfam Desc: Mitosis protein DIM1
  misc_feature (2)..(142): NCBI GI: 261204864 Blast Desc: mitosis protein dim1 [Ajellomyces dermatitidis SLH14081] gi|225562372|gb|EEH10651.1| pre-mRNA-splicing factor [Ajellomyces capsulatus G186AR] gi|239592228|gb|EEQ74809.1| dim1
  misc_feature (2)..(142): NCBI GI: 225680894 Blast Desc: mitosis protein dim1 [Paracoccidioides brasiliensis Pb03] gi|226282240|gb|EEH37806.1| mitosis protein dim1 [Paracoccidioides brasiliensis Pb01] gi|226292598|gb|EEH48018.1|
  misc_feature (2)..(142): NCBI GI: 39971599 Blast Desc: conserved [Magnaporthe grisea 70-15] gi|145019582|gb|EDK03810.1| conserved [Magnaporthe grisea 70-15]
  misc_feature (2)..(142): NCBI GI: 261863849 Blast Desc: thioredoxin-like protein [Hypocrea virens]
  misc_feature (2)..(142): NCBI GI: 46125237 Blast Desc: FG06996.1 [Gibberella zeae PH-1]
  misc_feature (2)..(142): NCBI GI: 238841284 Blast Desc: mitosis protein dim1 [Microsporum canis CBS 113480]
  misc_feature (2)..(142): NCBI GI: 256732586 Blast Desc: [Nectria haematococca mpVI 77-13-4]
  misc_feature (2)..(142): NCBI GI: 116207410 Blast Desc: conserved [Chaetomium globosum CBS 148.51] gi|88183595|gb|EAQ91063.1| conserved [Chaetomium globosum CBS 148.51]
  misc_feature (2)..(142): NCBI GI: 189193013 Blast Desc: mitosis protein dim1 [Pyrenophora tritici-repentis Pt-1C-BFP] gi|187978409|gb|EDU45035.1| mitosis protein dim1 [Pyrenophora tritici-repentis Pt-1C-BFP]
  misc_feature (2)..(142): NCBI GI: 240106658 Blast Desc: Thioredoxin-like protein 4 , [Coccidioides posadasii C735 delta SOWgp]
MSFVLPHLNTGWHVDQAILSEEERVVVIRFGRDSDPDCMLQDEVLYRIADKVKNFAVVYLCDIDQVPDFNVMYELFDPMTIMFFFRNKLIMVDLGSGNNNKLNFVLEDKQELIDIIETVYRGAKKGRGLVVSPKDYSTRYRY

SEQ ID NO: 7865 - DNA, 9886 bp, Muscodor strobelii
  misc_feature: SGI EST ID NO. CUFF.19576.1
  misc_feature: Variant of the nucleotide sequence at SEQ ID NO 7863
ctcgcccactaccattccatacaaccgggacctcaaacaccaagtcagccttgttgacttccaacgatattgttcattccccaaagtgtgatcaactgtaaacatcgtcaatcgacagacacaactcaactcatctccaacatgtctttcgtccttccccacctgaacaccggctggcacgttgaccaggccatcctatccgaagaagagcgcgtcgtcgtcatccgcttcggccgcgactccgaccccgactgcatgctgcaggacgaagtgctctaccgcatcgccgacaaggtcaagaacttcgccgtggtctacctgtgcgacatcgaccaggtccccgacttcaacgtcatgtacgagctcttcgaccccatgaccatcatgttcttcttccgcaacaagctcatcatggtcgatctcggctccggaaacaacaacaagctcaacttcgtcctcgaggacaagcaggagctcatcgacatcatcgagaccgtctaccgcggcgccaagaagggccgcggtctcgtcgtcagccccaaggactactccacccgctaccgatactgatttatcgtctatctacttaactgggaaagaaaggatacgtgcttgccggaggcgaacaaacaaacaatatacccatacatgacgaagggcggatgacgcacgtagagaggaattgttgtcttcacatagggttggtctcactgctcaaataagaatctctctgaatctgaagatgctaatgtcctattctccacatcattagtgatttcgttcccattcccaggtacgcctttcttgatattctcgcctctttgtcgtcgatggggccatcaacttggaaagttgtgacccgtcgctaagacttgtgatgtcgtgttttctctcatcaacaccgtgacttgcaatccttcctaacccaagaccgatgtcttctacatctgcttgatgaactcgtgacacgtgatacggtaccggatatctagctttaggctcaccacaatcatatagagctactgacatttggtacatggaacgtgtttaaagcgtatagttactttgctttgaagattcccgtaaattgtttcaatcgaattgcactatccattcgaaaatcatttttttaaaaaccggttaccaacggatagactaaagcgagtgctgtataaccacctattgtgtgcgagagggagggtcggatgcgcacgcatttcttacgcatttcggacaaggaccaaagacactataaatagagtaaaaagagtgaatgatgtattataaatatatggaattaaatcaaagttacttcgcaggcgagcggcgcacacttactgatctttggccgtgctcagaatcacttaccgtacgacgtgatgatcttaagatctagcacagtagtgtttgcttgtctcaacgagaagttaggcttcaagcccgaaatgagtatcccttagccaccagggtaagcgagtttggagagtccatgtatagtttattccgattaaacagccaaatatcatgtttcgattattgcttcgttgatctagagctaatacgatgagattccggctcgcggaaactatgatgatacatgaaaaccacatcgatctatgatagaggaatgatgtacgatactacagatgccgctaaaatatttactcgtccggaacgaagcctctaggatacaatagaaacacacgaggggtatctttgctcaactacatgtctcatagtcttttcataaaatttcccatcaaagcatgtcgctggatggattcgttttgtgctgaagaaacgtgctggggactttgggcactggcgagatttgctgcgcggcacgaaatagctcccgctgtcggtccatttcgcgcgaccgtccgcctgttagccggcgcatatgcgtctttgtcgtttgcttgataggtttgatcatgttctcaaggaagaaggagctctcagcgggagcctgacccgagaacccttgacgctcttcttcgccgtcggagaagaggtcttccgtcagctcctcgtccgatgtgaactcggccagctgtggttgataggatgccggtgtcgagggcgacgtgatggatcgcgcatgaagcaccggtcgcacacttgtttgcgaaatggtcgagttgaacgccccaggattcatcgcattggtgttgctctctttggtcacgggcaatctatcgaacccgttttgaaacgatgtgttatttgatgcctgatgtaggatgggtagtacatcgtcgtagagcctagcccccgattcgtaattatctggcgtgaactcggtgacagtcctcgatgaccggccctcgctaggcgaggtttgagacatatcgtcaaaaaagtcgtccaagctgtcaagcttagtgaccagatcgcccatatgcccttctccacgcgcgtcatccgacatcatagtttctgttctgtctggcatttcgaagtagccgtaccgatagtcatcggcatggaatgcgacttcgggtgtgggggttggatcggtcggcactccattttctgcttctgcctgacacatatagaatgcggcatgtatattagcgcgagtcgcatcggtcttcttggcaggcgcaggaatggcccaaccagattcttcaggtatcccaaacaagctttgcgtccgttcgtattcctttctaatggctctagacgatgagcgggtcatactcattcggagatgatgtctttccatcgaagacccggatacggctacaaccttgtcaagaacaaccaatgcttccatacagaactcggtttgcagcaagcgaagtagtggcgagatgagatcgggcccgtgtccggcaatctcaggtttcctcatctcgataccaggaatgacgacacatagaagccgcatggtcatcaatttgaccgatgaaatgctattggttaaaaagcccatgagcatggtgagcatcttgaagtcaagctgcggtagaaagaattcgcgaacagccgcaaatagctgtgtcatcatgtcttggcttgacgggaagctcgcatcaagaaagccacccagtgcatcacagatcgggacaaattcttgtgcttccgccaccgcaagcaagatctccactgtctgtttggttcgctcatcgataaatttctgttccatcccttgcaaacatcgagggaaattggcaataatggagaaaaacagtcgattatcatcaccgatgagcgggtcgcttggtagttgcactagcttgtccatgagatcaagcgtaggttggagacacaatgaggacctcagtcccttgtagagtaaaggctgcactccatcaaatatgccatcccatcgcggaggctgtccctctagtagcgtccttcgaatgtgaggagaactgaaatcgagcttctcaacatactcgtcaagcatcccaacagcttccaggaattcgagctcgttgatcgactctaggcaagcacaagtagtccaaaataattgcggatacgacagaagctgctcaggttcgagcttgacaatcaatgtcttcaaggttgtaagaatctccatagagaaggtttgaatttcggagtcttcgtcggcaatcgtattcgatagtcgtgctagcatatcgcctagcatcatttggtctaccgacgtgagtatgcatcggaagatttggaatgaacggcaagctaagtgacgaacagggcaggacgttgcccagttgagtgacaaacgactccattgctccttgataccagggaaggtgaccccgaatgtcttcacaacttcagttgtgaggaagtccatactttgcggaaccttattgtcacgctcgtccaccttaccattgctgtcttcgtagctccaaacaactgagcgatcgtgctggcgcactgcgtcaatcaagtcttctatcgacttcttgacttcaggctgcgtagtttcgtccattcttgaaattaccagttcatgaatcaaatgtacaagcatttcccgtgcttgctcttgcactagaggtgtatagtgatcccataggacagtgacaacctgtaaaaggataggtaaattgtcggctgtgagctgtactggggcgatcatcagatcaaccaagaggatgagagccagttggcccagtgagagaccagcctgtttggtgccaactggcaatgcttcagacaaatccgcgcagtacggtagctggttgatgtctggcggtggagggacagcttctttcttttcgtttggaaccatggctttgggcgtgatctgtagtagaagaaattcgacaactttgatgcctggtgtggttgtagtgctagataagaaaacaacgatctgcttggcatactcaacaaagttttgctctctgcgttcaagacacagggaaatgatgaagtcaaggacaagtcgaacatttccaggatacggaccagtcgctaaagcttgccataacgcttgaacttcgttatgcaacgcagcacttgacttgatggttatctcaatgagattggcaagcaacacatacgattgagcgataggacctccatttggatcaatcttgagttcaatcagctggatccatgggagaagaactgccaccacgtttctttgtgcacccggctggaggctcttgaaatacagagtgaactcagagaatatgtgaaatgcaagttcagtatgttgctttgcaagtcgcttggagatctcgaattgagccagtttgtagacagctttggttttgtcagaaatgctgatatcgaaatcttggatcttagaactccttccgctttgctgtctttcctccaatgctctcagaatccgtgcggcttgggaccgaatttcactgaggtcatttcctaatgtgaataaacacagtcccaacaatttccaaaatggtaatgggtaatcaaggtgatcgagaagaacatcggtgatgaccgcaaagtagctctctaagactttcggggtgtctgtcaaatagcagcgagcaatgcagtgttctaacaggtaaggcgatccctggttatacacaatcaggttcttcaaagccagccggccgatgacattgactcgatcgcttcctgagctgaaaattgcctctatccaagtaagcatgcgtctcaagtcgaactgcaaaactgcgccactctcagtcgtgacactgacagcaccagcacaaagcgctgccattgcactcagtgccgccgttctcaggtttctcttttcaatttccatagcagcagtgatggttccgcgctcacccagtgattgctggttaatcaacgactgcctcatagtgtcttctctcagacggatctgctgttggttgggggagaatccacaccagtcttccatcaaagtgaaggccgacttgcgagattcgaatgtcatccagcgtgaagggtcttgggttcggttgatgccttcgaatagttcctccatcaagccacaataatgccttcggagtttctggaattcccagtcgttttgtacttctccatccatgagaaatagttttaaatcacgcgtgtaggtacaaaggttgtttagaatccattcgtcttgatacacgtcagggtccttcagaaagtgtgaagtgagcttataaacatgtgtgagttcggtccacaagagatccatcttgcggtttcgacttggactgctattggttcgttggtgtaatcttgctctcgcttcgtcgttgcatctggaaacctgcccctgcaactcttctagcagagttcgatagatgtggatgtttatggagcccattgagaggactactgcttcccgaaccgaagcagaagagactgagagtagtgggattaaatatttgaatagaactctcgctgagacaatcctgtcactggacttcgagccctttcttaagtgttgacttccttgtgttgcgccattaatagggttgcccgtgtctgccacagtagtgcaggcgaaagtcaaatacagtttccactgttcaaccaagacctccggctgcgttgtcggagttcttccgttctgacgggcactagcaggatcagaaccataatacaaaccccttataggctcggacagtgtgtatatagccgcgtacatctgcaaaatccggttgcagattaagtcgcggccaatggtaacagtgaacgggcattggtcgtatgcaatgcgtatcaagttgggaaatattttgaaccacagcgtagtatcgtacgagacatcgctggtacaaaggtctatgagcgcacccttgctattcgtattttgtattcctcgttgaagccgacttcgttcggccaccgatagatgttcgtctttcaagctcatcacttgaaatgagtcgttttctagaatatcaataagacgaacattgtccttttcttgagtgtgatcttttcccaacgcagcatcgaattctttgatgagcctaagaacagtaattgcgaaatgtctgactcgtcgggactgggagcagagaaagaagagaccacgagcctccacatgttctacctcggcccagatactcgacaagtcgagcttcaggcctcgtctatcatacgagacgtcttcggtgacctcggacgttgcgtccatcgttttctgtcttatctcgtctctccaaatttgtagaagctcaacataaagtcgaagtgtgttctcgatgtggctatgacccagcatacccccgtctgacatcgtcgcatagcgatcatcaaagttgaatatgaaccgagcaaaccccatagttacctggtgggcatgggattgtttggcaattgactttagagattgagcagaggattgggcgattccgccctggacgtgagcagtgcctgtacataacagattgacaagcgggttgaaaggtatagcaggagacaggcagcgaggtaaagcgtgtaccgcaacatggagaagcctatagaaggcgtgctttaagtctgctggggtttgatggtcatcacgtcgtgaaaagttgaatgattccgtaattggtgttttaggtccgttactgctaaatttctcatcaagtaccgcctgtccgccaaatgtattatcacaaataatcgtgattttgcccagtatctcggaaaatttcctatagtaatctcgcacggagtcgctcaacgcgcctagctgaacgggaggggtcagagcctcgtcagaattaggtgaagagctatcggtcgaaaacattgcatagcccgggacagaggcaggtgaatcgggaatattatcaactttctgggagagcgaagattcttgtggaaatggtgggcggccccgttgccttgctcgaggtcagataaaacggcaagaaatgatcgaataccaatgaccattctatccggttcgagttgttcaactttgagttccttattcgagttaaaggactcggcgttaatcaaagggaagatgatattcttgcagcaatactcggtatgcttatagccgatgatcctgattatttgaataagaggaccatttgaggcagtatcatgctccgaaaatgtacgcttagtcgggggcaatacaagttgcatgacttcatctagctttcgcgtgacactagcccctgtttcgttcaacctatacaagtaggaccagagtaggcgagaaatagctagcaagcatgtctgccgcaccttgctatctcttaggcgaggctgaagcgttcgaattaattggagccattgggcactggcgctctcgggaggagacacgcaaagcattgttgtagtcagtgggaatgacaccgaccagtaccgaggcttggcgaatattgtacccagtcgtggacttatgttgcttagaacttcctgccatttcggatgcataaaatgattatttgttcctgtagctgcaacgggaagaagcagtgtgtccagtatccggcagaaagccgatttcaccgtttggcctcgcgagttcgcaaaaaggcgtcccagtgacgtcaagaaacggcaagcctgatcccacgcttcctcggaattgattttcagtcgtagatgcgacatgccaccgagaacgagttccacctggccttcgatatgagcaggcggtaaggtcgggctacgcccggtcaaatcatgcaacgagcgactcaggtcggcgataaatcggtccgcaacgcttgcgaaattaattgcactcatggcgccaagtaactgagcaaacaatttccagttggccattttgagaggagacatggccaattgctcaacctctgcaatcttcagttggccaaaaatgatgccttctagcttgtcttccatctcaggtgtaatggaggcaaggctactctgtgatataacttcaagaagaacgcgacacagtatgtagatggaaacgatagatcgccgctcagcgtgggccacgtactcctgtttcgcggccagcgaggccgcgcccgtgggtgtggaagcgtccaatgaagcattagctacagtcacttgcacaggctcagtattacgtctaatgagacctgggggaagctgggaagatttgagttgctgaagctggctacgagcctcgttggcggcttcacttttgtatttcctccacagcatgatagaatcgatcagagacttgggtttgggactagcgatatgaccaagggccacgatgaactggtcaaaggctgggtccgaaccaggaccacagatcctttcgatcctgggctcggggtcaaaagggactgtaatacactcattgagtttttcttcggcatgagcaatgaactgagcgccagtcaacgtctattctacggatgattacggtatcgagggggacgaacggaagtgaacagcacatgtagtgcatactccccgactgtcttctgctcgtctctatggtgccttgacgagtgcgaatgatgatgtgaatggtcacggcgactcgtgctgtgcatgcgctcgaaggtcctctgtgtcagggtgctggtctccgagacagacagggtccgctccagtggatgcaccgagggggacaccgtggatcctgacagggccgtgggcggtcgcgagccaccagatgtatccatttccgggcgcgccgccgtgacggggatgtcaggtcgttccgggtgcaagccagctccggcagcggctatgatctgagggctcagaggactcgaggaggagctgtggcttccattccgcgaatgctggataccatgtacgatcgaagtctgacggtgatgtccatacgctgctatcttggagtctatcgcacgctcgatgacggcgcctatgcccggacgagcggccggggtccggatgcctggcgaggaggtcgaggatgaggagggcgcaaaatggggcgattcggggatgccagccaacgcacccgactggagcttctccagcgaggattcgcgcgagtgggcaatggcgcggcttacggctgcgtcgtgaggcagaggtttgagggtgttgtcccaggaatcgctgtcatcgtcccggacattgaggcgcgaggctgaacggctgctgtccttatgggacggagctacatgatgtgacaggggggtcagcgaaggggatagcggcataggaacacacgggcgagggaggggagtgtcccctctcttgtgaaacaggacgagtctgccgtggcagcacagcgagcaccaggcagcgattggcaccagcgagtgggataggcgcagcagcagcagcagcagcagcacagtcgtggcggcagatacacgtctgcagaatccgtggtgcagaacccgtcgtgatgggacgtcaggaaacaaggtcgcaggccgccaccaagctgcagatggagccgaagctgcggctctccacgcgcgacaggcacaagaaaagacagggtccttgagggtctacttgatacgctcgcgcgcacgcacacagctggacaccgtcc

SEQ ID NO: 7866 - DNA, 3414 bp, Muscodor strobelii
  misc_feature: SGI cDNA ID NO. 562396
  misc_feature: Reduced expression when VOC is produced
  misc_feature: Encodes the peptide sequence at SEQ ID NO 7867
atggcgaaacgaaaatcgcactcggatggccatcatgccactaagaagcagaagacggcccacgatgcgcccacctcggaagacgtctacaccggccgccagctccagcagctgctgacctttgagcagaacctgcagagggccagacatggcctgcagtccttcaagctcctcctcgacagcatcgtcgcccaagatgaaaagaaggccgagaacctgcagattctcctcgactacctcgacgcctgcgagcccagagtcgtccaagatgaagtccccgtctacctgcccgatgtcatggagaactggagcatggctgcccagatgaacaacgagaatgtcatgtctgccgttgccgtcgtgctggctctgttgctgaaggtcatgtccagcagtgtagatctggttccccgtggcctgtcaatctgccgtacactgcttctcaagcgccaacaggagctgattgccaagaatctctcggcggaaaagggcaaagacttcgtcatatcgccaacactcaggctccttagagaaataatctgcctggacggcggtgctctcgccgccccggtcttccgagccagagccaacacgttcaagtctctagccaggaatatgggtcttcgatatttgggcgagggcatagaagaccctaagaggccgtccgttaggaccaacgccatccgcttccttctcagtagtctcacattattacacactgaagctaagaaagacctgttacaccagaaggatatagtagctgctttgatgcgacatctgcgtgatgacccccctgccttgatttttgagattctcgatgttttaaaaacgtcggtcgttaaggacaagaagctccccaaggacgccaaaatcaaaatcctcaacgctcactctctcactcgcatctcgactctatacggatatacaagagacgtcgacgaggattctgaagatggcaagccctcggtggaagacgcggcgcaccaaatgttattagcagcttgtaccgactcagcagctgggatttgtcggtcagagcaaggctactatcccgaaggggtagatatagatgccgttgtgccaaactcgaatgatgccaattgcttggaatttggccttgatagtattttctggatatccaaattcgaaaacgacatcccagtgcggaacatgctattagctgagtttatctcgtcgttgaaaccgtgggctagcacgaagtcaactgaattactccttgcaatatttggcaactcgccggagttgattgcgtactattttcttcacaagaagacattcaccttcgatcccaagttgtctgctacttggatgggctacgcggctcttctctacagtgttattcaactacctataccccctcactttggcgttgcgagcgactatgcggcagtccctcccccaacgtcgattgtgctcgacaatatggtccccgcgcccctaactccaaaagccgtcattcgatgtttgaaaggtgattcgaaattggtctctttctttgcaatacgcttgcttgttctggctttacagaagttagacagagctttagaaatgcatagagaagcttcgtcttcgccagagtcaatctgggaagaagcagctcgcagactagtcgacgatttctgccagagagttccggatatcaaagatgtcatcggctgctatcgcgcactgtcgcccgatgattttctccaacgggaggctgcaagccggttgatattgctctactacgaagtcataccccagtcagctctaagcgctaaaattgatgtatctggtccgctgctggcgacgatcaagcgacttgaaacatctgatgaggttggcgagaacctggctatgatttcactggaactggagcacctatgcgcgatagcaaagtactctcccagcatgcgatggttcagtcgaacccccgaaatgatatcgtcgcctttcatttcactgcttcaattgcacactgcaaatacttctgcattgtctggagacacgttgaaccaagttcttacttatgtggcagaggagaatcaacttgtggagagccaatccgcttcgtcgaacttgaatccacttatcacggccttggaaaagacgaagcagctccattcgtccatctggacatttctcgataattgcgcagaacgttgtgccaggtctcccatcaaatacttagagatgattcaggagggaatcgagaagacagacacgaaggaacctgacaacgccccggtttcgccactgctgatggcaatcgctgaacagttacccttcttcaagttaacttcgccagcaaaagacgttcttaaagacctagtcacctttcttcgtgaatacgtcaaccgttcttttgaaaatgatgttagccaagctttcttgaacttcgtcatgacgtccatcaaggctagcctacaagacggaaaacttgcggccaagatcgccatttcaaaacggacaaaaacaccagggggggtggaagactcgtcggttgagggaactaaggccagcctacaaagtggcagcaccacgctcaatggctcaattgcaaccatgaattcgcaagaacttgaggatagacttgctacgccgattctgacaagcaaagaaaacgcattggtcaggtggtcctccaagccaccagaggaacttgtcgaggagggctatgcgacatcattagttctccttctttcctctgagcacgcgagcatacgcaaggaggcgctcactcacgtcatcaaaatggcaactaagatcaaagagtcgccgtatgaagagaatgaacaagtctggctcttgcttatggagctagccgaatctgcgaaagatctcatcaccgatagtccacttccaagtgttctcgttgttttcgcatgcaaggctctcgaagttttgaagaatccgttgcactgcctttatgagaaagtcaacctcttcctcacaggagggccggtgtggaaaccagatcacataccgctcatgcaaacgatattggacgatggaccgacagtggatggcacaaattatacagagttgagttggctcctcacattcctccttgacactcttcggacgcctcaagacgtgaagctctttcaccaacgtaaggtttttgagcggataatagcacaacctacgaatccctacatgggccccaatcttcgcacgcaagtgttgaggatcctctatcgaactacctgtattgaagggggaagtgacacaattatcacacgatttggcattgcaagttggctggccgctcaaaaagctatagcaggagacgatatagagcgcgagctttaccaggcgatgatgacaagattatgggaaacttgcgaccaagatcgcatgattgtatggagtcacggaggcattaaaaacctattggaaatttcttcatag

SEQ ID NO: 7867 - protein, 1137 aa, Muscodor strobelii
  misc_feature: SGI Peptide ID NO. 562396
  misc_feature (1)..(1129): NCBI GI: 171690536 Blast Desc: protein product [Podospora anserina] gi|170945216|emb|CAP71327.1| protein product [Podospora anserina]
  misc_feature (10)..(1137): NCBI GI: 145612415 Blast Desc: MGG_12346 [Magnaporthe grisea 70-15] gi|145019581|gb|EDK03809.1| MGG_12346 [Magnaporthe grisea 70-15]
  misc_feature (1)..(1127): NCBI GI: 154299786 Blast Desc: BC1G_11519 [Botryotinia fuckeliana B05.10] gi|150857209|gb|EDN32401.1| BC1G_11519 [Botryotinia fuckeliana B05.10]
  misc_feature (1)..(1129): NCBI GI: 116196090 Blast Desc: CHGG_04643 [Chaetomium globosum CBS 148.51] gi|88180556|gb|EAQ88024.1| CHGG_04643 [Chaetomium globosum CBS 148.51]
  misc_feature (29)..(1127): NCBI GI: 156049077 Blast Desc: SS1G_08245 [Sclerotinia sclerotiorum 1980] gi|154692644|gb|EDN92382.1| SS1G_08245 [Sclerotinia sclerotiorum 1980]
  misc_feature (75)..(1133): NCBI GI: 164423830 Blast Desc: NCU07686 [Neurospora crassa OR74A] gi|157070249|gb|EAA33092.2| conserved [Neurospora crassa OR74A]
  misc_feature (15)..(1129): NCBI GI: 261359764 Blast Desc: conserved [Verticillium albo-atrum VaMs.102]
  misc_feature (1)..(1134): NCBI GI: 256720742 Blast Desc: NECHADRAFT_50208 [Nectria haematococca mpVI 77-13-4]
  misc_feature (6)..(1134): NCBI GI: 119479155 Blast Desc: NFIA_076390 [Neosartorya fischeri NRRL 181] gi|119407760|gb|EAW17709.1| conserved [Neosartorya fischeri NRRL 181]
  misc_feature (6)..(1134): NCBI GI: 146324147 Blast Desc: ribosome biogenesis protein Urb1 [Aspergillus fumigatus Af293] gi|129558045|gb|EAL91524.2| ribosome biogenesis protein Urb1, [Aspergillus fumigatus Af293] ribosome biogenesis
  misc_feature: Useful for introducing or modulating the production of volatile compounds
MAKRKSHSDGHHATKKQKTAHDAPTSEDVYTGRQLQQLLTFEQNLQRARHGLQSFKLLLDSIVAQDEKKAENLQILLDYLDACEPRVVQDEVPVYLPDVMENWSMAAQMNNENVMSAVAVVLALLLKVMSSSVDLVPRGLSICRTLLLKRQQELIAKNLSAEKGKDFVISPTLRLLREIICLDGGALAAPVFRARANTFKSLARNMGLRYLGEGIEDPKRPSVRTNAIRFLLSSLTLLHTEAKKDLLHQKDIVAALMRHLRDDPPALIFEILDVLKTSVVKDKKLPKDAKIKILNAHSLTRISTLYGYTRDVDEDSEDGKPSVEDAAHQMLLAACTDSAAGICRSEQGYYPEGVDIDAVVPNSNDANCLEFGLDSIFWISKFENDIPVRNMLLAEFISSLKPWASTKSTELLLAIFGNSPELIAYYFLHKKTFTFDPKLSATWMGYAALLYSVIQLPIPPHFGVASDYAAVPPPTSIVLDNMVPAPLTPKAVIRCLKGDSKLVSFFAIRLLVLALQKLDRALEMHREASSSPESIWEEAARRLVDDFCQRVPDIKDVIGCYRALSPDDFLQREAASRLILLYYEVIPQSALSAKIDVSGPLLATIKRLETSDEVGENLAMISLELEHLCAIAKYSPSMRWFSRTPEMISSPFISLLQLHTANTSALSGDTLNQVLTYVAEENQLVESQSASSNLNPLITALEKTKQLHSSIWTFLDNCAERCARSPIKYLEMIQEGIEKTDTKEPDNAPVSPLLMAIAEQLPFFKLTSPAKDVLKDLVTFLREYVNRSFENDVSQAFLNFVMTSIKASLQDGKLAAKIAISKRTKTPGGVEDSSVEGTKASLQSGSTTLNGSIATMNSQELEDRLATPILTSKENALVRWSSKPPEELVEEGYATSLVLLLSSEHASIRKEALTHVIKMATKIKESPYEENEQVWLLLMELAESAKDLITDSPLPSVLVVFACKALEVLKNPLHCLYEKVNLFLTGGPVWKPDHIPLMQTILDDGPTVDGTNYTELSWLLTFLLDTLRTPQDVKLFHQRKVFERIIAQPTNPYMGPNLRTQVLRILYRTTCIEGGSDTIITRFGIASWLAAQKAIAGDDIERELYQAMMTRLWETCDQDRMIVWSHGGIKNLLEISS

SEQ ID NO: 7868 - DNA, 6133 bp, Muscodor strobelii
  misc_feature: SGI EST ID NO. CUFF.19486.0
  misc_feature: Variant of the nucleotide sequence at SEQ ID NO 7866
gagagcctgtcgagctgtgaaatacagcgaaacagccctcgacagactcctcccaggtcgatcagaggcgataacacatggcgaaacgaaaatcgcactcggatggccatcatgccactaagaagcagaagacggcccacgatgcgcccacctcggaagacgtctacaccggccgccagctccagcagctgctgacctttgagcagaacctgcagagggccagacatggcctgcagtccttcaagctcctcctcgacagcatcgtcgcccaagatgaaaagaaggccgagaacctgcagattctcctcgactacctcgacgcctgcgagcccagagtcgtccaagatgaagtccccgtctacctgcccgatgtcatggagaactggagcatggctgcccagatgaacaacgagaatgtcatgtctgccgttgccgtcgtgctggctctgttgctgaaggtcatgtccagcagtgtagatctggttccccgtggcctgtcaatctgccgtacactgcttctcaagcgccaacaggagctgattgccaagaatctctcggcggaaaagggcaaagacttcgtcatatcgccaacactcaggctccttagagaaataatctgcctggacggcggtgctctcgccgccccggtcttccgagccagagccaacacgttcaagtctctagccaggaatatgggtcttcgatatttgggcgagggcatagaagaccctaagaggccgtccgttaggaccaacgccatccgcttccttctcagtagtctcacattattacacactgaagctaagaaagacctgttacaccagaaggatatagtagctgctttgatgcgacatctgcgtgatgacccccctgccttgatttttgagattctcgatgttttaaaaacgtcggtcgttaaggacaagaagctccccaaggacgccaaaatcaaaatcctcaacgctcactctctcactcgcatctcgactctatacggatatacaagagacgtcgacgaggattctgaagatggcaagccctcggtggaagacgcggcgcaccaaatgttattagcagcttgtaccgactcagcagctgggatttgtcggtcagagcaaggctactatcccgaaggggtagatatagatgccgttgtgccaaactcgaatgatgccaattgcttggaatttggccttgatagtattttctggatatccaaattcgaaaacgacatcccagtgcggaacatgctattagctgagtttatctcgtcgttgaaaccgtgggctagcacgaagtcaactgaattactccttgcaatatttggcaactcgccggagttgattgcgtactattttcttcacaagaagacattcaccttcgatcccaagttgtctgctacttggatgggctacgcggctcttctctacagtgttattcaactacctataccccctcactttggcgttgcgagcgactatgcggcagtccctcccccaacgtcgattgtgctcgacaatatggtccccgcgcccctaactccaaaagccgtcattcgatgtttgaaaggtgattcgaaattggtctctttctttgcaatacgcttgcttgttctggctttacagaagttagacagagctttagaaatgcatagagaagcttcgtcttcgccagagtcaatctgggaagaagcagctcgcagactagtcgacgatttctgccagagagttccggatatcaaagatgtcatcggctgctatcgcgcactgtcgcccgatgattttctccaacgggaggctgcaagccggttgatattgctctactacgaagtcataccccagtcagctctaagcgctaaaattgatgtatctggtccgctgctggcgacgatcaagcgacttgaaacatctgatgaggttggcgagaacctggctatgatttcactggaactggagcacctatgcgcgatagcaaagtactctcccagcatgcgatggttcagtcgaacccccgaaatgatatcgtcgcctttcatttcactgcttcaattgcacactgcaaatacttctgcattgtctggagacacgttgaaccaagttcttacttatgtggcagaggagaatcaacttgtggagagccaatccgcttcgtcgaacttgaatccacttatcacggccttggaaaagacgaagcagctccattcgtccatctggacatttctcgataattgcgcagaacgttgtgccaggtctcccatcaaatacttagagatgattcaggagggaatcgagaagacagacacgaaggaacctgacaacgccccggtttcgccactgctgatggcaatcgctgaacagttacccttcttcaagttaacttcgccagcaaaagacgttcttaaagacctagtcacctttcttcgtgaatacgtcaaccgttcttttgaaaatgatgttagccaagctttcttgaacttcgtcatgacgtccatcaaggctagcctacaagacggaaaacttgcggccaagatcgccatttcaaaacggacaaaaacaccagggggggtggaagactcgtcggttgagggaactaaggccagcctacaaagtggcagcaccacgctcaatggctcaattgcaaccatgaattcgcaagaacttgaggatagacttgctacgccgattctgacaagcaaagaaaacgcattggtcaggtggtcctccaagccaccagaggaacttgtcgaggagggctatgcgacatcattagttctccttctttcctctgagcacgcgagcatacgcaaggaggcgctcactcacgtcatcaaaatggcaactaagatcaaagagtcgccgtatgaagagaatgaacaagtctggctcttgcttatggagctagccgaatctgcgaaagatctcatcaccgatagtccacttccaagtgttctcgttgttttcgcatgcaaggctctcgaagttttgaagaatccgttgcactgcctttatgagaaagtcaacctcttcctcacaggagggccggtgtggaaaccagatcacataccgctcatgcaaacgatattggacgatggaccgacagtggatggcacaaattatacagagttgagttggctcctcacattcctccttgacactcttcggacgcctcaagacgtgaagctctttcaccaacgtaaggtttttgagcggataatagcacaacctacgaatccctacatgggccccaatcttcgcacgcaagtgttgaggatcctctatcgaactacctgtattgaagggggaagtgacacaattatcacacgatttggcattgcaagttggctggccgctcaaaaagctatagcaggagacgatatagagcgcgagctttaccaggcgatgatgacaagattatgggaaacttgcgaccaagatcgcatgattgtatggagtcacggaggcattaaaaacctattggaaatttcttcatagcagtattttccaacaaatgtaatatatctgcgtatagagagctgctgaattgatacccaaggcgtagttatgtagctgataatatttgatgcttcgaatgactacctgcctacatccgtacctcagcagctacttccctgtggactctacctagtacgtgatgaactaacaacaatactaaaaacttaacccaaacatcaaacgagctaaaggacgaacatgaaataaatcagaccctgcatatcgattttatgcatgtaacccatttcacaagttttgcgccttatcttgcccggttccagataacaaatcgagacgatgccggacaagtccgcgacagcgggagaacacaagcataacctactcaggcattgtgtagaggcggcatcgagtattcacgacgaatgtacaatcattctttcgagtaaggaatggcaacctagcgcatctctggcggactgtgaccccgctctcgtcgacttgctctcgcgccacgcggctatcacgcagaacatatgccaagagctcatcgacgacaccatagccaaatatgggcaggcagtgccttcaacaaatcacaggctcgcgctcaagcgcttagaggatctcgcatcggtcgcctactctaaattctatgcgtacctcttcaaggacttgccgatttgctggcgccaagtctataccgatgcgcgtatactgaagttctgcattctgctctcgcgatggcttcaagattacgagtacaaagaggaggagacggagcagcgtctcgatacgctcgttgaaactctggacttagccctcatcctagctggcgctgccggtaaacggagaggtaggagttggatagatagagctttggagcttctcagtttgatatggctagaagaaatcgagtctcgtaatcctgtcgacagctccaggagtcgtccaatgaagagaattaagcttgagggaaatgctagagctacgttctccttgaatcagccattcacgccgccagttcgacatcccattgagaaagtagattctctctccatcgatgaatttcagacatacatggatcaaccccgagactcgaatctcgggccagaacctctagtcattcgccatacactcgacgaatggccagcgatgactacgcatccatggaacaaaccttcatacctcttatcccagacactcgacggccgacgcctagtccccgtagaaataggacgtagctacgtcgacgaaggctggggtcaaaaactcatcccatttggtacattcctacgagactacatcactgacccatcgtctcaaaacgaagtaacctcacaaagcgatgcaaagtccgtagcttacctcgcgcaacaccagctcttcacccagctcccccgtcttcgtgacgatattctaataccggattactgctacacctccccaccaccgcatccaagcgatccgcaaatcaaccagccggagcttgatgctcctctgctcaacgcttggtttggtccaccaggcacgatatcgcccttacaccacgatccataccacaacatcctcgcgcaggtcgtagggcggaaatacgtgcgtctatactccccgttcgagacttcacggcttcaagcccgtggaagagaaaacggcgttgacatggggaacaccagctctcttgatgtcggagtactcgagcgttgggatagagccattacagaggacgatgaaggggacgcaaagcacgatgagtttcgcgatatcccgttcgttgattgtattcttgagcctggcgatgtgctgtatatacctattgggtggtggcactacgtccgaggtctaagcataagcttcagcgtgagcttctggtggaactgaagccatcgcgctatttccggtctcgccattcccgttctatcaccacccagctgagcttacaccgtcgtacaagcagatcgggaacactttcccagggccagattcgccgcaatgcgaaacttgcttacatgcttctcgattcataacccgaaatcgcacgatagactcccaagaaaataaaatgaggtcggttagctcagctggtcagagcatcgtactaataatgtctttggtatcgaagacattggctatgcgaaggtcacatggttcaaatcctgtactgaccagaatcttttgaatttttttgtttccttatgcctttcatttcgggcgactgtatgacaagcctctaacgggcttggtagtagacttgtccctatgcaatcatcaccctttctttattcaccaggggagattggtagtatacgcaagaccacatttagtagattgtataacttggaatacttgtctaagtcttgcctagaaccatttgtgatctatgctcgagcccacgacgaatactggcgtcaagttgtattggatctgggattaaaacgcgagtctattcgcggaaccatctgaccatctattgaaatatctttttcctaatcaattcgcatgtgtatcggcgcacctatttgcagacttctaatgctacaagccaatgtataacatactgctctttccttgtcggataagaagtgtcatatgtcgggaattaagtaaccatcaatgtttaaccctcgcttaggagaaagaaccgatagtgggatagaaaaccg

SEQ ID NO: 7869 - DNA, 1542 bp, Muscodor strobelii
  misc_feature: SGI cDNA ID NO. 562397
  misc_feature: Encodes the peptide sequence at SEQ ID NO 7870
atgccggacaagtccgcgacagcgggagaacacaagcataacctactcaggcattgtgtagaggcggcatcgagtattcacgacgaatgtacaatcattctttcgagtaaggaatggcaacctagcgcatctctggcggactgtgaccccgctctcgtcgacttgctctcgcgccacgcggctatcacgcagaacatatgccaagagctcatcgacgacaccatagccaaatatgggcaggcagtgccttcaacaaatcacaggctcgcgctcaagcgcttagaggatctcgcatcggtcgcctactctaaattctatgcgtacctcttcaaggacttgccgatttgctggcgccaagtctataccgatgcgcgtatactgaagttctgcattctgctctcgcgatggcttcaagattacgagtacaaagaggaggagacggagcagcgtctcgatacgctcgttgaaactctggacttagccctcatcctagctggcgctgccggtaaacggagaggtaggagttggatagatagagctttggagcttctcagtttgatatggctagaagaaatcgagtctcgtaatcctgtcgacagctccaggagtcgtccaatgaagagaattaagcttgagggaaatgctagagctacgttctccttgaatcagccattcacgccgccagttcgacatcccattgagaaagtagattctctctccatcgatgaatttcagacatacatggatcaaccccgagactcgaatctcgggccagaacctctagtcattcgccatacactcgacgaatggccagcgatgactacgcatccatggaacaaaccttcatacctcttatcccagacactcgacggccgacgcctagtccccgtagaaataggacgtagctacgtcgacgaaggctggggtcaaaaactcatcccatttggtacattcctacgagactacatcactgacccatcgtctcaaaacgaagtaacctcacaaagcgatgcaaagtccgtagcttacctcgcgcaacaccagctcttcacccagctcccccgtcttcgtgacgatattctaataccggattactgctacacctccccaccaccgcatccaagcgatccgcaaatcaaccagccggagcttgatgctcctctgctcaacgcttggtttggtccaccaggcacgatatcgcccttacaccacgatccataccacaacatcctcgcgcaggtcgtagggcggaaatacgtgcgtctatactccccgttcgagacttcacggcttcaagcccgtggaagagaaaacggcgttgacatggggaacaccagctctcttgatgtcggagtactcgagcgttgggatagagccattacagaggacgatgaaggggacgcaaagcacgatgagtttcgcgatatcccgttcgttgattgtattcttgagcctggcgatgtgctgtatatacctattgggtggtggcactacgtccgaggtctaagcataagcttcagcgtgagcttctggtggaactga

SEQ ID NO: 7870 - protein, 513 aa, Muscodor strobelii
  misc_feature: SGI Peptide ID NO. 562397
  misc_feature (480)..(510): Pfam Id: PF08007 Pfam Desc: Cupin superfamily protein
  misc_feature (14)..(513): NCBI GI: 39951801 Blast Desc: MGG_01543 [Magnaporthe grisea 70-15] gi|145020613|gb|EDK04742.1| MGG_01543 [Magnaporthe grisea 70-15]
  misc_feature (44)..(513): NCBI GI: 40882247 Blast Desc: conserved [Neurospora crassa]
  misc_feature (151)..(513): NCBI GI: 164429462 Blast Desc: NCU10760 [Neurospora crassa OR74A] gi|157073487|gb|EDO65449.1| conserved [Neurospora crassa OR74A]
  misc_feature (9)..(513): NCBI GI: 154293800 Blast Desc: BC1G_14228 [Botryotinia fuckeliana B05.10] gi|150845201|gb|EDN20394.1| BC1G_14228 [Botryotinia fuckeliana B05.10]
  misc_feature (45)..(513): NCBI GI: 156061719 Blast Desc: SS1G_03005 [Sclerotinia sclerotiorum 1980] gi|154700406|gb|EDO00145.1| SS1G_03005 [Sclerotinia sclerotiorum 1980]
  misc_feature (91)..(513): NCBI GI: 261352399 Blast Desc: JmjC domain-containing protein [Verticillium albo-atrum VaMs.102]
  misc_feature (51)..(513): NCBI GI: 46136175 Blast Desc: FG09603.1 [Gibberella zeae PH-1]
  misc_feature (51)..(513): NCBI GI: 256727030 Blast Desc: [Nectria haematococca mpVI 77-13-4]
  misc_feature (100)..(513): NCBI GI: 169606486 Blast Desc: SNOG_06286 [Phaeosphaeria nodorum SN15] gi|111064997|gb|EAT86117.1| SNOG_06286 [Phaeosphaeria nodorum SN15]
  misc_feature (100)..(513): NCBI GI: 189192761 Blast Desc: jumonji domain containing 5 [Pyrenophora tritici-repentis Pt-1C-BFP] gi|187978283|gb|EDU44909.1| jumonji domain containing 5 [Pyrenophora tritici-repentis Pt-1C-BFP]
MPDKSATAGEHKHNLLRHCVEAASSIHDECTIILSSKEWQPSASLADCDPALVDLLSRHAAITQNICQELIDDTIAKYGQAVPSTNHRLALKRLEDLASVAYSKFYAYLFKDLPICWRQVYTDARILKFCILLSRWLQDYEYKEEETEQRLDTLVETLDLALILAGAAGKRRGRSWIDRALELLSLIWLEEIESRNPVDSSRSRPMKRIKLEGNARATFSLNQPFTPPVRHPIEKVDSLSIDEFQTYMDQPRDSNLGPEPLVIRHTLDEWPAMTTHPWNKPSYLLSQTLDGRRLVPVEIGRSYVDEGWGQKLIPFGTFLRDYITDPSSQNEVTSQSDAKSVAYLAQHQLFTQLPRLRDDILIPDYCYTSPPPHPSDPQINQPELDAPLLNAWFGPPGTISPLHHDPYHNILAQVVGRKYVRLYSPFETSRLQARGRENGVDMGNTSSLDVGVLERWDRAITEDDEGDAKHDEFRDIPFVDCILEPGDVLYIPIGWWHYVRGLSISFSVSFWWN

SEQ ID NO: 7871 - DNA, 6133 bp, Muscodor strobelii; identical to SEQ ID NO: 7868
  misc_feature: SGI EST ID NO. CUFF.19486.0
  misc_feature: Variant of the nucleotide sequence at SEQ ID NO 7869

SEQ ID NO: 7872 - DNA, 3654 bp, Muscodor strobelii
  misc_feature: SGI cDNA ID NO. 562398
  misc_feature: Encodes the peptide sequence at SEQ ID NO 7873
atggacgatctagaggagttagagctgttgtcgctcgtcagcagggttgcttctgagcttcagaaccatctgggcactaatgacaagaccctggccgagttcatcatctttcagaggtgccaatgcgatgggctgcaggagttcaaggagaagctcgcaaagctcggcggcgcaacgtggccagacagtctgttcgagagtatagaccgtctagtcaggactatgcaccctaagtttaagtccagcaacagcaacggcaacggcaacggcaacggctcgagaaccgaaatcgagaagccgacacgttccctacacgacaaggagactctattcaagggcctgagcatccccgacaagcacgtagcagcagaactggccggcgcagacgagctcgatgatacattcgccctcctggaaggtcttgcacccaagccaacccgtgacgtatcgtctagaaagcgatcccgaagcccccatgacgaagacgatcgccaccggaggaaggagagacgccgttctcgggagaggagagacgacgagtacggcgacgattatcgttctagaaggaaagagaggcgccgctcgcgagacggcgaatatgacgattatcgctccagcaaacaagatcggagaagtcgacgggagcgcaaatacgacgacgaagacgaagacgagcacgagcaccacgaccccttacggcacgctccggagatcgagatcgatgacgcacctgtgctatataaagtgtacgacggccatgtgaccggcatcaaagactttggcgcattcgtcaacttgcatggcgtcaagggcaaggtcgatggtatggtccacatatcacagctggttcagggccaacgcgtaaatcacccttcagatctgctatccagaggacaggatatcaaagtgaaggtcacgaaaatagaaggccaccgaataggactttcgatgaaagacgtggatcaggagacaggcatggatcttgcgcctgccccacgtatccagtcgggcgccaatatggaaagtctcggcagcaggaatggtgtgcttccgatgcagcctaaagacaacactgctgcgctttctgaatatgcaggctctgctcctaagagacacaagaagcgcatgacttctcctgaacgatgggagattcgtcagctcatcgcctctggggttgcaaaggcatctgattatcctgacctagaggaggactataacgctacgttacgaggcgatggcgatttagaacttgaggaggatgttgacattgaagtgcgagaagaagagcctccgtttttagccggccaaacgaagcagtccttggagttgtcacccatcagagtggtgaaagctcccgacggttcgctcaacagagccgccatgtctggagctgcgttggctagagagcgaaaggaagtgaagcaacaggaaactgaagccgctgaagctgctgcatctaagcctgaccttacttcgcaatggcatgatcctatggctaatccggacaaccgacaattcgccagcgacttgcgcagctccaaggccaatgccgcaaaaaatgaaggcgttcctgaatggaggcgagtcgttgcccctaaggatcagtctttgggcaagcgtacaaatttgtcgatcaaggaacagcgggagagtctcccggtctacttgtttagagaccaggtcatcaaggctgtccatgaaaaccagatactcatcgttgtaggagagactggttcaggcaagaccactcaacttacgcaataccttgacgaggctggcttctcaaataatggcatgatcggatgcacacagcctcgtcgagttgcagccatgtctgtcgccaagcgagtagctgaagaagtgggttgcgaactcggccaggaagtcggttacacgattcgattcgaggacaagactagttcttcaacgagaatcaagtatatgacggacggcatgttgcaacgtgaaatcctcatggacccagacttaaatcgctattccgtcatcatgcttgatgaagcccacgaacggaccatttcaactgacattctcttcgcacttttgaaaaagacggtcaaacgccgccctgacctcaaaataatcgttacttcagccactctcgacgccgacaaattttctgaatatttcaatcaatgtccaatcttcacgatacctggtcgaactttccctgtggagatcctctattctcgggaaccggagtcggattaccttgacgctgcgcttgtaacgatcatgcagattcatttgactgaaccagctggcgacgtgcttctgtttctcactggacaagaagaaatcgacactagttgcgaaattttatatgagagaatgaaagcactggggcccaacgtcccggaactcatcatctgccccatttacagtagtcttcctactgatgttcaatctcgagtctttgagcctgcaccaccagggaccagaaaagtggtcattgccacgaacattgccgagacgtctatcactatcgacggaatatactacgtagtagatcctggtttcgtcaagcagaattcatacgatcccaaactcggaatggattctctgatcgttgtgcctatctcccaagctcaagctaatcagcgtgctggtcgtgctggtcgtacaggtcctggcaaatgctttaggctctacactgaggctgcatacaattcggaattgttgccaacaacacctccggatatccaacgtcaaaatttggctcacgttattcttatgctgaaagctatgggtatcaacgatcttctacacttcgactttatggatccgcctccgacaaacacgatgcttgaagcattagaaactctatatgctctatctgctttggacgacgaaggtctgctgacaagacttggccggaagatggctgatttccctatggaccctcccttagccaaagtcctcatctattccgtggaaatgggctgctccgaggaattaatgtcgattgtggctatgttgaatatgcccaccatattctatcggcctaaggagaagcagtcacaagcggatcagaagaaagcgaagtttcatgatccgcatggtgaccatctcacactccttaatgtctacaacgcctggaaatcatccgggtactcttcgccatggtgctttgagaactttatacagttccgctcaatgaagcgcgccaaagatgtgcgtgagcagctactcaagatcatgcagagataccgccaccctgtcgtgtcctgtggtcgggacactacgaaggtacgccaagctctatgctcaggcttcttccgtaacgccgccaggaaagaccctcaagaaggttacaaaacactcgtggagtcaacaccagtccacctccacccaagtagcgcgctttttgggaagcaagctgaatgggttatttatgacacgctcgtccttaccgtcaaggaatatatgcattgtaccaccagcattgagccaaaatggcttgtggaagcagcacccacatttttcaaggttgcacctaccgacaagctgagtaagcggaagaaggccgagcggatacagcctttgtataataaatacgcgacggaagatgattggcgcctcagtgctcagaggagaggcggtagaggtggtggcggtggcggtacttggggttaa

SEQ ID NO: 7873 - protein, 1217 aa, Muscodor strobelii
  misc_feature: SGI Peptide ID NO. 562398
  misc_feature (1067)..(1167): Pfam Id: PF07717 Pfam Desc: Domain of function (DUF1605)
  misc_feature (943)..(1033): Pfam Id: PF04408 Pfam Desc: Helicase associated domain (HA2)
  misc_feature (788)..(882): Pfam Id: PF00271 Pfam Desc: Helicase conserved C-terminal domain
  misc_feature (243)..(318): Pfam Id: PF00575 Pfam Desc: S1 RNA binding domain
  misc_feature (249)..(318): Pfam Id: PF00575 Pfam Desc: S1 RNA binding domain
  misc_feature (13)..(1217): NCBI GI: 85108466 Blast Desc: ATP-dependent RNA helicase DHX8 [Neurospora crassa OR74A] gi|28924189|gb|EAA33344.1| ATP-dependent RNA helicase DHX8 [Neurospora crassa OR74A]
  misc_feature (1)..(1205): NCBI GI: 46121247 Blast Desc: FG05002.1 [Gibberella zeae PH-1]
  misc_feature (1)..(1205): NCBI GI: 154294501 Blast Desc: BC1G_13853 [Botryotinia fuckeliana B05.10] gi|150844693|gb|EDN19886.1| BC1G_13853 [Botryotinia fuckeliana B05.10]
  misc_feature (1)..(1205): NCBI GI: 156032920 Blast Desc: SS1G_13866 [Sclerotinia sclerotiorum 1980] gi|154699268|gb|EDN99006.1| SS1G_13866 [Sclerotinia sclerotiorum 1980]
  misc_feature (1)..(1217): NCBI GI: 39949754 Blast Desc: MGG_08807 [Magnaporthe grisea 70-15] gi|145009363|gb|EDJ94074.1| MGG_08807 [Magnaporthe grisea 70-15]
  misc_feature (1)..(1202): NCBI GI: 225558449 Blast Desc: ATP-dependent RNA helicase DHX8 [Ajellomyces capsulatus G186AR]
  misc_feature (1)..(1202): NCBI GI: 169785967 Blast Desc: [Aspergillus oryzae RIB40] gi|83776192|dbj|BAE66311.1| protein product [Aspergillus oryzae]
  misc_feature (1)..(1202): NCBI GI: 119479157 Blast Desc: RNA helicase-like splicing factor (HRH1), [Neosartorya fischeri NRRL 181] gi|119407761|gb|EAW17710.1| RNA helicase-like splicing factor (HRH1), [Neosartorya fischeri NRRL 181]
  misc_feature (1)..(1202): NCBI GI: 121713496 Blast Desc: RNA helicase-like splicing factor (HRH1), [Aspergillus clavatus NRRL 1] gi|119402512|gb|EAW12933.1| RNA helicase-like splicing factor (HRH1), [Aspergillus clavatus NRRL 1]
  misc_feature (1)..(1202): NCBI GI: 70997647 Blast Desc: RNA helicase-like splicing factor (HRH1) [Aspergillus fumigatus Af293] gi|66851199|gb|EAL91525.1| RNA helicase-like splicing factor (HRH1), [Aspergillus fumigatus Af293] RNA factor
MDDLEELELLSLVSRVASELQNHLGTNDKTLAEFIIFQRCQCDGLQEFKEKLAKLGGATWPDSLFESIDRLVRTMHPKFKSSNSNGNGNGNGSRTEIEKPTRSLHDKETLFKGLSIPDKHVAAELAGADELDDTFALLEGLAPKPTRDVSSRKRSRSPHDEDDRHRRKERRRSRERRDDEYGDDYRSRRKERRRSRDGEYDDYRSSKQDRRSRRERKYDDEDEDEHEHHDPLRHAPEIEIDDAPVLYKVYDGHVTGIKDFGAFVNLHGVKGKVDGMVHISQLVQGQRVNHPSDLLSRGQDIKVKVTKIEGHRIGLSMKDVDQETGMDLAPAPRIQSGANMESLGSRNGVLPMQPKDNTAALSEYAGSAPKRHKKRMTSPERWEIRQLIASGVAKASDYPDLEEDYNATLRGDGDLELEEDVDIEVREEEPPFLAGQTKQSLELSPIRVVKAPDGSLNRAAMSGAALARERKEVKQQETEAAEAAASKPDLTSQWHDPMANPDNRQFASDLRSSKANAAKNEGVPEWRRVVAPKDQSLGKRTNLSIKEQRESLPVYLFRDQVIKAVHENQILIVVGETGSGKTTQLTQYLDEAGFSNNGMIGCTQPRRVAAMSVAKRVAEEVGCELGQEVGYTIRFEDKTSSSTRIKYMTDGMLQREILMDPDLNRYSVIMLDEAHERTISTDILFALLKKTVKRRPDLKIIVTSATLDADKFSEYFNQCPIFTIPGRTFPVEILYSREPESDYLDAALVTIMQIHLTEPAGDVLLFLTGQEEIDTSCEILYERMKALGPNVPELIICPIYSSLPTDVQSRVFEPAPPGTRKVVIATNIAETSITIDGIYYVVDPGFVKQNSYDPKLGMDSLIVVPISQAQANQRAGRAGRTGPGKCFRLYTEAAYNSELLPTTPPDIQRQNLAHVILMLKAMGINDLLHFDFMDPPPTNTMLEALETLYALSALDDEGLLTRLGRKMADFPMDPPLAKVLIYSVEMGCSEELMSIVAMLNMPTIFYRPKEKQSQADQKKAKFHDPHGDHLTLLNVYNAWKSSGYSSPWCFENFIQFRSMKRAKDVREQLLKIMQRYRHPVVSCGRDTTKVRQALCSGFFRNAARKDPQEGYKTLVESTPVHLHPSSALFGKQAEWVIYDTLVLTVKEYMHCTTSIEPKWLVEAAPTFFKVAPTDKLSKRKKAERIQPLYNKYATEDDWRLSAQRRGGRGGGGGGTWG

SEQ ID NO: 7874 - DNA, 3863 bp, Muscodor strobelii
  misc_feature: SGI EST ID NO. CUFF.19489.0
  misc_feature: Variant of the nucleotide sequence at SEQ ID NO 7872
ctatcgtcttctacggtttgtcgccttcatccacgcttcgcaacacgtctcaacctttaccatggacgatctagaggagttagagctgttgtcgctcgtcagcagggttgcttctgagcttcagaaccatctgggcactaatgacaagaccctggccgagttcatcatctttcagaggtgccaatgcgatgggctgcaggagttcaaggagaagctcgcaaagctcggcggcgcaacgtggccagacagtctgttcgagagtatagaccgtctagtcaggactatgcaccctaagtttaagtccagcaacagcaacggcaacggcaacggcaacggctcgagaaccgaaatcgagaagccgacacgttccctacacgacaaggagactctattcaagggcctgagcatccccgacaagcacgtagcagcagaactggccggcgcagacgagctcgatgatacattcgccctcctggaaggtcttgcacccaagccaacccgtgacgtatcgtctagaaagcgatcccgaagcccccatgacgaagacgatcgccaccggaggaaggagagacgccgttctcgggagaggagagacgacgagtacggcgacgattatcgttctagaaggaaagagaggcgccgctcgcgagacggcgaatatgacgattatcgctccagcaaacaagatcggagaagtcgacgggagcgcaaatacgacgacgaagacgaagacgagcacgagcaccacgaccccttacggcacgctccggagatcgagatcgatgacgcacctgtgctatataaagtgtacgacggccatgtgaccggcatcaaagactttggcgcattcgtcaacttgcatggcgtcaagggcaaggtcgatggtatggtccacatatcacagctggttcagggccaacgcgtaaatcacccttcagatctgctatccagaggacaggatatcaaagtgaaggtcacgaaaatagaaggccaccgaataggactttcgatgaaagacgtggatcaggagacaggcatggatcttgcgcctgccccacgtatccagtcgggcgccaatatggaaagtctcggcagcaggaatggtgtgcttccgatgcagcctaaagacaacactgctgcgctttctgaatatgcaggctctgctcctaagagacacaagaagcgcatgacttctcctgaacgatgggagattcgtcagctcatcgcctctggggttgcaaaggcatctgattatcctgacctagaggaggactataacgctacgttacgaggcgatggcgatttagaacttgaggaggatgttgacattgaagtgcgagaagaagagcctccgtttttagccggccaaacgaagcagtccttggagttgtcacccatcagagtggtgaaagctcccgacggttcgctcaacagagccgccatgtctggagctgcgttggctagagagcgaaaggaagtgaagcaacaggaaactgaagccgctgaagctgctgcatctaagcctgaccttacttcgcaatggcatgatcctatggctaatccggacaaccgacaattcgccagcgacttgcgcagctccaaggccaatgccgcaaaaaatgaaggcgttcctgaatggaggcgagtcgttgcccctaaggatcagtctttgggcaagcgtacaaatttgtcgatcaaggaacagcgggagagtctcccggtctacttgtttagagaccaggtcatcaaggctgtccatgaaaaccagatactcatcgttgtaggagagactggttcaggcaagaccactcaacttacgcaataccttgacgaggctggcttctcaaataatggcatgatcggatgcacacagcctcgtcgagttgcagccatgtctgtcgccaagcgagtagctgaagaagtgggttgcgaactcggccaggaagtcggttacacgattcgattcgaggacaagactagttcttcaacgagaatcaagtatatgacggacggcatgttgcaacgtgaaatcctcatggacccagacttaaatcgctattccgtcatcatgcttgatgaagcccacgaacggaccatttcaactgacattctcttcgcacttttgaaaaagacggtcaaacgccgccctgacctcaaaataatcgttacttcagccactctcgacgccgacaaattttctgaatatttcaatcaatgtccaatcttcacgatacctggtcgaactttccctgtggagatcctctattctcgggaaccggagtcggattaccttgacgctgcgcttgtaacgatcatgcagattcatttgactgaaccagctggcgacgtgcttctgtttctcactggacaagaagaaatcgacactagttgcgaaattttatatgagagaatgaaagcactggggcccaacgtcccggaactcatcatctgccccatttacagtagtcttcctactgatgttcaatctcgagtctttgagcctgcaccaccagggaccagaaaagtggtcattgccacgaacattgccgagacgtctatcactatcgacggaatatactacgtagtagatcctggtttcgtcaagcagaattcatacgatcccaaactcggaatggattctctgatcgttgtgcctatctcccaagctcaagctaatcagcgtgctggtcgtgctggtcgtacaggtcctggcaaatgctttaggctctacactgaggctgcatacaattcggaattgttgccaacaacacctccggatatccaacgtcaaaatttggctcacgttattcttatgctgaaagctatgggtatcaacgatcttctacacttcgactttatggatccgcctccgacaaacacgatgcttgaagcattagaaactctatatgctctatctgctttggacgacgaaggtctgctgacaagacttggccggaagatggctgatttccctatggaccctcccttagccaaagtcctcatctattccgtggaaatgggctgctccgaggaattaatgtcgattgtggctatgttgaatatgcccaccatattctatcggcctaaggagaagcagtcacaagcggatcagaagaaagcgaagtttcatgatccgcatggtgaccatctcacactccttaatgtctacaacgcctggaaatcatccgggtactcttcgccatggtgctttgagaactttatacagttccgctcaatgaagcgcgccaaagatgtgcgtgagcagctactcaagatcatgcagagataccgccaccctgtcgtgtcctgtggtcgggacactacgaaggtacgccaagctctatgctcaggcttcttccgtaacgccgccaggaaagaccctcaagaaggttacaaaacactcgtggagtcaacaccagtccacctccacccaagtagcgcgctttttgggaagcaagctgaatgggttatttatgacacgctcgtccttaccgtcaaggaatatatgcattgtaccaccagcattgagccaaaatggcttgtggaagcagcacccacatttttcaaggttgcacctaccgacaagctgagtaagcggaagaaggccgagcggatacagcctttgtataataaatacgcgacggaagatgattggcgcctcagtgctcagaggagaggcggtagaggtggtggcggtggcggtacttggggttaaattagacatctattatcaacaggtcgactgcttgtcaattaaaattgtattagacatacttcagaatatcgaataactgtagaagtaaattcgcgaatagattaaggactagatattcgaatagacatgcgaagagacttcagaattg

SEQ ID NO: 7875 - DNA, 432 bp, Muscodor strobelii
  misc_feature: SGI cDNA ID NO. 562399
  misc_feature: Reduced expression when VOC is produced
  misc_feature: Encodes the peptide sequence at SEQ ID NO 7876
atgtgcagccctgacatcttccttggcctcatcgccattctgttcccaccccttgccgtctgggtgagacgcggtatctgctcagctgattctcttatcaacattcttctctgctgtctgggcttcatcccaggtcttttgcacgcatggtacatcatcgcaaagttccccgaatcaagcgactatgagcgcgtaccacaagaccaagaacgcggccacacccacacgtaccatgtcttcgttccgcaccaaaacaacggccagcagcaacagcctaagccaagcaacaacatgaactacgggtcaacagacaacagcaacgccaatgccggttcatcatcagccgggcctgccaacgacggtggcgatcgcgctccacccacgtacgctgaggctgtcaagggcgacaacaagatccagactcaggactag

SEQ ID NO: 7876 - protein, 143 aa, Muscodor strobelii
  misc_feature: SGI Peptide ID NO. 562399
  misc_feature (4)..(55): Pfam Id: PF01679 Pfam Desc: Uncharacterized protein family UPF0057
  misc_feature (1)..(143): NCBI GI: 39949765 Blast Desc: MGG_08808 [Magnaporthe grisea 70-15] gi|145009364|gb|EDJ94075.1| MGG_08808 [Magnaporthe grisea 70-15]
  misc_feature (1)..(143): NCBI GI: 242762247 Blast Desc: stress response RCI peptide, [Talaromyces stipitatus ATCC 10500] gi|218723533|gb|EED22950.1| stress response RCI peptide, [Talaromyces stipitatus ATCC 10500]
  misc_feature (1)..(143): NCBI GI: 46121245 Blast Desc: FG05001.1 [Gibberella zeae PH-1]
  misc_feature (1)..(143): NCBI GI: 212529794 Blast Desc: stress response RCI peptide, [Penicillium marneffei ATCC 18224] gi|210074452|gb|EEA28539.1| stress response RCI peptide, [Penicillium marneffei ATCC 18224]
  misc_feature (1)..(143): NCBI GI: 156049327 Blast Desc: SS1G_08370 [Sclerotinia sclerotiorum 1980] gi|154692769|gb|EDN92507.1| SS1G_08370 [Sclerotinia sclerotiorum 1980]
  misc_feature (1)..(143): NCBI GI: 256727912 Blast Desc: NECHADRAFT_101216 [Nectria haematococca mpVI 77-13-4]
  misc_feature (1)..(141): NCBI GI: 258573985 Blast Desc: conserved [Uncinocarpus reesii 1704] gi|237901440|gb|EEP75841.1| conserved [Uncinocarpus reesii 1704]
  misc_feature (1)..(143): NCBI GI: 85108462 Blast Desc: NCU06317 [Neurospora crassa OR74A] gi|28924188|gb|EAA33343.1| conserved [Neurospora crassa OR74A]
  misc_feature (1)..(143): NCBI GI: 154303689 Blast Desc: BC1G_08729 [Botryotinia fuckeliana B05.10] gi|150854523|gb|EDN29715.1| BC1G_08729 [Botryotinia fuckeliana B05.10]
  misc_feature (1)..(143): NCBI GI: 70997695 Blast Desc: stress response RCI peptide [Aspergillus fumigatus Af293] gi|66851221|gb|EAL91547.1| stress response RCI peptide, [Aspergillus fumigatus Af293] gi|159126684|gb|EDP51800.1| stress
  misc_feature: Useful for introducing or modulating the production of volatile compounds
MCSPDIFLGLIAILFPPLAVWVRRGICSADSLINILLCCLGFIPGLLHAWYIIAKFPESSDYERVPQDQERGHTHTYHVFVPHQNNGQQQQPKPSNNMNYGSTDNSNANAGSSSAGPANDGGDRAPPTYAEAVKGDNKIQTQD

SEQ ID NO: 7877 - DNA, 1238 bp, Muscodor strobelii
  misc_feature: SGI EST ID NO. CUFF.19617.0
  misc_feature: Variant of the nucleotide sequence at SEQ ID NO 7875
aagacatgcgactgactctcaacccactcccactcccgcttcaactccaaacactctttatatcaccacagtctttcaattagaccacattgtacagttctgcgtttttgaagttgagcaatactcaagcaatcatgtgcagccctgacatcttccttggcctcatcgccattctgttcccaccccttgccggtacgtcatcagaggcatccgacatcccacccctcctcgctcaacttgcctcgatgtcaactgcactcatcagtctatactaacaatacttgtcttctagtctgggtgagacgcggtatctgctcagctgattctcttatcaacattcttctctgctgtctgggcttcgtacgttacttctgtcatgtcctctactcgcataattcgccttggcgtcgacaggcaagccttgggaaaaaagcatactaacaacacctctatccagatcccaggtcttttgcacgcatggtacatcatcgcaaagttccccgaatcaagcgactatgagcgcgtaccacaagaccaagaacgcggccacacccacacgtaccatgtcttcgttccgcaccaaaacaacggccagcagcaacagcctaagccaagcaacaacatgaactacgggtcaacagacaacagcaacgccaatgccggttcatcatcagccgggcctgccaacgacggtggcgatcgcgctccacccacgtacgctgaggctgtcaagggcgacaacaagatccagactcaggactagagctcctccaggcaaagagtcccggcagcttcttgttgtcaatcgagaaagatgaggaagtcaccacttcttcttaagtatgaatttcgggatgggaagcaacccgaaagttaaatggacgaggctggcataggtggcggaattacgggacatttgtccctagtaacgaatattatgcgagagactactgtatgagcataggtgtattttcgctctgggtcagttcattatcggtttatcgcaacgatcagttgagaccttttcaatataggatttcacttgcgccttcttaatacgtgagatgatggacaagataggtgacgactggcaaagcacatagacatcttaaactggttgtataatacatcagtccataaatcgaataatcacgcggctaaacgtgaatattactgtctagactatcactagaaaagtaaatcgccagacactcgctacacacacttatagtaagaag

SEQ ID NO: 7878 - DNA, 1275 bp, Muscodor strobelii
  misc_feature: SGI cDNA ID NO. 562400
  misc_feature: Encodes the peptide sequence at SEQ ID NO 7879
atggatcctccgcggcctgcaaaacccggatttgaatgggtatggtttccagctggctattgggctgagcgcgaggttgttgagctgccgactaaagaagagaccaaggtattcaagtggaagaaacgttcaacacgaaaatcaagctcggggtccccgaaccagtcgcccagaacatttcttcctggtccgctccaatcagaaaggaaatccgatccgtcagacaaaagacctccgttaactcggaaaaacacaagtagtgacagcactatgcatttcccactgggccgcttggcggaccaacctctcccgagcccttatctgtcagaggcagatcatgttcagtctctccaatggccatccttggagttccaaccaagaagtagcacaggtggaagtggaagtgcgaacaccgcgtcaaaatctaggctcgctcatccaccctcccctctacaatattcaaatttaggtgatgactctcgacgaccaactcacccgggatcctttaaaccgccagcattcttagactcctctcaagtctctaggagtccagcagcacagcataaacatgtcaatggcaacaaagggccagacaccatcaaaaacttgttaaactggcgcctcctcacagaacataagcaggaaagattcgaggagcttcacctctttggtgttctgagtttccaggcggtttctcaacaggaagcccagcgagtacatacaccgcacataacagaagaccgtgtaaagcgatgcccacgctcattcttcttcgacgtcgaacctcccccgcaagaccctcacaacaggaaccgaaagaacaagtcgtatctggcttcatttgtcaccattaagaactcacgaagagcaaagaacggacgtatcagcggacataccagcggcagcggcagtgaccaggccaaccgctcagcaggcgaacagtcctcaagccgtagcaatacgcagcgcaagcaatggtgggatgtccccgttcccattccagttgggtttgaagggaagaagatccggaatgcagagcagcgtggcttcgaattcgacattgcagaacacctgcccactagccctatgtgtcccgccaacaaacgccatgtttctggcggcacgggagtctgtgtctttcatggccgccggaagcgtacgccgaaggacgaggtgccgcctgggacattaggttctgaagccaaggggaatgcgaatggcgatgcggatgatgaagatgatgaggatgacttgggaagtgatatttggaagtag

SEQ ID NO: 7879 - protein, 424 aa, Muscodor strobelii
  misc_feature: SGI Peptide ID NO. 562400
  misc_feature (1)..(385): NCBI GI: 164423522 Blast Desc: NCU08322 [Neurospora crassa OR74A] gi|157070130|gb|EAA33299.2| [Neurospora crassa OR74A]
  misc_feature (235)..(385): NCBI GI: 261352531 Blast Desc: conserved [Verticillium albo-atrum VaMs.102]
  misc_feature (235)..(385): NCBI GI: 256727416 Blast Desc: NECHADRAFT_25867 [Nectria haematococca mpVI 77-13-4]
  misc_feature (350)..(385): NCBI GI: 46121699 Blast Desc: FG05228.1 [Gibberella zeae PH-1]
  misc_feature (1)..(58): NCBI GI: 156050279 Blast Desc: [Sclerotinia sclerotiorum 1980] gi|154692127|gb|EDN91865.1| [Sclerotinia sclerotiorum 1980]
  misc_feature (1)..(26): NCBI GI: 154289892 Blast Desc: BC1G_15900 [Botryotinia fuckeliana B05.10] gi|150848559|gb|EDN23752.1| BC1G_15900 [Botryotinia fuckeliana B05.10]
  misc_feature (346)..(419): NCBI GI: 189210341 Blast Desc: conserved [Pyrenophora tritici-repentis Pt-1C-BFP] gi|187977595|gb|EDU44221.1| conserved [Pyrenophora tritici-repentis Pt-1C-BFP]
  misc_feature (346)..(385): NCBI GI: 156050279 Blast Desc: [Sclerotinia sclerotiorum 1980] gi|154692127|gb|EDN91865.1| [Sclerotinia sclerotiorum 1980]
  misc_feature (346)..(386): NCBI GI: 169618922 Blast Desc: SNOG_12653 [Phaeosphaeria nodorum SN15] gi|111058831|gb|EAT79951.1| SNOG_12653 [Phaeosphaeria nodorum SN15]
MDPPRPAKPGFEWVWFPAGYWAEREVVELPTKEETKVFKWKKRSTRKSSSGSPNQSPRTFLPGPLQSERKSDPSDKRPPLTRKNTSSDSTMHFPLGRLADQPLPSPYLSEADHVQSLQWPSLEFQPRSSTGGSGSANTASKSRLAHPPSPLQYSNLGDDSRRPTHPGSFKPPAFLDSSQVSRSPAAQHKHVNGNKGPDTIKNLLNWRLLTEHKQERFEELHLFGVLSFQAVSQQEAQRVHTPHITEDRVKRCPRSFFFDVEPPPQDPHNRNRKNKSYLASFVTIKNSRRAKNGRISGHTSGSGSDQANRSAGEQSSSRSNTQRKQWWDVPVPIPVGFEGKKIRNAEQRGFEFDIAEHLPTSPMCPANKRHVSGGTGVCVFHGRRKRTPKDEVPPGTLGSEAKGNANGDADDEDDEDDLGSDIWK

SEQ ID NO: 7880 - DNA, 2322 bp, Muscodor strobelii
  misc_feature: SGI cDNA ID NO. 562401
  misc_feature: Reduced expression when VOC is produced
  misc_feature: Encodes the peptide sequence at SEQ ID NO 7881
atgcgcttcctcctctgtgcgactcgccgggccagcaccatccctctgcttagtcgcgatgcccatcgccgtctcgtcgaccgccaccccttccgccatgcccctttcacgactctgacacggcaaaccgcccggaaaccttcccgcggcaatgcccgccccgagtcgcgtgcacaccgcgaggtgcagaggacccacgccatattccgcaagctgatgctttcgcgcttcgatgctttgatcagggagaagagctggctcagcaagaaggacgagtacagggccttcggcgtcaactcgaggctcgacttcgagcgcgaggccaagctgttccgcctctccatcgaccgcgcctgcgacctggccagcgagagcaatgccgtctcccgcaaggacaacccgctgttctggtccctccgcaatgccttcgtcacccaggacctcgccggcctcaacatccagatcacctacgccttccagaacttcctcatgcgctcccgcttcaccggcaacatccgcgccacccaccagaagatcgccgacttcaggttcccctacgagtggtaccccgccacccgcgccatgcagcgcaccatccatctccacgtcggcccgaccaactccggcaagacctacaacgccttgaaggccctcgagaacgcgaagacgggcatctacgccggccccctccgcctgctggcccacgaggtctattctcgcttcaccgccaaaggcaaaccctgcgccctcatcaccggagaagagcagcgcatccccacggacaccaactcgttctaccggagctgcaccgtcgagatgacgcctctcaactatcccgtcgacgtcgctgtcatcgacgagatccagatgatcggagacacggaaaggggctgggcctggacgcaagccgtcctcggcgtccaagccaaggaactccacctctgcggagaggagcgcaccgtggacctcatccagactctctgcaagactctcggtgatgaatgcatcgttcatcgctaccagcgcctcagcggcttggagacgatgggcgagagcttgaacggcgacctgcgcaatttggaaaagggcgatgctattgtctctttcagccgtctcggcatacacagtttgaagaaacaggtcgagcaaaagaccggcaaacgctgtgccgtcgtatatggatcgctgccccctgagacacgcgcgaaccaggctgcattgtttaacgatcccgacaatgactatgattatcttgtcgccagtgacgccatcggcatgggtttaaatcttgaagtcagacgcatcattttcgaggctacacacaagcgtgactctaccagttatcgtgcactaacgattcccgagatgaagcaaatcggcggccgggcgggccgcttcaaaacagcaagacaagccatgcaaagtgagacgtcggttgatactcaagacgaaaacaccaccttgataccgaagcccaaagatggccagccgggtctcgtcacagctcttgaagacgaagatttggctgtcttgatcagagcctttaaaaccgaacccgaacaactgaagacggccggcatacagccacccgttaacgtaatcgagcgcctatcaacatattttccacccaacactcccctcagctttattcttactcgtctgcgtgatgtgggtaagatatcatcaaactaccactactgcaccacaggcgagcagctcaatattgccgatctcattcaaccatttcccatgtctatctacgaccgctgcgtgtttttaaatgcaccggtggctctcagagatcagaagggctgtactgtcctccaagcatttgccaggtgtgtctcgaaaatggaaggcggcgatctattggccatcccggaagtcgagctagaaatcctggatatagatcccacgcagtccaatgcagcagatcttctaaacaaattggaggctctgcacaaatccatcaccctctatctctggctgtcgtaccgattttctggtgtcttcaccagccagcgtctcgcgttccacgtgaaggaaatagttgaggagaagatcaatctccacctttctggtgtcacaatgacagacgaggcgagaaagaggagaatggagtcgcaacgcaaaaaggttgcagctagaattgctgacaaggaacgtattcttggcgaagaagctgacgcaggagaaggcgcacatgaggtggtgggcgaatggaatgaagaaggccacggtgaacccttatttgacgatgtgtctcaactagatcagatcactcgtctagaacccaagactgagaagggcgcaaggcgctaa

SEQ ID NO: 7881 - protein, 773 aa, Muscodor strobelii
  misc_feature: SGI Peptide ID NO. 562401
  misc_feature (381)..(467): Pfam Id: PF00271 Pfam Desc: Helicase conserved C-terminal domain
  misc_feature (69)..(751): NCBI GI: 85107578 Blast Desc: NCU06371 [Neurospora crassa OR74A] gi|28924010|gb|EAA33169.1| conserved [Neurospora crassa OR74A]
  misc_feature (9)..(711): NCBI GI: 171690328 Blast Desc: protein product [Podospora anserina] gi|170945112|emb|CAP71223.1| protein product [Podospora anserina]
  misc_feature (21)..(692): NCBI GI: 261359773 Blast Desc: ATP-dependent RNA helicase SUV3 [Verticillium albo-atrum VaMs.102]
  misc_feature (29)..(745): NCBI GI: 116196278 Blast Desc: CHGG_04737 [Chaetomium globosum CBS 148.51] gi|88180650|gb|EAQ88118.1| CHGG_04737 [Chaetomium globosum CBS 148.51]
  misc_feature (69)..(722): NCBI GI: 39952079 Blast Desc: MGG_01682 [Magnaporthe grisea 70-15] gi|145020477|gb|EDK04606.1| MGG_01682 [Magnaporthe grisea 70-15]
  misc_feature (66)..(745): NCBI GI: 46132986 Blast Desc: FG09022.1 [Gibberella zeae PH-1]
  misc_feature (5)..(717): NCBI GI: 256727885 Blast Desc: NECHADRAFT_46281 [Nectria haematococca mpVI 77-13-4]
  misc_feature (80)..(740): NCBI GI: 156049155 Blast Desc: SS1G_08284 [Sclerotinia sclerotiorum 1980] gi|154692683|gb|EDN92421.1| SS1G_08284 [Sclerotinia sclerotiorum 1980]
  misc_feature (92)..(720): NCBI GI: 154299770 Blast Desc: BC1G_11511 [Botryotinia fuckeliana B05.10] gi|150857201|gb|EDN32393.1| BC1G_11511 [Botryotinia fuckeliana B05.10]
  misc_feature (159)..(736): NCBI GI: 189206057 Blast Desc: ATP-dependent RNA helicase SUV3, mitochondrial precursor [Pyrenophora tritici-repentis Pt-1C-BFP] gi|187975456|gb|EDU42082.1| ATP-dependent RNA helicase SUV3,
  misc_feature: Useful for introducing or modulating the production of volatile compounds
MRFLLCATRRASTIPLLSRDAHRRLVDRHPFRHAPFTTLTRQTARKPSRGNARPESRAHREVQRTHAIFRKLMLSRFDALIREKSWLSKKDEYRAFGVNSRLDFEREAKLFRLSIDRACDLASESNAVSRKDNPLFWSLRNAFVTQDLAGLNIQITYAFQNFLMRSRFTGNIRATHQKIADFRFPYEWYPATRAMQRTIHLHVGPTNSGKTYNALKALENAKTGIYAGPLRLLAHEVYSRFTAKGKPCALITGEEQRIPTDTNSFYRSCTVEMTPLNYPVDVAVIDEIQMIGDTERGWAWTQAVLGVQAKELHLCGEERTVDLIQTLCKTLGDECIVHRYQRLSGLETMGESLNGDLRNLEKGDAIVSFSRLGIHSLKKQVEQKTGKRCAVVYGSLPPETRANQAALFNDPDNDYDYLVASDAIGMGLNLEVRRIIFEATHKRDSTSYRALTIPEMKQIGGRAGRFKTARQAMQSETSVDTQDENTTLIPKPKDGQPGLVTALEDEDLAVLIRAFKTEPEQLKTAGIQPPVNVIERLSTYFPPNTPLSFILTRLRDVGKISSNYHYCTTGEQLNIADLIQPFPMSIYDRCVFLNAPVALRDQKGCTVLQAFARCVSKMEGGDLLAIPEVELEILDIDPTQSNAADLLNKLEALHKSITLYLWLSYRFSGVFTSQRLAFHVKEIVEEKINLHLSGVTMTDEARKRRMESQRKKVAARIADKERILGEEADAGEGAHEVVGEWNEEGHGEPLFDDVSQLDQITRLEPKTEKGARR

SEQ ID NO: 7882 - DNA, 2801 bp, Muscodor strobelii
  misc_feature: SGI EST ID NO. CUFF.19545.0
  misc_feature: Variant of the nucleotide sequence at SEQ ID NO 7880
gacttctacagcatgatggagatggggcaagatacttttaactaacgactgccacatcaacattgacaacaatatcctgtgtctcgttttctacgactgctgcagagcaggccttgttgagacatgcaagacgggacgtaacatgattgctccgtctcctcgtgtatgccatgcgcttcctcctctgtgcgactcgccgggccagcaccatccctctgcttagtcgcgatgcccatcgccgtctcgtcgaccgccaccccttccgccatgcccctttcacgactctgacacggcaaaccgcccggaaaccttcccgcggcaatgcccgccccgagtcgcgtgcacaccgcgaggtgcagaggacccacgccatattccgcaagctgatgctttcgcgcttcgatgctttgatcagggagaagagctggctcagcaagaaggacgagtacagggccttcggcgtcaactcgaggctcgacttcgagcgcgaggccaagctgttccgcctctccatcgaccgcgcctgcgacctggccagcgagagcaatgccgtctcccgcaaggacaacccgctgttctggtccctccgcaatgccttcgtcacccaggacctcgccggcctcaacatccagatcacctacgccttccagaacttcctcatgcgctcccgcttcaccggcaacatccgcgccacccaccagaagatcgccgacttcaggttcccctacgagtggtaccccgccacccgcgccatgcagcgcaccatccatctccacgtcggcccgaccaactccggcaagacctacaacgccttgaaggccctcgagaacgcgaagacgggcatctacgccggccccctccgcctgctggcccacgaggtctattctcgcttcaccgccaaaggcaaaccctgcgccctcatcaccggagaagagcagcgcatccccacggacaccaactcgttctaccggagctgcaccgtcgagatgacgcctctcaactatcccgtcgacgtcgctgtcatcgacgagatccagatgatcggagacacggaaaggggctgggcctggacgcaagccgtcctcggcgtccaagccaaggaactccacctctgcggagaggagcgcaccgtggacctcatccagactctctgcaagactctcggtgatgaatgcatcgttcatcgctaccagcgcctcagcggcttggagacgatgggcgagagcttgaacggcgacctgcgcaatttggaaaagggcgatgctattgtctctttcagccgtctcggcatacacagtttgaagaaacaggtcgagcaaaagaccggcaaacgctgtgccgtcgtatatggatcgctgccccctgagacacgcgcgaaccaggctgcattgtttaacgatcccgacaatgactatgattatcttgtcgccagtgacgccatcggcatgggtttaaatcttgaagtcagacgcatcattttcgaggctacacacaagcgtgactctaccagttatcgtgcactaacgattcccgagatgaagcaaatcggcggccgggcgggccgcttcaaaacagcaagacaagccatgcaaagtgagacgtcggttgatactcaagacgaaaacaccaccttgataccgaagcccaaagatggccagccgggtctcgtcacagctcttgaagacgaagatttggctgtcttgatcagagcctttaaaaccgaacccgaacaactgaagacggccggcatacagccacccgttaacgtaatcgagcgcctatcaacatattttccacccaacactcccctcagctttattcttactcgtctgcgtgatgtgggtaagatatcatcaaactaccactactgcaccacaggcgagcagctcaatattgccgatctcattcaaccatttcccatgtctatctacgaccgctgcgtgtttttaaatgcaccggtggctctcagagatcagaagggctgtactgtcctccaagcatttgccaggtgtgtctcgaaaatggaaggcggcgatctattggccatcccggaagtcgagctagaaatcctggatatagatcccacgcagtccaatgcagcagatcttctaaacaaattggaggctctgcacaaatccatcaccctctatctctggctgtcgtaccgattttctggtgtcttcaccagccagcgtctcgcgttccacgtgaaggaaatagttgaggagaagatcaatctccacctttctggtgtcacaatgacagacgaggcgagaaagaggagaatggagtcgcaacgcaaaaaggttgcagctagaattgctgacaaggaacgtattcttggcgaagaagctgacgcaggagaaggcgcacatgaggtggtgggcgaatggaatgaagaaggccacggtgaacccttatttgacgatgtgtctcaactagatcagatcactcgtctagaacccaagactgagaagggcgcaaggcgctaatgagaacgacatatacaatgtacaaactctgtatcatcactaatagcatatatcagtacggcgttttggttcacgggctagagttcggtctgaagaaagttacgacaaacgtcgcttgtacatagaattatggacatgaaactgataaatggggcagttatacttgtgaatcattagccgcatcaattgccaaatacagaaaatacctctcaaagagatcctcgccactcagatgtcctgttatcaatgagttcgtctctcgtcgtagttagccccagcatcatagacaaatgagaataccattctatt

SEQ ID NO: 7883 - DNA, 714 bp, Muscodor strobelii
  misc_feature: SGI cDNA ID NO. 562402
  misc_feature: Reduced expression when VOC is produced
  misc_feature: Encodes the peptide sequence at SEQ ID NO 7884
atggcttcctcctcgacacagactcccctcctctactcgtgcatagcgcacaactcgaccatcctctccgagtgcaccacctcggcctcctccaatacctcctctctcgcctcgctcatcctgcccaagatctcgcactcaagcccgcagaagctcacctacacccacggcgacaagtacatccactacatatccgaggctccatcctcctatccagacaatgcctccgccggcggcttgacataccttgtcgtcgccgactcctccctcggccggcgcgtgcccttcggctttctcttcgagattaagaaccgcttcctccgcgagttcgacgagaacagcaccgacttcgccgatctgcccaactacggcgccggcagcttcaactccaccctcaagaacctcatggtcgactatggcaccacctccggcggtcgcgacgacgccatctccaatgttcagcgcgagatcgacgacgtgcgcggcatcatgaccaagaacatcgagggcttgctcgagcgcggcgagcgcatcgatctgcttgtcgacaagactgatcgtcttggtggcagcgcccgagagttccgcgtccgcagccgtggcctcaagaggcagatgtggtggaagaacgtcaagctcatggccatgctcgtcgtcgttctgctgctgatcattgtcgctatcgtcatcgccgttaagaatgcaaccggttag

SEQ ID NO: 7884 - protein, 237 aa, Muscodor strobelii
  misc_feature: SGI Peptide ID NO. 562402
  misc_feature (146)..(234): Pfam Id: PF00957 Pfam Desc: Synaptobrevin
  misc_feature (1)..(236): NCBI GI: 46132984 Blast Desc: FG09021.1 [Gibberella zeae PH-1]
  misc_feature (1)..(235): NCBI GI: 145613399 Blast Desc: MGG_01681 [Magnaporthe grisea 70-15] gi|145020478|gb|EDK04607.1| MGG_01681 [Magnaporthe grisea 70-15]
  misc_feature (1)..(229): NCBI GI: 154299768 Blast Desc: BC1G_11510 [Botryotinia fuckeliana B05.10] gi|150857200|gb|EDN32392.1| BC1G_11510 [Botryotinia fuckeliana B05.10]
  misc_feature (10)..(228): NCBI GI: 156049157 Blast Desc: SS1G_08285 [Sclerotinia sclerotiorum 1980] gi|154692684|gb|EDN92422.1| SS1G_08285 [Sclerotinia sclerotiorum 1980]
  misc_feature (2)..(235): NCBI GI: 85107574 Blast Desc: NCU06370 [Neurospora crassa OR74A] gi|28924009|gb|EAA33168.1| conserved [Neurospora crassa OR74A]
  misc_feature (1)..(234): NCBI GI: 116196280 Blast Desc: CHGG_04738 [Chaetomium globosum CBS 148.51] gi|88180651|gb|EAQ88119.1| CHGG_04738 [Chaetomium globosum CBS 148.51]
  misc_feature (1)..(234): NCBI GI: 171690326 Blast Desc: protein product [Podospora anserina] gi|170945111|emb|CAP71222.1| protein product [Podospora anserina]
  misc_feature (9)..(229): NCBI GI: 189205799 Blast Desc: vesicle-associated membrane protein 712 [Pyrenophora tritici-repentis Pt-1C-BFP] gi|187975327|gb|EDU41953.1| vesicle-associated membrane protein 712 [Pyrenophora Pt-1C-BFP]
  misc_feature (1)..(210): NCBI GI: 240277387 Blast Desc: conserved [Ajellomyces capsulatus H143]
  misc_feature (1)..(210): NCBI GI: 261203030 Blast Desc: vesicle-associated membrane protein 712 [Ajellomyces dermatitidis SLH14081] gi|239590826|gb|EEQ73407.1| vesicle-associated membrane protein 712 [Ajellomyces dermatitidis
  misc_feature: Useful for introducing or modulating the production of volatile compounds
MASSSTQTPLLYSCIAHNSTILSECTTSASSNTSSLASLILPKISHSSPQKLTYTHGDKYIHYISEAPSSYPDNASAGGLTYLVVADSSLGRRVPFGFLFEIKNRFLREFDENSTDFADLPNYGAGSFNSTLKNLMVDYGTTSGGRDDAISNVQREIDDVRGIMTKNIEGLLERGERIDLLVDKTDRLGGSAREFRVRSRGLKRQMWWKNVKLMAMLVVVLLLIIVAIVIAVKNATG

SEQ ID NO: 7885 - DNA, 2227 bp, Muscodor strobelii
  misc_feature: SGI EST ID NO. CUFF.19548.0
  misc_feature: Variant of the nucleotide sequence at SEQ ID NO 7883
gcgagatccacatggcaagcactgtgagttgtctacggaatctagattcacttccaacatccatactgccgcttccgccacagctcatcaagccatcgtcgtaatacgccgtctccgccttgcttctatgccacttcaccacaccctctatcgacttagcagtacgcactcaacacataaggttctggaacggaacaatcctcccctctccgacccaaccgccgatcgagcactagccggaattacacactaagacgaacgacaagtacgtagaccttgaagcccataggctgtgcaacacctcacaacacctcaacatctaaaccatcactttatttgcatcctcaaccacctgcgcctcatcggctacgtcgccgcccaaccctacatccagtatttacgcgatccattcgcaccgagcatcgggtatacctctcgagatggcttcctcctcgacacagactcccctcctctactcgtgcatagcgcacaactcgaccatcctctccgagtgcaccacctcggcctcctccaatacctcctctctcgcctcgctcatcctgcccaagatctcgcactcaagcccgcagaagctcacctacacccacggcgacaagtacatccactacatatccgaggctccatcctcctatccagacaatgcctccgccggcggcttgacataccttgtcgtcgccgactcctccctcggccggcgcgtgcccttcggctttctcttcgagattaagaaccgcttcctccgcgagttcgacgagaacagcaccgacttcgccgatctgcccaactacggcgccggcagcttcaactccaccctcaagaacctcatggtcgactatggcaccacctccggcggtcgcgacgacgccatctccaatgttcagcgcgagatcgacgacgtgcgcggcatcatgaccaagaacatcgagggcttgctcgagcgcggcgagcgcatcgatctgcttgtcgacaagactgatcgtcttggtggcagcgcccgagagttccgcgtccgcagccgtggcctcaagaggcagatgtggtggaagaacgtcaagctcatggccatgctcgtcgtcgttctgctgctgatcattgtcgctatcgtcatcgccgttaagaatgcaaccggttagccagttgcaaacggggatagggtagatttcctaggctaagatttgtctgactgattatcggcaaagaagaatgtacgacgggcgatgcacgttttggattttcaatcaggggcgcgggcgtaatggctattgaaactatttctgggacggtgcttcaagaccttaggtacacaaaagggagccatgctataccggccatcactcattttcgactcgatgtctttatgtcgtcgttgctgatacctgtagctgcggctggtgctttctcgattgtattattctagcgtgtaaatacagtatgcttatttgttcatcgttgactgaccgtatacaccttttaaagtgtataacgcttatatcatcgtctcatggtaccttaagcccagcctcttaaagttgtcccatcatttgccttcatgcaaatgtagatatgtagctatatagactaatacttgcaaaagtcgactttctcccacgactcatgccccttccccttataccaaaatctcgagatcactatctcataacattggcccaccaccaccccgtctcatcagccgctccgggcagtatacatatccctgcgctacgggacttgaattcggcgccggtattaacggtaatgcattcgtcggccgttgcagtcgcgtcgtgaagaagacggggtggagactagatacatctctgcttgtgggaactggcattggagaggggacttgaaagtgccggtcccagattgcgtggaaatttggtggtggaggcatgaaaatcctggtttcgtgtgtggttgtgagagttgaggtttggcgtgaggtctgagttgggtgagtgagggagtgagtgacgtgggtgaggaagagacgctatgaattggctgggactaagcgttggtatggttatatcttctcagtgggataggtatttacgaagaatttgcatttctcctcatcctaatgccgtgatgatttaaatgacgaagtaaagtgaaccgcattcttctgcttcataaagagctatgatcggagcatcgtcccgaggctctggtgatgaccccgagaacccccaacttgcca

SEQ ID NO: 7886 - DNA, 1275 bp, Muscodor strobelii
  misc_feature: SGI cDNA ID NO. 562403
  misc_feature: Reduced expression when VOC is produced
  misc_feature: Encodes the peptide sequence at SEQ ID NO 7887
atgcccgtcccgttcatcgtcgacgcctacatcaatggactgcctgagtgggtgcccgaatgggccaaaaacccttggatactactgcaaatagccgttgtcgcctttgtcctgtactctactaagagatacagctctggtacggcaaatacgtcagagcgggacatgcacggcagggtggtcatgatcacaggaggcacgtctggaataggagctgccgttgcacgagagcttgcacagcgcggcgcgcaaatcatacttctcacccgcttatcaccgtccgacccctttcttgccgattacataggagacctgcgcctgcgcaccgagaatcagatgatctacgccgaacaagtcgatctcacctcgctctacgaaatccgccgctttgctacgaagtggatcgacaatgcgcccccgagacgactcgatatgttgatactctgcgccaatactcttgcgcctgctgggcaaatacgtatggagaccaaagaaggcatcgaggaaatgtggatggtcaattatctcgccaacttccatctcctaagcatcttgagcccggcgctccgtgctcagccattcgaccgcgacgttcgcatcatcatcccgacatgttcttcctacattgccgcacctggactgggcgatgcgctggatcggaaaaagtggtcgccgggaacggcctatgccaggagtaagctggctctgatggtctttgggcaggcttaccagaagcatctcgatgcgtacaagagaccagaccagctacccatgaactctcgggtcattttcgtggatcctggcttggcgcgaacgcccggcatgcgaagatggcttacacgaggctcgatctcggggctggtcgtctattgcgccgcctacttcctgccctggctgttgttgaaaagcgcagacatgggtgcgcagtctatattatatgcggctatggaggctgatctaggaagaggcgttggagggaggttgatcaaggaatgtatggaagtagacttcgcaagaggcgatgtcaaaaacgaggatatcgcgaagcaactgtgggagtcaagcgacaagctgatcgaagagacggagaaagaacaggctaaagtgagagcggcagagaagaaacaaaaggagacagatgataagaaaaagaaggaaaacgagcaagccgaagagatagatgctctggtagatacgataaaaaagggcaaagcggctgagaagaagccttcgcgcagacagaagaagaaagccaatgcggaaaaggcgcaatag

SEQ ID NO: 7887 - protein, 424 aa, Muscodor strobelii
  misc_feature: SGI Peptide ID NO. 562403
  misc_feature (59)..(248): Pfam Id: PF00106 Pfam Desc: short chain dehydrogenase
  misc_feature (59)..(100): Pfam Id: PF00106 Pfam Desc: short chain dehydrogenase
  misc_feature (60)..(89): Pfam Id: PF08659 Pfam Desc: KR domain
  misc_feature (1)..(422): NCBI GI: 116196282 Blast Desc: CHGG_04739 [Chaetomium globosum CBS 148.51] gi|88180652|gb|EAQ88120.1| CHGG_04739 [Chaetomium globosum CBS 148.51]
  misc_feature (1)..(407): NCBI GI: 171690324 Blast Desc: protein product [Podospora anserina] gi|170945110|emb|CAP71221.1| protein product [Podospora anserina]
  misc_feature (1)..(422): NCBI GI: 85107570 Blast Desc: NCU06369 [Neurospora crassa OR74A] gi|28924008|gb|EAA33167.1| conserved [Neurospora crassa OR74A]
  misc_feature (24)..(405): NCBI GI: 145613403 Blast Desc: MGG_01680 [Magnaporthe grisea 70-15] gi|145020480|gb|EDK04609.1| MGG_01680 [Magnaporthe grisea 70-15]
  misc_feature (1)..(364): NCBI GI: 256731167 Blast Desc: [Nectria haematococca mpVI 77-13-4]
  misc_feature (1)..(416): NCBI GI: 156049089 Blast Desc: SS1G_08251 [Sclerotinia sclerotiorum 1980] gi|154692650|gb|EDN92388.1| SS1G_08251 [Sclerotinia sclerotiorum 1980]
  misc_feature (1)..(416): NCBI GI: 154299798 Blast Desc: BC1G_11525 [Botryotinia fuckeliana B05.10] gi|150857215|gb|EDN32407.1| BC1G_11525 [Botryotinia fuckeliana B05.10]
  misc_feature (1)..(363): NCBI GI: 46122985 Blast Desc: FG05870.1 [Gibberella zeae PH-1]
  misc_feature (1)..(418): NCBI GI: 145249334 Blast Desc: An14g03810 [Aspergillus niger] gi|134081684|emb|CAK46618.1| protein product [Aspergillus niger]
  misc_feature (1)..(419): NCBI GI: 119479165 Blast Desc: oxidoreductase, short chain dehydrogenase/reductase family [Neosartorya fischeri NRRL 181] gi|119407765|gb|EAW17714.1| oxidoreductase, short chain family
  misc_feature (59)..(275): SWISSPROT Homolog: EC 1.1.1.102 3-dehydrosphinganine reductase
  misc_feature: Useful for introducing or modulating the production of volatile compounds
MPVPFIVDAYINGLPEWVPEWAKNPWILLQIAVVAFVLYSTKRYSSGTANTSERDMHGRVVMITGGTSGIGAAVARELAQRGAQIILLTRLSPSDPFLADYIGDLRLRTENQMIYAEQVDLTSLYEIRRFATKWIDNAPPRRLDMLILCANTLAPAGQIRMETKEGIEEMWMVNYLANFHLLSILSPALRAQPFDRDVRIIIPTCSSYIAAPGLGDALDRKKWSPGTAYARSKLALMVFGQAYQKHLDAYKRPDQLPMNSRVIFVDPGLARTPGMRRWLTRGSISGLVVYCAAYFLPWLLLKSADMGAQSILYAAMEADLGRGVGGRLIKECMEVDFARGDVKNEDIAKQLWESSDKLIEETEKEQAKVRAAEKKQKETDDKKKKENEQAEEIDALVDTIKKGKAAEKKPSRRQKKKANAEKAQ

SEQ ID NO: 7888 - DNA, 1584 bp, Muscodor strobelii
  misc_feature: SGI EST ID NO. CUFF.19514.0
  misc_feature: Variant of the nucleotide sequence at SEQ ID NO 7886
aaattgccatctaaaaacccacatcctgttcacaatgcgataagatcctgagcattgtgattttccgccttttttctttttctccctttcctcttctcctccggtgtatttcgacttggtccgtctcttgcctcaccctcgttgctgccacaatgcccgtcccgttcatcgtcgacgcctacatcaatggactgcctgagtgggtgcccgaatgggccaaaaacccttggatactactgcaaatagccgttgtcgcctttgtcctgtactctactaagagatacagctctggtacggcaaatacgtcagagcgggacatgcacggcagggtggtcatgatcacaggaggcacgtctggaataggagctgccgttgcacgagagcttgcacagcgcggcgcgcaaatcatacttctcacccgcttatcaccgtccgacccctttcttgccgattacataggagacctgcgcctgcgcaccgagaatcagatgatctacgccgaacaagtcgatctcacctcgctctacgaaatccgccgctttgctacgaagtggatcgacaatgcgcccccgagacgactcgatatgttgatactctgcgccaatactcttgcgcctgctgggcaaatacgtatggagaccaaagaaggcatcgaggaaatgtggatggtcaattatctcgccaacttccatctcctaagcatcttgagcccggcgctccgtgctcagccattcgaccgcgacgttcgcatcatcatcccgacatgttcttcctacattgccgcacctggactgggcgatgcgctggatcggaaaaagtggtcgccgggaacggcctatgccaggagtaagctggctctgatggtctttgggcaggcttaccagaagcatctcgatgcgtacaagagaccagaccagctacccatgaactctcgggtcattttcgtggatcctggcttggcgcgaacgcccggcatgcgaagatggcttacacgaggctcgatctcggggctggtcgtctattgcgccgcctacttcctgccctggctgttgttgaaaagcgcagacatgggtgcgcagtctatattatatgcggctatggaggctgatctaggaagaggcgttggagggaggttgatcaaggaatgtatggaagtagacttcgcaagaggcgatgtcaaaaacgaggatatcgcgaagcaactgtgggagtcaagcgacaagctgatcgaagagacggagaaagaacaggctaaagtgagagcggcagagaagaaacaaaaggagacagatgataagaaaaagaaggaaaacgagcaagccgaagagatagatgctctggtagatacgataaaaaagggcaaagcggctgagaagaagccttcgcgcagacagaagaagaaagccaatgcggaaaaggcgcaataggggggacccgtggcagataaccaagcatagacttacttgctaaaacactgggataaaaacgagtcaaaactgtatatgattactggatcttcaagatttatgtttgccaattcacttgtctatacaccaaaccagcggacggttgtctcaaaacgcc

SEQ ID NO: 7889 - DNA, 693 bp, Muscodor strobelii
  misc_feature: SGI cDNA ID NO. 562404
  misc_feature: Encodes the peptide sequence at SEQ ID NO 7890
atgtcaaatgacagagtgtccagcggcgacgaccaggacgaagtgccactccatcgtatacgcccatttggatcaggcctcaaacgcaagagagttgtctttgtaccagcttctaaagacagccaggaatcagacagcacagcgtcctcgaaaccctctccatcagtttcggacatgtacctaagtttggtgctcccaggcaaagacgcggagtccgctgctccggaggagtcgaagacgaacggacagtctatttgtgagatctgccaattaccaacagacaccggttcagcagtggtagccactggcaaatcatcaagcaggccacatgaagcatccatagcacatcaggtctgtctatcgcattctcacccgccgtcggccgtggaccggtcgcggatgggactcgcggtgttaaagtctcagggatgggatccagatgcccggcaaggactcggggcttccaacgatggcacgcagttccccatcaagacaaagcccaaacacgacacacttgggcttggggttcaagtgcccaagaatctcgcaatctacaaaaaggaagacaaggtacaaaagattggggcgaagacggcgcgtaagctggcagcggaagacaagaaacgccatgaacaactccggcgccagttctatggaaacgacgatgtagaaagatatttggggcggcaatga

SEQ ID NO: 7890 - protein, 230 aa, Muscodor strobelii
  misc_feature: SGI Peptide ID NO. 562404
  misc_feature (131)..(177): Pfam Id: PF01585 Pfam Desc: G-patch domain
  misc_feature (7)..(227): NCBI GI: 154299796 Blast Desc: BC1G_11524 [Botryotinia fuckeliana B05.10] gi|150857214|gb|EDN32406.1| BC1G_11524 [Botryotinia fuckeliana B05.10]
  misc_feature (15)..(228): NCBI GI: 261359767 Blast Desc: conserved [Verticillium albo-atrum VaMs.102]
  misc_feature (11)..(227): NCBI GI: 256727358 Blast Desc: NECHADRAFT_18818 [Nectria haematococca mpVI 77-13-4]
  misc_feature (10)..(228): NCBI GI: 154286232 Blast Desc: [Ajellomyces capsulatus NAm1] gi|150407552|gb|EDN03093.1| [Ajellomyces capsulatus NAm1]
  misc_feature (10)..(228): NCBI GI: 240274876 Blast Desc: G-patch domain-containing protein [Ajellomyces capsulatus H143]
  misc_feature (10)..(228): NCBI GI: 261188652 Blast Desc: G-patch domain-containing protein [Ajellomyces dermatitidis SLH14081] gi|239593098|gb|EEQ75679.1| G-patch domain-containing protein [Ajellomyces dermatitidis SLH14081]
  misc_feature (6)..(228): NCBI GI: 225558446 Blast Desc: conserved [Ajellomyces capsulatus G186AR]
  misc_feature (10)..(228): NCBI GI: 145603336 Blast Desc: MGG_06114 [Magnaporthe grisea 70-15] gi|145011589|gb|EDJ96245.1| MGG_06114 [Magnaporthe grisea 70-15]
  misc_feature (14)..(228): NCBI GI: 116196284 Blast Desc: CHGG_04740 [Chaetomium globosum CBS 148.51] gi|88180653|gb|EAQ88121.1| CHGG_04740 [Chaetomium globosum CBS 148.51]
  misc_feature (5)..(229): NCBI GI: 85107566 Blast Desc: NCU06368 [Neurospora crassa OR74A] gi|28924007|gb|EAA33166.1| [Neurospora crassa OR74A]
MSNDRVSSGDDQDEVPLHRIRPFGSGLKRKRVVFVPASKDSQESDSTASSKPSPSVSDMYLSLVLPGKDAESAAPEESKTNGQSICEICQLPTDTGSAVVATGKSSSRPHEASIAHQVCLSHSHPPSAVDRSRMGLAVLKSQGWDPDARQGLGASNDGTQFPIKTKPKHDTLGLGVQVPKNLAIYKKEDKVQKIGAKTARKLAAEDKKRHEQLRRQFYGNDDVERYLGRQ

SEQ ID NO: 7891 - DNA, 1330 bp, Muscodor strobelii
  misc_feature: SGI EST ID NO. CUFF.19517.0
  misc_feature: Variant of the nucleotide sequence at SEQ ID NO 7889
taatgcattgctgcagatgggagcctgttatggtttaaagattggaaaccttgataataggttagaattctctcatcttctcaaattcacagatctgtaacttgagtgctgaaaataatccacaccatacttacattgttcttttctcctttggttccgtctccgtgcagacttgattgaagattacagttgacaatctaccttacattctctcatcagcaccttgagagtatcactctccgatatctaggatacgatgtcaaatgacagagtgtccagcggcgacgaccaggacgaagtgccactccatcgtatacgcccatttggatcaggcctcaaacgcaagagagttgtctttgtaccagcttctaaagacagccaggaatcagacagcacagcgtcctcgaaaccctctccatcagtttcggacatgtacctaagtttggtgctcccaggcaaagacgcggagtccgctgctccggaggagtcgaagacgaacggacagtctatttgtgagatctgccaattaccaacagacaccggttcagcagtggtagccactggcaaatcatcaagcaggccacatgaagcatccatagcacatcaggtctgtctatcgcattctcacccgccgtcggccgtggaccggtcgcggatgggactcgcggtgttaaagtctcagggatgggatccagatgcccggcaaggactcggggcttccaacgatggcacgcagttccccatcaagacaaagcccaaacacgacacacttgggcttggggttcaagtgcccaagaatctcgcaatctacaaaaaggaagacaaggtacaaaagattggggcgaagacggcgcgtaagctggcagcggaagacaagaaacgccatgaacaactccggcgccagttctatggaaacgacgatgtagaaagatatttggggcggcaatgagggccgtccgtggttagaattatgaatgatggatggctttacgactggcgttgtatgtacgagatctggcgcggcgtcacaaagataccccttttcactttgaaatgtgaaacatttgactgaattgcagtccgtattacctcacaaaggatgctgctgttacttgcatgatttgagtgagacgatagtgtgtcaggctaccattttgtccaccgctttgtcgtactgtatgggacgaatgataggttagaacgctttggaaatcctcaaatctctagtaggagaaaggtttgcaggaagtaccaggcatgcatgaggctacgccgttgatgcatccatccactcgtgcccttgtcctcgtttgttgattgtggatagagc

SEQ ID NO: 7892 - DNA, 2127 bp, Muscodor strobelii
  misc_feature: SGI cDNA ID NO. 562405
  misc_feature: Encodes the peptide sequence at SEQ ID NO 7893
atgggcgtgtccataattcaagaacagcacgacatcctaatccaggccatcaaacgattaactgccggcgactggaaaatcctcgtcgtcgatgagacgtccaaaaagataatcgacaatgtcgccaaagaagatgacatcctcaatcacaacatcgctaacatcgagcgcatcgaggagcgcagggaggcaaatcccactatggatgccatttacctcctctcgcccaaaccccacatcgtcgactgcctcgtagccgatatcgagcgacggagatacaagagatgtttactcgtatggactgcggttctagacccaccactcaggagacgtatcgacgcattgcccatggctcaacaggccatcgccagcttcgagaccttgtccatcgacttctatccccgcgagtcccacctcgtcacattcagagacccctggagcttccctattctctatcacccctcttgcaacgggctcgtaaagcagcacatgcaagacctggcgcaaaagatcacggctctttgcgtatcgttaggagagtatcccaaagttagatattaccggccacgaaatccgatccacgaggccagtgtgctttgtggtcatcttgcacgcttcgtctctgaggaactggaccagtatgcgcagtggaatcccaacttcccaccgcccacctcacgaccgcagggtgtactgctcattacggacagatcgatggatctgatggcccccttaatacacgagttcacctaccaggcaatggctcatgacctcctaccaattaaagacggtgataaagcgacgtttcacatgaagtttaatgagggcacgcccgaagccgaagagaaggacatcgaactttgcgacaaggacaaagtctgggtagacaatcggcacagacacatgaaagacaccatcgacaagttaatgggtgatttccagaaattcttggatgataaccctaattttaccaattcaaacagcaatgccaccagcataaatgcgatcaaggacatgatggtcggcctgccccagttcacggagatgaaggaagcctattctctccacctcacaatggcgcaagaatgtatggatatttttcagcatcataagctctccgagatgtcagcttcggaacaatgtatggcaactggcctcgacgaagaaaatcgtaaggctaagcacgttttggacggcgtggtccggttacttgacgacgaggctgtgaagaagaccgaccgtctacgtcttatcatcatgttccttctatatcgcgatggagtgatcccagaagacatcaagagattgttagcccacgcctcattaccagctcaggatggcgaggtcattgcgaatctagagcatcttggtgggcgaacggctcgcgggttgaaagagccccgtcgagacaacccgcccctttttccaatcgatactaaggttcccattccggaagacaattatctttcgaggttcaaccctgccgtaaaaggtatgctagagaacctttgcaggggtctcttagatcaagtctcttttccctacgtcaagccgcctctcgatccaaatgaagacgcattaattggccagggctcattgcgagctgccaaaccaagctgggctggtgcaggtcgaaaagtcgcagagaatagacagcggatcattgtattcatggcgggtggcgccacgttctcggaatcgcgggcctgctatgaggttggatcggccatgaaccgagatgtcgtcatggccaccagtcacatgctcacgcccgcgctgtttgttcggcaagttagtgacttaagcgtggacaaacgtagactggatattccgatggaacgcccgccacaaaaagcaccagcacatttattcgaacgtcccaaccctccaccatctgcccccgctcagcagtcagctccagggcggcgtcctgtcccacagggaggactaccaggcggtcctaaaataggaggtgccccaactccaccaacgcaacagatggccaacttgaacctgagcgcgaggcctccgaatggctccagtcagccatcttcttcccatagtgaaaagccgcaaaagctagagaaggagaagaagaaacgaaaccttttcggcatcaaaaagtaa

SEQ ID NO: 7893 - protein, 708 aa, Muscodor strobelii
  misc_feature: SGI Peptide ID NO. 562405
  misc_feature (25)..(598): Pfam Id: PF00995 Pfam Desc: Sec1 family
  misc_feature (25)..(473): Pfam Id: PF00995 Pfam Desc: Sec1 family
  misc_feature (552)..(598): Pfam Id: PF00995 Pfam Desc: Sec1 family
  misc_feature (25)..(626): NCBI GI: 145612411 Blast Desc: MGG_12345 [Magnaporthe grisea 70-15] gi|145019577|gb|EDK03805.1| MGG_12345 [Magnaporthe grisea 70-15]
  misc_feature (55)..(708): NCBI GI: 256727357 Blast Desc: [Nectria haematococca mpVI 77-13-4]
  misc_feature (1)..(708): NCBI GI: 46136341 Blast Desc: FG09686.1 [Gibberella zeae PH-1]
  misc_feature (1)..(625): NCBI GI: 154299792 Blast Desc: BC1G_11522 [Botryotinia fuckeliana B05.10] gi|150857212|gb|EDN32404.1| BC1G_11522 [Botryotinia fuckeliana B05.10]
  misc_feature (25)..(708): NCBI GI: 85108189 Blast Desc: NCU08312 [Neurospora crassa OR74A] gi|28924133|gb|EAA33289.1| conserved [Neurospora crassa OR74A]
  misc_feature (2)..(626): NCBI GI: 171690506 Blast Desc: protein product [Podospora anserina] gi|170945201|emb|CAP71312.1| protein product [Podospora anserina]
  misc_feature (2)..(673): NCBI GI: 169611104 Blast Desc: SNOG_08661 [Phaeosphaeria nodorum SN15] gi|160702222|gb|EAT83829.2| SNOG_08661 [Phaeosphaeria nodorum SN15]
  misc_feature (4)..(626): NCBI GI: 242777750 Blast Desc: Sec1 family superfamily [Talaromyces stipitatus ATCC 10500] gi|218722716|gb|EED22134.1| Sec1 family superfamily [Talaromyces stipitatus ATCC 10500]
  misc_feature (1)..(686): NCBI GI: 238506897 Blast Desc: Sec1 family superfamily [Aspergillus flavus NRRL3357] gi|220689363|gb|EED45714.1| Sec1 family superfamily [Aspergillus flavus NRRL3357]
  misc_feature (4)..(626): NCBI GI: 259482437 Blast Desc: TPA: Sec1 family superfamily (AFU_orthologue; AFUA_5G10810) [Aspergillus nidulans FGSC A4]
MGVSIIQEQHDILIQAIKRLTAGDWKILVVDETSKKIIDNVAKEDDILNHNIANIERIEERREANPTMDAIYLLSPKPHIVDCLVADIERRRYKRCLLVWTAVLDPPLRRRIDALPMAQQAIASFETLSIDFYPRESHLVTFRDPWSFPILYHPSCNGLVKQHMQDLAQKITALCVSLGEYPKVRYYRPRNPIHEASVLCGHLARFVSEELDQYAQWNPNFPPPTSRPQGVLLITDRSMDLMAPLIHEFTYQAMAHDLLPIKDGDKATFHMKFNEGTPEAEEKDIELCDKDKVWVDNRHRHMKDTIDKLMGDFQKFLDDNPNFTNSNSNATSINAIKDMMVGLPQFTEMKEAYSLHLTMAQECMDIFQHHKLSEMSASEQCMATGLDEENRKAKHVLDGVVRLLDDEAVKKTDRLRLIIMFLLYRDGVIPEDIKRLLAHASLPAQDGEVIANLEHLGGRTARGLKEPRRDNPPLFPIDTKVPIPEDNYLSRFNPAVKGMLENLCRGLLDQVSFPYVKPPLDPNEDALIGQGSLRAAKPSWAGAGRKVAENRQRIIVFMAGGATFSESRACYEVGSAMNRDVVMATSHMLTPALFVRQVSDLSVDKRRLDIPMERPPQKAPAHLFERPNPPPSAPAQQSAPGRRPVPQGGLPGGPKIGGAPTPPTQQMANLNLSARPPNGSSQPSSSHSEKPQKLEKEKKKRNLFGIKK

SEQ ID NO: 7894 - DNA, 3036 bp, Muscodor strobelii
  misc_feature: SGI EST ID NO. CUFF.19563.0
  misc_feature: Variant of the nucleotide sequence at SEQ ID NO 7892
attggcggggaagcttgattttgggcccctaaacaatggcatctctcgaagcttggcgactggttgaaacgcccacgtctgaaccccccgccataaggagccaagaaagtggcacgctgcgctgtccatcctcattccgagccgccctttgcattgtctcgcctcgccagccttgctgcatgccacctctcgtctcccgacgccttgtaccgctctcctcatactgtagggttctggtccctttaacgtctttctgaccgtatcctcgcgtgtgcgctccaggccaaacgtcatcgtgcatgcgtcgtcatcgtcgttgacgtcgctccctctcccacacccactaccgaacctcgactgcgaagcccagcgaccaagcatctgatcccgtgcgaaacactcctgctacgatatcgagtaggcgttggtggcccgtcgaaatctcgagagattgctgtggcttctagcccaagtcgaccgtcaagatgggcgtgtccataattcaagaacagcacgacagtgagcaaccaccgcgcatcacactctgaagacttagacagctctgcatacctgaccattgctcccgtggctcgcagtcctaatccaggccatcaaacgattaactgccggcgactggaaaatcctcgtcgtcgatgagacgtccaaaaagataatcgacaatgtcgccaaagaagatgacatcctcaatcacaacatcgctaacatcgagcgcatcgaggagcgcagggaggcaaatcccactatggatgccatttacctcctctcgcccaaaccccacatcgtcgactgcctcgtagccgatatcgagcgacggagatacaagagatgtttactcgtatggactgcggttctagacccaccactcaggagacgtatcgacgcattgcccatggctcaacaggccatcgccagcttcgagaccttgtccatcgacttctatccccgcgagtcccacctcgtcacattcagagacccctggagcttccctattctctatcacccctcttgcaacgggctcgtaaagcagcacatgcaagacctggcgcaaaagatcacggctctttgcgtatcgttaggagagtatcccaaagttagatattaccggccacgaaatccgatccacgaggccagtgtgctttgtggtcatcttgcacgcttcgtctctgaggaactggaccagtatgcgcagtggaatcccaacttcccaccgcccacctcacgaccgcagggtgtactgctcattacggacagatcgatggatctgatggcccccttaatacacgagttcacctaccaggcaatggctcatgacctcctaccaattaaagacggtgataaagcgacgtttcacatgaagtttaatgagggcacgcccgaagccgaagagaaggacatcgaactttgcgacaaggacaaagtctgggtagacaatcggcacagacacatgaaagacaccatcgacaagttaatgggtgatttccagaaattcttggatgataaccctaattttaccaattcaaacagcaatgccaccagcataaatgcgatcaaggacatgatggtcggcctgccccagttcacggagatgaaggaagcctattctctccacctcacaatggcgcaagaatgtatggatatttttcagcatcataagctctccgagatgtcagcttcggaacaatgtatggcaactggcctcgacgaagaaaatcgtaaggctaagcacgttttggacggcgtggtccggttacttgacgacgaggctgtgaagaagaccgaccgtctacgtcttatcatcatgttccttctatatcgcgatggagtgatcccagaagacatcaagagattgttagcccacgcctcattaccagctcaggatggcgaggtcattgcgaatctagagcatcttggtgggcgaacggctcgcgggttgaaagagccccgtcgagacaacccgcccctttttccaatcgatactaaggttcccattccggaagacaattatctttcgaggttcaaccctgccgtaaaaggtatgctagagaacctttgcaggggtctcttagatcaagtctcttttccctacgtcaagccgcctctcgatccaaatgaagacgcattaattggccagggctcattgcgagctgccaaaccaagctgggctggtgcaggtcgaaaagtcgcagagaatagacagcggatcattgtattcatggcgggtggcgccacgttctcggaatcgcgggcctgctatgaggttggatcggccatgaaccgagatgtcgtcatggccaccagtcacatgctcacgcccgcgctgtttgttcggcaagttagtgacttaagcgtggacaaacgtagactggatattccgatggaacgcccgccacaaaaagcaccagcacatttattcgaacgtcccaaccctccaccatctgcccccgctcagcagtcagctccagggcggcgtcctgtcccacagggaggactaccaggcggtcctaaaataggaggtgccccaactccaccaacgcaacagatggccaacttgaacctgagcgcgaggcctccgaatggctccagtcagccatcttcttcccatagtgaaaagccgcaaaagctagagaaggagaagaagaaacgaaaccttttcggcatcaaaaagtaatgcctttaaaacagcaagacgatggaccctgctgtataatctaaagttgggattttgcgacaaattggctaaccgagacatttcccggctagagcctggagagctgttggattggatgacctctcggggtagttgtgtgtctttggttttacgatcacataatatgctcttcccctgtctacaaatgcagaaacgagcgtgattcgagacgaataatccatcagcaagtatggcgttgcggagtcaagaataataatgagcgttcacgtagaagtataacgcatcttgagcttaaagggagaagatgaaccacgtagcataattactcaatagaataacgatacctg

SEQ ID NO: 7895 - DNA, 1812 bp, Muscodor strobelii
  misc_feature: SGI cDNA ID NO. 562406
  misc_feature: Encodes the peptide sequence at SEQ ID NO 7896
atgctacacctatcctctagtcgatacaattttcccagccttctacataacggttcttggtggtggtggtgggaaatcggtgccgtgatctcgagcttcctgagtggtgctctggtcatcatcttgctcctcaaagttgatcaaataccagtcacaagctggggccttgcaattcaaccgaactcccttctgtctcttttgaccacgatttcgaaaacatcgttacttgtcccggtagcttcgtgcatcagtcagctaaaatggagacacttctcgcttcggccgcagccactggaccagcttcaggttttcgaggatgcgagtcggggtccttggggatctttcatccttttctccaagtttatcttcaagacccgggctcgtgtgatcctggcactggccatcgccaacgtgatagctatagggatcgagtctagcacgcagcaagttatagggcttgtgagcaaagaggtacgaatggccaacaagacagttttggctagccgcgccgaagcatacttctcaagggtctgggatggaggagactattatacatccgatccactaggataccaaattggcatcggccctccatatcgctctgacaataattttcgaagccaagcaaagagagccaagaacgcgttaacactcgaggcaatagtctataatgctcttgcagaaactagccctatgagtttttacacttgtcctccgcccgcttacgaatgttattgggctgatttttctaccatgggattttgcactcggtaccgcaacataacgcagactacaaagcagacttgcgagcttaatcattctaggaacgacacttcatctgatatgtcatttgaggcctgggatggcaattgcagtttttggagtgaagatctaaataccgacagcggattattcagcccaatcttgttcgaatggagaaaacccccaagaccttccctgattataggcaaaactccaagaccctcacaaagtgaaggcgccgtcttcgaaagtagatggatcgaccaatacaactcgcatatggaatataacttgggatctatttggactatcaaagttcacaatatcaccgacagtctccgcggatcgtcctatcatttcttcgaatcggcaattgtggactattattggtgtcagaaagatctccgcgccatcacagcttcccaggcaggattcaatgttaacttgacaaatagacctcaccttggcgccggcaatatcaacaatatatcaccagcggtacaatggggcataagcgaggtgctgcaaaagctcattggaacaaaactcatctctgacacttcaggttatcatgccgcaaactattcgcaccagttcgacaccgacattaagattgcctggttctactacctcaacgacattgcgactgccgcaaacaatctcgccgatgccttaactgcgttcatgctcgacccaaatggtgacaatttgaatgtcacgacggtgaccggattcatgatctacaaggaaacacatttccaagttgaatggccatggctaagcgttttggttttcgaaacactattaatcagcttgctgctcgcactcaccatacacatctcaagaggtcagccattgctcaaaaattcgaccatggcgcttctcacctacaccatatcaggttggaaagaagaagaactcattgtctccaatccggaggaaatggagaagtgggttcgcctttcaagaaacatggaagcccaatttggtacagatgatagggggttgacgagattccataggaccaccgggaatttccttagtcgataa

SEQ ID NO: 7896 - protein, 603 aa, Muscodor strobelii
  misc_feature: SGI Peptide ID NO. 562406
  misc_feature (21)..(595): NCBI GI: 256726548 Blast Desc: NECHADRAFT_79608 [Nectria haematococca mpVI 77-13-4]
  misc_feature (20)..(589): NCBI GI: 256726092 Blast Desc: [Nectria haematococca mpVI 77-13-4]
  misc_feature (18)..(270): NCBI GI: 238495102 Blast Desc: conserved [Aspergillus flavus NRRL3357] gi|220695437|gb|EED51780.1| conserved [Aspergillus flavus NRRL3357]
  misc_feature (22)..(269): NCBI GI: 255941378 Blast Desc: Pc16g11550 [Penicillium chrysogenum Wisconsin 54-1255] gi|211586081|emb|CAP93825.1| Pc16g11550 [Penicillium chrysogenum Wisconsin 54-1255]
  misc_feature (22)..(269): NCBI GI: 169785503 Blast Desc: [Aspergillus oryzae RIB40] gi|83775960|dbj|BAE66079.1| protein product [Aspergillus oryzae]
  misc_feature (22)..(188): NCBI GI: 145612273 Blast Desc: MGG_08207 [Magnaporthe grisea 70-15] gi|145019468|gb|EDK03696.1| MGG_08207 [Magnaporthe grisea 70-15]
  misc_feature (30)..(227): NCBI GI: 212536987 Blast Desc: PMAA_091110 [Penicillium marneffei ATCC 18224] gi|210068391|gb|EEA22482.1| PMAA_091110 [Penicillium marneffei ATCC 18224]
  misc_feature (22)..(311): NCBI GI: 145243784 Blast Desc: An11g04090 [Aspergillus niger] gi|134079085|emb|CAK48394.1| protein product [Aspergillus niger]
  misc_feature (24)..(276): NCBI GI: 238844770 Blast Desc: conserved [Microsporum canis CBS 113480]
  misc_feature (2)..(175): NCBI GI: 170940326 Blast Desc: protein product [Podospora anserina]
MLHLSSSRYNFPSLLHNGSWWWWWEIGAVISSFLSGALVIILLLKVDQIPVTSWGLAIQPNSLLSLLTTISKTSLLVPVASCISQLKWRHFSLRPQPLDQLQVFEDASRGPWGSFILFSKFIFKTRARVILALAIANVIAIGIESSTQQVIGLVSKEVRMANKTVLASRAEAYFSRVWDGGDYYTSDPLGYQIGIGPPYRSDNNFRSQAKRAKNALTLEAIVYNALAETSPMSFYTCPPPAYECYWADFSTMGFCTRYRNITQTTKQTCELNHSRNDTSSDMSFEAWDGNCSFWSEDLNTDSGLFSPILFEWRKPPRPSLIIGKTPRPSQSEGAVFESRWIDQYNSHMEYNLGSIWTIKVHNITDSLRGSSYHFFESAIVDYYWCQKDLRAITASQAGFNVNLTNRPHLGAGNINNISPAVQWGISEVLQKLIGTKLISDTSGYHAANYSHQFDTDIKIAWFYYLNDIATAANNLADALTAFMLDPNGDNLNVTTVTGFMIYKETHFQVEWPWLSVLVFETLLISLLLALTIHISRGQPLLKNSTMALLTYTISGWKEEELIVSNPEEMEKWVRLSRNMEAQFGTDDRGLTRFHRTTGNFLSR

SEQ ID NO: 7897 - DNA, 2337 bp, Muscodor strobelii
  misc_feature: SGI cDNA ID NO. 562407
  misc_feature: Encodes the peptide sequence at SEQ ID NO 7898
atggccaaactatatacatcagaagagctcatattcttgagagaatccccgctatgcgtcaaacccaccggtctccctcctgctgaggagtggatgggaccgccccctgagaacaaccgcaacagccaaggaggcaggactggcaccgacaggaaccgccagaatgaaggtggcctgttggaccagaacaatcggcgccctggcgtcgatagacacgtgtcgcggaacagtactaatcctgaggatatcgtcctcggcccaccacgaacaatgttcaattcaacgttatcgagaaccgcgaagcccttcgacagcgacaaggctactaaggacaccgacgctcgagatcgcttcgcattccgtcctcgaaccggagatgctgatgccaatgaacgtttcagagaccgcgacggcaaaggcaatttccgtcgtcgcggcgatggcgatcaggacggcgaaggctggagcacggtgaagccacgcaagagtttcggcgcggaaggcgctgagcgatttgccgggcgtatgggcgagcgccccgaccggctcctgggagatcgccgaccgcgtgaaggagaagaacgagacaacaatgccgaacgcccccggcgcaactttggtgaatttgcacgagagaaggagggcgatgacggcgacaaactgcgcagaaacggtctgactaggaatcgatcggatctgccatggaccagagagcccaaagagactaccgaaagcccccagccgcgagagcgctttgatcgctcgaagagctggagggacagaaccgcggatgagcatgcagacatgcaacacgacaggcccaaccaacggcagtacgatcgccgatgggatcgggatcagcgtcaagagcgcgagcccgaatggctggacgagtcgatcgaagagccacctcaagcgcacaccacggaagatttcaagaagttcatggaaagcatgaaggggaaaacctcggccagagccgaacaagcgccgacattggcgatggatgttctcaagtccggagagagacccgatactgacgagacgaagtcgaagtcgatcaagtctacgcctgcgcttgagctagggccagacaagtttttcgctgccttctcccagaaacccgccgtggaaacagtgaaccacgaagtagctagggagaatgtgcctccgccagcgcaacccaaagcatcacgattccaaaacttcttctcatctcaagaggaagcccgtcgtctaccagaacctctggcccaagctgctcctcctcctccccaacctccggctatcaatccacttttagcaatggcaggcgtatcgacgcaacaagatagcgccgaaaaggtcgccttccaggctctgctgcagaagctgcagaagcaaacccctcaagcctctccgccgccatctggtggatttgcggaacctccctcaggcaacgactatggtaccaaaaacatcatgacatcgccgaaccactcacagtcctatggtcaagagcgccgcgatgaatacatgccccgcgctcctccccagggacaggagattcatgccccgagaccccaacagaacaaccattttacaacggcaatgcgcccagagcagcagatgttgcatgatttgatcggccagcgccacccgagccagaattcgggtaggagtcgaggtgagcagccatcaagtcgaaacagtaatcctaacacggagtttcttgtgtccttgatgcagcaaggtcgcaacccatcggaacccccgcgtaacgaacaattggtgatgagaatgccccaaccctcacgtccagctcagataccgccaaccccagaccgtgattcggacttccatcacgaacgaggctcgtcgcagcatcaagccggtggtcgcccgcaaggccctccgagctttttcgatgaaccgtctatgcaacgccgtgaaccagaagttcgcactcaacaacccacacatattctccagcgcccaggtcctcctggcctcgacatgatgaccccaaacaactggatgcagccaggtggtcagcagatgcccaaccccggccggcccatgattccaccacccggtcttcccggaaatccgcgtaacaatcagatacccggaaactatccgagtttccctatggggggctttcctccgccagatgcagtagctggcttacctccccgcaatatgggacctcctcccggcttttataatgcccctcctccgggtttgatgcatccgggaatgggcgggtttccaggtccggaaagcctagcctttggctttgatggcacccgcggaatgccgcccccgggcgccggtggtcctttccgtcggaactaa

SEQ ID NO: 7898 - protein, 778 aa, Muscodor strobelii
  misc_feature: SGI Peptide ID NO. 562407
  misc_feature (1)..(688): NCBI GI: 256726800 Blast Desc: NECHADRAFT_103345 [Nectria haematococca mpVI 77-13-4]
  misc_feature (1)..(665): NCBI GI: 116196092 Blast Desc: CHGG_04644 [Chaetomium globosum CBS 148.51] gi|88180557|gb|EAQ88025.1| CHGG_04644 [Chaetomium globosum CBS 148.51]
  misc_feature (1)..(777): NCBI GI: 46136343 Blast Desc: FG09687.1 [Gibberella zeae PH-1]
  misc_feature (5)..(702): NCBI GI: 171690538 Blast Desc: protein product [Podospora anserina] gi|170945217|emb|CAP71328.1| protein product [Podospora anserina]
  misc_feature (78)..(707): NCBI GI: 85107181 Blast Desc: NCU07685 [Neurospora crassa OR74A] gi|28923930|gb|EAA33091.1| NCU07685 [Neurospora crassa OR74A]
  misc_feature (37)..(473): NCBI GI: 145612415 Blast Desc: MGG_12346 [Magnaporthe grisea 70-15] gi|145019581|gb|EDK03809.1| MGG_12346 [Magnaporthe grisea 70-15]
  misc_feature (5)..(777): NCBI GI: 156049079 Blast Desc: SS1G_08246 [Sclerotinia sclerotiorum 1980] gi|154692645|gb|EDN92383.1| SS1G_08246 [Sclerotinia sclerotiorum 1980]
  misc_feature (225)..(677): NCBI GI: 261359765 Blast Desc: conserved [Verticillium albo-atrum VaMs.102]
  misc_feature (1)..(153): NCBI GI: 261359765 Blast Desc: conserved [Verticillium albo-atrum VaMs.102]
  misc_feature (1)..(711): NCBI GI: 119192734 Blast Desc: CIMG_00744 [Coccidioides immitis RS]
MAKLYTSEELIFLRESPLCVKPTGLPPAEEWMGPPPENNRNSQGGRTGTDRNRQNEGGLLDQNNRRPGVDRHVSRNSTNPEDIVLGPPRTMFNSTLSRTAKPFDSDKATKDTDARDRFAFRPRTGDADANERFRDRDGKGNFRRRGDGDQDGEGWSTVKPRKSFGAEGAERFAGRMGERPDRLLGDRRPREGEERDNNAERPRRNFGEFAREKEGDDGDKLRRNGLTRNRSDLPWTREPKETTESPQPRERFDRSKSWRDRTADEHADMQHDRPNQRQYDRRWDRDQRQEREPEWLDESIEEPPQAHTTEDFKKFMESMKGKTSARAEQAPTLAMDVLKSGERPDTDETKSKSIKSTPALELGPDKFFAAFSQKPAVETVNHEVARENVPPPAQPKASRFQNFFSSQEEARRLPEPLAQAAPPPPQPPAINPLLAMAGVSTQQDSAEKVAFQALLQKLQKQTPQASPPPSGGFAEPPSGNDYGTKNIMTSPNHSQSYGQERRDEYMPRAPPQGQEIHAPRPQQNNHFTTAMRPEQQMLHDLIGQRHPSQNSGRSRGEQPSSRNSNPNTEFLVSLMQQGRNPSEPPRNEQLVMRMPQPSRPAQIPPTPDRDSDFHHERGSSQHQAGGRPQGPPSFFDEPSMQRREPEVRTQQPTHILQRPGPPGLDMMTPNNWMQPGGQQMPNPGRPMIPPPGLPGNPRNNQIPGNYPSFPMGGFPPPDAVAGLPPRNMGPPPGFYNAPPPGLMHPGMGGFPGPESLAFGFDGTRGMPPPGAGGPFRRN

SEQ ID NO: 7899 - DNA, 3587 bp, Muscodor strobelii
  misc_feature: SGI EST ID NO. CUFF.19534.0
  misc_feature: Variant of the nucleotide sequence at SEQ ID NO 7897
gaggtcctattttcaattggaactggcaaggcgacctctggggtgactgctccttctgcctggctcgccaaccttgatatgacaacttggatgttgaccacattcaatcccaactccaataatcccatccgagagcaaacatcatcgccctcgccatcaccatcaccctaattcagatgaaacagccaacttcctacacaccaacatcatatatcatttacatccatcaataacgaagaggcagaaagagaagcgtccctggcgaaacctaataaactgtcgcaatacctgactcgtctgcttgggtcgcacgcttgcagcgctggtagcgacggtctccaaaccttctactagtcccaagggtatctgctcgtctggtatctggcacctgcaccaacaacacagagtccacctgcacacctcctggttcaccctgatcttgcgctcaccaataattcgtactcgacgcccaacaccaaaaatcaactttctccgagccatctagccctggccggctgccagcttcataaccatcgggatcctcctccagcccacagccatctctccggtaatcaagcccgcaaaaccccgcacgcattgagcatcgaccacaccaccttgcatcacttgcaccgcagcgcatttcgtgctgcgctgcgctgccgttccgccttgcgactccacagaggcgacctcgctcccaatccagcctcgccgccaccactcaccagtagacacacgcacatcacgcaccacatgcacacatcgccctaacataaatcacattttgtcttgtcgcctggagtcattccaccccgataccctaccattaacgtctcatctccgctgcacatctcggcctgatgctatggccaaactatatacatcagaagagctcatattcttgagagaatccccgctatgcgtcaaacccaccggtctccctcctgctgaggagtggatgggaccgccccctgagaacaaccgcaacagccaaggaggcaggactggcaccgacaggaaccgccagaatgaaggtggcctgttggaccagaacaatcggcgccctggcgtcgatagacacgtgtcgcggaacagtactaatcctgaggatatcgtcctcggcccaccacgaacaatgttcaattcaacgttatcgagaaccgcgaagcccttcgacagcgacaaggctactaaggacaccgacgctcgagatcgcttcgcattccgtcctcgaaccggagatgctgatgccaatgaacgtttcagagaccgcgacggcaaaggcaatttccgtcgtcgcggcgatggcgatcaggacggcgaaggctggagcacggtgaagccacgcaagagtttcggcgcggaaggcgctgagcgatttgccgggcgtatgggcgagcgccccgaccggctcctgggagatcgccgaccgcgtgaaggagaagaacgagacaacaatgccgaacgcccccggcgcaactttggtgaatttgcacgagagaaggagggcgatgacggcgacaaactgcgcagaaacggtctgactaggaatcgatcggatctgccatggaccagagagcccaaagagactaccgaaagcccccagccgcgagagcgctttgatcgctcgaagagctggagggacagaaccgcggatgagcatgcagacatgcaacacgacaggcccaaccaacggcagtacgatcgccgatgggatcgggatcagcgtcaagagcgcgagcccgaatggctggacgagtcgatcgaagagccacctcaagcgcacaccacggaagatttcaagaagttcatggaaagcatgaaggggaaaacctcggccagagccgaacaagcgccgacattggcgatggatgttctcaagtccggagagagacccgatactgacgagacgaagtcgaagtcgatcaagtctacgcctgcgcttgagctagggccagacaagtttttcgctgccttctcccagaaacccgccgtggaaacagtgaaccacgaagtagctagggagaatgtgcctccgccagcgcaacccaaagcatcacgattccaaaacttcttctcatctcaagaggaagcccgtcgtctaccagaacctctggcccaagctgctcctcctcctccccaacctccggctatcaatccacttttagcaatggcaggcgtatcgacgcaacaagatagcgccgaaaaggtcgccttccaggctctgctgcagaagctgcagaagcaaacccctcaagcctctccgccgccatctggtggatttgcggaacctccctcaggcaacgactatggtaccaaaaacatcatgacatcgccgaaccactcacagtcctatggtcaagagcgccgcgatgaatacatgccccgcgctcctccccagggacaggagattcatgccccgagaccccaacagaacaaccattttacaacggcaatgcgcccagagcagcagatgttgcatgatttgatcggccagcgccacccgagccagaattcgggtaggagtcgaggtgagcagccatcaagtcgaaacagtaatcctaacacggagtttcttgtgtccttgatgcagcaaggtcgcaacccatcggaacccccgcgtaacgaacaattggtgatgagaatgccccaaccctcacgtccagctcagataccgccaaccccagaccgtgattcggacttccatcacgaacgaggctcgtcgcagcatcaagccggtggtcgcccgcaaggccctccgagctttttcgatgaaccgtctatgcaacgccgtgaaccagaagttcgcactcaacaacccacacatattctccagcgcccaggtcctcctggcctcgacatgatgaccccaaacaactggatgcagccaggtggtcagcagatgcccaaccccggccggcccatgattccaccacccggtcttcccggaaatccgcgtaacaatcagatacccggaaactatccgagtttccctatggggggctttcctccgccagatgcagtagctggcttacctccccgcaatatgggacctcctcccggcttttataatgcccctcctccgggtttgatgcatccgggaatgggcgggtttccaggtccggaaagcctagcctttggctttgatggcacccgcggaatgccgcccccgggcgccggtggtcctttccgtcggaactaacgagcacacaccattgcttagtccttaaggctccctccagaacatgtatattttggtcgattaacttgggaatggtatggtcctccacgagatcgacatacgatacacgcgagatatgaagaaggacgtccaagtgttcgactctctaatcatgaggagactttgtgtgtacggaactcggtggtagacaaaccttatgcaaagagctcaagacggtaatgagctttcttgtactagtgagcagtatagatagtatcgcgccttgctcccttgcaaacattcagacgactaggcaagtcgtgctagcaaataagaccaccgttttcctccgatctaaatccattttgcctgatgcactacgttctacgtaacttgaatcttg

SEQ ID NO: 7900 - DNA, 1533 bp, Muscodor strobelii
  misc_feature: SGI cDNA ID NO. 562408
  misc_feature: Encodes the peptide sequence at SEQ ID NO 7901
atgtatctgcctcgcaacctcatatcacaactttatgctcagctccaaaggactcgccatcccctgtcgccgccggtcctcattctggtcgctctcgagcccgacgccctatgcgcatgccgcattctgacaagactcctcaaacatgactatataccacacaagatacaccccgtagctggatatggggatctggaacgcgctggccaggatctggttgctcccatgatggagaccagaggcggatccggcggtgttgtcgtatgcctcggagtcggtggcatggttgatatgggcaccatcttgggcctggagatcgagggcgaagaatcgagcttcaatggcgttcaggtttggatcattgactcccatcgaccctggaatctgggcaatgtcttcggtggtttccccctcgaacctgcttccgaatttgcatctagcttccaagcacgtgcacccgagggtgttagggccggacgtatcaaccgctcctacaagtcaggcaaaggcggtatcatcgtgttcgacgacggggatattgaagaggggcttaactcggaaagagatgcatacttggcgctggttgacatgccggaggtggaagacgatgggggagattatgacgccggtgactccgatagcgaacaggagcctgaggaagaaaatgaggttcggccgggtcaaaagcggaaatcctggtctgatcgggacgagagtagtgacgacgaggatgatcggccccggcaaaggcggcggagcaattcgtcaactccaattccaaattcgccttcgcgaccggcacaacgagggttattgtcactgcaggattcagcaccagcatttgacgatggggaagaaccaccatcgtcgcagcctcccaaggcaccttctgctcgaactttgcggaggcgacttatactaatgaaacgggaaaatgaaggtatactccgtaaatactatagaatgggaacctcctactcggaaccaatctctgctatgatatactcgctcgcctcggagctgggcagagaagacaacgacctgctatggctgactatcatcggtgtcacgtccatggagctctacggccgttcttcagctgggcttgcggtcacggttcgcaatgctgattcaaggctgattaacggctggatgggcgttcggggcgcacgaattagacaacttttaagagacgaagtccgccgtctcaatcccccagaattggcctcgagagacccgcgagtggcggcggcggaaggcgccgggatcatcccaacaaccgcccggagcccagaagatacaagcattcgattatcaccggaacccaaatttctactgatcagacactggagcttgtacgatagcatgctccactctccttatttattctcacggcttcgaatatggagcgaaagcggactgaaacgtttacataagctattggctaagatgggagtgagcttggtgcagtgcaaacagagctacactcatatggatatggtggtgaaaaaggattacgcacgaaacttctga

SEQ ID NO: 7901 - protein, 510 aa, Muscodor strobelii
  misc_feature: SGI Peptide ID NO. 562408
  misc_feature (25)..(510): Pfam Id: PF02724 Pfam Desc: CDC45-like protein
  misc_feature (395)..(504): Pfam Id: PF02724 Pfam Desc: CDC45-like protein
  misc_feature (25)..(134): Pfam Id: PF02724 Pfam Desc: CDC45-like protein
  misc_feature (311)..(368): Pfam Id: PF02724 Pfam Desc: CDC45-like protein
  misc_feature (1)..(505): NCBI GI: 261352259 Blast Desc: cell division control protein [Verticillium albo-atrum VaMs.102]
  misc_feature (1)..(505): NCBI GI: 171688376 Blast Desc: protein product [Podospora anserina] gi|170944150|emb|CAP70260.1| protein product [Podospora anserina]
  misc_feature (1)..(505): NCBI GI: 46136153 Blast Desc: FG09592.1 [Gibberella zeae PH-1]
  misc_feature (1)..(505): NCBI GI: 39951813 Blast Desc: MGG_01549 [Magnaporthe grisea 70-15] gi|145020607|gb|EDK04736.1| MGG_01549 [Magnaporthe grisea 70-15]
  misc_feature (1)..(505): NCBI GI: 85085215 Blast Desc: NCU04378 [Neurospora crassa OR74A] gi|28918547|gb|EAA28219.1| NCU04378 [Neurospora crassa OR74A]
  misc_feature (1)..(505): NCBI GI: 256727599 Blast Desc: NECHADRAFT_58328 [Nectria haematococca mpVI 77-13-4]
  misc_feature (1)..(505): NCBI GI: 40882245 Blast Desc: related to sna41 protein [Neurospora crassa]
  misc_feature (1)..(504): NCBI GI: 156061757 Blast Desc: SS1G_03024 [Sclerotinia sclerotiorum 1980] gi|154700425|gb|EDO00164.1| SS1G_03024 [Sclerotinia sclerotiorum 1980]
  misc_feature (1)..(505): NCBI GI: 240108533 Blast Desc: CDC45-like protein [Coccidioides posadasii C735 delta SOWgp]
  misc_feature (1)..(505): NCBI GI: 119186545 Blast Desc: CIMG_03320 [Coccidioides immitis RS]
MYLPRNLISQLYAQLQRTRHPLSPPVLILVALEPDALCACRILTRLLKHDYIPHKIHPVAGYGDLERAGQDLVAPMMETRGGSGGVVVCLGVGGMVDMGTILGLEIEGEESSFNGVQVWIIDSHRPWNLGNVFGGFPLEPASEFASSFQARAPEGVRAGRINRSYKSGKGGIIVFDDGDIEEGLNSERDAYLALVDMPEVEDDGGDYDAGDSDSEQEPEEENEVRPGQKRKSWSDRDESSDDEDDRPRQRRRSNSSTPIPNSPSRPAQRGLLSLQDSAPAFDDGEEPPSSQPPKAPSARTLRRRLILMKRENEGILRKYYRMGTSYSEPISAMIYSLASELGREDNDLLWLTIIGVTSMELYGRSSAGLAVTVRNADSRLINGWMGVRGARIRQLLRDEVRRLNPPELASRDPRVAAAEGAGIIPTTARSPEDTSIRLSPEPKFLLIRHWSLYDSMLHSPYLFSRLRIWSESGLKRLHKLLAKMGVSLVQCKQSYTHMDMVVKKDYARNF

SEQ ID NO: 7902 - DNA, 3835 bp, Muscodor strobelii
  misc_feature: SGI EST ID NO. CUFF.19542.0
  misc_feature: Variant of the nucleotide sequence at SEQ ID NO 7900
tttatctcccactgccagccacacatgcgttcaatgttcccagacagtctgatcgaactctaatggacaaactcacttgaccttcaatgtgtttcatcttgcattgacctatcacttcaacctgtgcagtattctgtagtattcatatcataatctttttctgaagattccgttccaagccaaggcgagcgcggcagcttgcaccgaaacacgaacccctccattcgcgccctatgaatctaccgtagaattcgatctcttactcacgcgttcagatactctcccagcatgtatctgcctcgcaacctcatatcacaactttatgctcagctccaaaggactcgccatcccctgtcgccgccggtcctcattctggtcgctctcgagcccgacgccctatgcgcatgccgcattctgacaagactcctcaaacatgactatataccacacaagatacaccccgtagctggatatggggatctggaacgcgctggccaggatctggttgctcccatgatggagaccagaggcggatccggcggtgttgtcgtatgcctcggagtcggtggcatggttgatatgggcaccatcttgggcctggagatcgagggcgaagaatcgagcttcaatggcgttcaggtttggatcattgactcccatcgaccctggaatctgggcaatgtcttcggtggtttccccctcgaacctgcttccgaatttgcatctagcttccaagcacgtgcacccgagggtgttagggccggacgtatcaaccgctcctacaagtcaggcaaaggcggtatcatcgtgttcgacgacggggatattgaagaggggcttaactcggaaagagatgcatacttggcgctggttgacatgccggaggtggaagacgatgggggagattatgacgccggtgactccgatagcgaacaggagcctgaggaagaaaatgaggttcggccgggtcaaaagcggaaatcctggtctgatcgggacgagagtagtgacgacgaggatgatcggccccggcaaaggcggcggagcaattcgtcaactccaattccaaattcgccttcgcgaccggcacaacgagggttattgtcactgcaggattcagcaccagcatttgacgatggggaagaaccaccatcgtcgcagcctcccaaggcaccttctgctcgaactttgcggaggcgacttatactaatgaaacgggaaaatgaaggtatactccgtaaatactatagaatgggaacctcctactcggaaccaatctctgctatgatatactcgctcgcctcggagctgggcagagaagacaacgacctgctatggctgactatcatcggtgtcacgtccatggagctctacggccgttcttcagctgggcttgcggtcacggttcgcaatgctgattcaaggctgattaacggctggatgggcgttcggggcgcacgaattagacaacttttaagagacgaagtccgccgtctcaatcccccagaattggcctcgagagacccgcgagtggcggcggcggaaggcgccgggatcatcccaacaaccgcccggagcccagaagatacaagcattcgattatcaccggaacccaaatttctactgatcagacactggagcttgtacgatagcatgctccactctccttatttattctcacggcttcgaatatggagcgaaagcggactgaaacgtttacataagctattggctaagatgggagtgagcttggtgcagtgcaaacagagctacactcatatggatatggtggtgaaaaaggattacgcacgaaacttctgaagtatgcttccttatataatctcgacgatatggtgcccgcggcggagacggatggtaaagatcgggctggagccaaagacggatggggctttgttcgaagttggggctggcgagccacgcttagtgctcaagacgtgggtgtggtgattggtgccttgctggaggttggaaggcacagtgccattatagacgaagaggggcgcatgcgtgccagccagacacaaggtattgaagatgatggcggtgttgctgaagcgcaagaatgggtaggacggttctgggaggcctatgatgcgctggaaaacattgatgctctcaaggcgggtctgccgaccgcacagtatcttcaccgagccatttttcggactgggacatcactcattggcaagcgccagatcaaacacttgaatgcattccggatgtgtgttatcaaggatggtcccgacgttcctcttttcactcatcccgctgctcttacgaagttagcgctctggattggcgaggctttggcagaacaggagaaagattccacgggaaagcttgctcatggaggtcgtggtacgccacttgtagtcgcgagcttaaatgaaaaaagaggagtatatgtggttgtcggcaccggcggtggaggtggcccggatcttatgttcttggaccgccaggattcaaaggagaagcaggctgccaaagctgccaaagccaaagagcgagaattaaaacgacgaaataaggaaaagatcagggaggagaagcgagctgcaagagccgcggcaggtgacgacgaagaagacgaggacgacactgagtcagagggcagcgaagcctcggattcagactcagacgcgggctcagaagacgaagaagaactacacaagggaagaggctacggtctcaacaaattcggcagcgcttttcaagacgtagtcaacgaaaccagcgctcgggtgcggatcgacagctttgaacactgcgtggtagaagtgcggaaagaggatcttagtgggttcctagaaagtctgtcgatgaaagctgttgttggataagccagctcaaggagaaggagtcgacggaactttctaccgtcgttccgcatgttgcattttgctttacggcgttggacgaacagtggcttggagcgatcattttcatcatgcatatacatctcctcgattcgaaaagttgcacagttgcaaaggatcgttttgtacggcgtggctcgggtgacgataatggacgacgatttgatttgcatggagacggtgttggcagagcttttgctttggccaaagctgaagctgaacataggaggcccgtatacaacgtttcacatgaagttgtgtgtgaatatataatgcatcttccattgtcacctcgcgcatctcgaattcctcatatcaaccttaacttggataaggtgatcatactcgtgatatataaaatgcatttaatgccaagaaagtatttcaataagcacgctcacgatttatgtcccagtggaggtagaagagtagcgtggcggagacacgaatatacagcactaggtagagagatagtcactgcgcctcatttgggcgatcgttttctaccagccattcccgtccagcttatgacgtcaaattcaacagctgtggccagcgatgcgcccacatctggcaattggatttgtccaatctttcattacgatgtctatgtccgcagcatagaaaggatcctcaaggatgttgagagtgagttcgaagtgatgaggcgacaacacacttatgctgtctgattgatgtcgtctaagtgttagatcctccacgtgggatcgttgatgacggcactaccccgccatccagccctaggactgctgggagatcgaggcaccttcccaccagcacccaagaggcatcatccttctcgacattgcaggtactaaccctaatggctgatgataggtaatataacatgcattcttatagatctcatctcttagtacctgtgaaggttcctcgtccgatacactcttccttcg

SEQ ID NO: 7903 - DNA, 1014 bp, Muscodor strobelii
  misc_feature: SGI cDNA ID NO. 562409
  misc_feature: Encodes the peptide sequence at SEQ ID NO 7904
atggtgcccgcggcggagacggatggtaaagatcgggctggagccaaagacggatggggctttgttcgaagttggggctggcgagccacgcttagtgctcaagacgtgggtgtggtgattggtgccttgctggaggttggaaggcacagtgccattatagacgaagaggggcgcatgcgtgccagccagacacaaggtattgaagatgatggcggtgttgctgaagcgcaagaatgggtaggacggttctgggaggcctatgatgcgctggaaaacattgatgctctcaaggcgggtctgccgaccgcacagtatcttcaccgagccatttttcggactgggacatcactcattggcaagcgccagatcaaacacttgaatgcattccggatgtgtgttatcaaggatggtcccgacgttcctcttttcactcatcccgctgctcttacgaagttagcgctctggattggcgaggctttggcagaacaggagaaagattccacgggaaagcttgctcatggaggtcgtggtacgccacttgtagtcgcgagcttaaatgaaaaaagaggagtatatgtggttgtcggcaccggcggtggaggtggcccggatcttatgttcttggaccgccaggattcaaaggagaagcaggctgccaaagctgccaaagccaaagagcgagaattaaaacgacgaaataaggaaaagatcagggaggagaagcgagctgcaagagccgcggcaggtgacgacgaagaagacgaggacgacactgagtcagagggcagcgaagcctcggattcagactcagacgcgggctcagaagacgaagaagaactacacaagggaagaggctacggtctcaacaaattcggcagcgcttttcaagacgtagtcaacgaaaccagcgctcgggtgcggatcgacagctttgaacactgcgtggtagaagtgcggaaagaggatcttagtgggttcctagaaagtctgtcgatgaaagctgttgttggataa

SEQ ID NO: 7904 - protein, 337 aa, Muscodor strobelii
  misc_feature: SGI Peptide ID NO. 562409
  misc_feature (74)..(197): Pfam Id: PF02724 Pfam Desc: CDC45-like protein
  misc_feature (288)..(335): Pfam Id: PF02724 Pfam Desc: CDC45-like protein
  misc_feature (1)..(337): NCBI GI: 261352259 Blast Desc: cell division control protein [Verticillium albo-atrum VaMs.102]
  misc_feature (1)..(337): NCBI GI: 256727599 Blast Desc: NECHADRAFT_58328 [Nectria haematococca mpVI 77-13-4]
  misc_feature (1)..(335): NCBI GI: 46136153 Blast Desc: FG09592.1 [Gibberella zeae PH-1]
  misc_feature (1)..(337): NCBI GI: 171688376 Blast Desc: protein product [Podospora anserina] gi|170944150|emb|CAP70260.1| protein product [Podospora anserina]
  misc_feature (1)..(337): NCBI GI: 39951813 Blast Desc: MGG_01549 [Magnaporthe grisea 70-15] gi|145020607|gb|EDK04736.1| MGG_01549 [Magnaporthe grisea 70-15]
  misc_feature (1)..(337): NCBI GI: 156061757 Blast Desc: SS1G_03024 [Sclerotinia sclerotiorum 1980] gi|154700425|gb|EDO00164.1| SS1G_03024 [Sclerotinia sclerotiorum 1980]
  misc_feature (1)..(337): NCBI GI: 154292366 Blast Desc: BC1G_14672 [Botryotinia fuckeliana B05.10] gi|150846151|gb|EDN21344.1| BC1G_14672 [Botryotinia fuckeliana B05.10]
  misc_feature (1)..(195): NCBI GI: 40882245 Blast Desc: related to sna41 protein [Neurospora crassa]
  misc_feature (1)..(232): NCBI GI: 85085215 Blast Desc: NCU04378 [Neurospora crassa OR74A] gi|28918547|gb|EAA28219.1| NCU04378 [Neurospora crassa OR74A]
  misc_feature (1)..(337): NCBI GI: 169606544 Blast Desc: SNOG_06315 [Phaeosphaeria nodorum SN15] gi|160707022|gb|EAT86146.2| SNOG_06315 [Phaeosphaeria nodorum SN15]
MVPAAETDGKDRAGAKDGWGFVRSWGWRATLSAQDVGVVIGALLEVGRHSAIIDEEGRMRASQTQGIEDDGGVAEAQEWVGRFWEAYDALENIDALKAGLPTAQYLHRAIFRTGTSLIGKRQIKHLNAFRMCVIKDGPDVPLFTHPAALTKLALWIGEALAEQEKDSTGKLAHGGRGTPLVVASLNEKRGVYVVVGTGGGGGPDLMFLDRQDSKEKQAAKAAKAKERELKRRNKEKIREEKRAARAAAGDDEEDEDDTESEGSEASDSDSDAGSEDEEELHKGRGYGLNKFGSAFQDVVNETSARVRIDSFEHCVVEVRKEDLSGFLESLSMKAVVG

SEQ ID NO: 7905 - DNA, 3835 bp, Muscodor strobelii; identical to SEQ ID NO: 7902
  misc_feature: SGI EST ID NO. CUFF.19542.0
  misc_feature: Variant of the nucleotide sequence at SEQ ID NO 7903

SEQ ID NO: 7906 - DNA, 573 bp, Muscodor strobelii
  misc_feature: SGI cDNA ID NO. 562410
  misc_feature: Encodes the peptide sequence at SEQ ID NO 7907
atgggcaaatctcaatccaaactctcccaggagcaactggccgagttacagaagtccacccattttgacaagaaagagttgcaacaatggtacaagggcttcctcaaggactgcccttcgggtatgctcaccaaagaggagttccagaagatttaccgccagttctttccttttggtgatccgtcatcgttcgccgactatgtattcaacgtcttcgattccgacaaatccgggtccatcgactttaaggaattcatttgcgcactcagcgttactagccgcgggaagatggaagacaaactagactgggccttccagttatatgacattgatggcgatggcaagatcagctacgacgagatgctcaagattgtagaggcaatatacaagatggtcggctcaatggtgaaattacccgaagacgaagatacccccgagaagcgtgtcaggaagattttcaacatgatggacaaggacgagaatggcagtttggacatggaggaattcaaagagggaagcaagcgcgacgaaacgattgtctctgcactctcgctgtacgatggtctagtatag

SEQ ID NO: 7907 - protein, 190 aa, Muscodor strobelii
  misc_feature: SGI Peptide ID NO. 562410
  misc_feature (100)..(128): Pfam Id: PF00036 Pfam Desc: EF hand
  misc_feature (64)..(92): Pfam Id: PF00036 Pfam Desc: EF hand
  misc_feature (148)..(176): Pfam Id: PF00036 Pfam Desc: EF hand
  misc_feature (1)..(190): NCBI GI: 261352257 Blast Desc: neuronal calcium sensor 1 [Verticillium albo-atrum VaMs.102]
  misc_feature (1)..(190): NCBI GI: 46136151 Blast Desc: FG09591.1 [Gibberella zeae PH-1]
  misc_feature (1)..(190): NCBI GI: 256727597 Blast Desc: [Nectria haematococca mpVI 77-13-4]
  misc_feature (1)..(190): NCBI GI: 39951815 Blast Desc: calcium sensor NCS-1 [Magnaporthe grisea 70-15] gi|20142118|dbj|BAB88922.1| neuronal calcium sensor 1 [Magnaporthe grisea] gi|145020606|gb|EDK04735.1| calcium sensor
  misc_feature (1)..(190): NCBI GI: 14164385 Blast Desc: NCS homolog [Magnaporthe grisea]
  misc_feature (1)..(190): NCBI GI: 154297029 Blast Desc: neuronal calcium sensor [Botryotinia fuckeliana B05.10] gi|150843130|gb|EDN18323.1| neuronal calcium sensor [Botryotinia fuckeliana B05.10]
  misc_feature (1)..(190): NCBI GI: 156063606 Blast Desc: SS1G_01921 [Sclerotinia sclerotiorum 1980] gi|154697255|gb|EDN96993.1| SS1G_01921 [Sclerotinia sclerotiorum 1980]
  misc_feature (1)..(190): NCBI GI: 189211363 Blast Desc: neuronal calcium sensor 1 [Pyrenophora tritici-repentis Pt-1C-BFP] gi|187978105|gb|EDU44731.1| neuronal calcium sensor 1 [Pyrenophora tritici-repentis Pt-1C-BFP]
  misc_feature (1)..(190): NCBI GI: 145236595 Blast Desc: An06g01190 [Aspergillus niger] gi|134075404|emb|CAK39191.1| protein product [Aspergillus niger]
  misc_feature (1)..(190): NCBI GI: 70992899 Blast Desc: calcium sensor (NCS-1) [Aspergillus fumigatus Af293] gi|66848931|gb|EAL89260.1| calcium sensor (NCS-1), [Aspergillus fumigatus Af293] gi|159130248|gb|EDP55361.1| calcium sensor
  misc_feature (4)..(179): SWISSPROT Homolog: EC 2.7.11.17 Calcium/calmodulin-dependent protein kinase
MGKSQSKLSQEQLAELQKSTHFDKKELQQWYKGFLKDCPSGMLTKEEFQKIYRQFFPFGDPSSFADYVFNVFDSDKSGSIDFKEFICALSVTSRGKMEDKLDWAFQLYDIDGDGKISYDEMLKIVEAIYKMVGSMVKLPEDEDTPEKRVRKIFNMMDKDENGSLDMEEFKEGSKRDETIVSALSLYDGLV

SEQ ID NO: 7908 - DNA, 2320 bp, Muscodor strobelii
  misc_feature: SGI EST ID NO. CUFF.19620.0
  misc_feature: Variant of the nucleotide sequence at SEQ ID NO 7906
caatttgccattccaaacaccatagtatggaatgcgacctgggttgagacctgaatcgagacatgcaaccgggccaccctgtttccccgctctcacgccttgcctacttgccttgtctgcccatctcgtctcatcataggtgtacctcgttgcctccatcctgcttttccactcagccgcctactttgcaagcccatgagcgttgtgcagtgcccttcctctcttgcgcttttcgatttcgtgtcccctcctagaccactgcgctgttaaactcctacctgcttatccccttctcttggctattcggctactggaatttgcacaaactcagaatagagaaaacgctcgagtgatcttgcgcgcgccaacgagactattgctactagtcataacgtgcccgagtccaaatcgagaccggcccttttgctcgtgcggctctgtccctggaaacagtcctcatctcgctacctgcctacctagtgctaaactcaaagttgtcgtcagtagtgaccataacgactcaaaacgttgtgccaaccccaccttttagtttacaagaccatcgatagcgcccgcgttcagatctcgctgacacggccggtctgtcgagcctgttacatcgctgccgttccaggcctgtcctacacctacaggctgtggcattccacttcgcacttgtaccatcatcgcctgacttagtcaccttctcgtcacatcgctctgcaagtaaatcccgacttcagccctgcttcagtccgctatagacttatctgcctctctcctcgcactcccccaaatagagcctcggcgtgcgcttgtctaccctcttcccctcctcccctccgctcgcttggcctgcgcccgggtatcttgatataccaagaaaatgggcaaatcgtaagtccgccgcattcttcttcgccccgcataccatacgtacaccacgtcattccgtccatgaatctgcgacaatctcgtcgttggccgtgagcctcaagcaaccgtgaacgatgtccttgcaaatcattccctcctcatctcaactgactccccgcccatctgcgcctcgacttggcaacgttcttggctcatgtgtctcgcggcagtcaatccaaactctcccaggagcaactggccgagttacagaagtccacccattttgacaagaaagagttgcaacaatggtacaagggcttcctcaaggactgcccttcgggtatgctcaccaaagaggagttccagaagatttaccgccagttctttccttttggtgatccgtcatcgttcgccgactatgtattcaacgtcttcgattccgacaaatccgggtccatcgactttaaggaattcatttgcgcactcagcgttactagccgcgggaagatggaagacaaactagactgggccttccagttatatgacattgatggcgatggcaagatcagctacgacgagatgctcaagattgtagaggcaatatacaagatggtcggctcaatggtgaaattacccgaagacgaagatacccccgagaagcgtgtcaggaagattttcaacatgatggacaaggacgagaatggcagtttggacatggaggaattcaaagagggaagcaagcgcgacgaaacgattgtctctgcactctcgctgtacgatggtctagtatagtaagagacgcaagcatatttacttttcgacggcgcaaaagagatatcgaaagaaaaagaggcacggccaaagatcccacacagaatctccctcgagaggtagagcagatggtacacggtcggaacctgtttctgtggcccgtgaggagaacttagcggttcaaacgaaattccgtatctcttttcttaatttcctctccctgtgtctctctggctgtgtctatgtgcgggatgggcggtcctgtgttcgaggttaaaggcagaggaatcatcatcaacaacatcatcatcatctatctatctcatacggttacctcccggttgttcgcgcgttggctgctctctgcgccctgtatgtcccttttgtctaagtatgcttaataaacttctgaaaacaagatttcaagtgccaagctagctcatgaacaaggtttcgataaatgcatcgccagtccagacactgagaatttcatctagaatgattttggcgcggggtttgcaattgggcgtcggcattgcggattgcgaagtggaaaaaccaataagtctctagaatgggaaatgcagaatgcagactgcagactgcaccactcgtcatccgtacatggacctatgatctcaacgcacatgttttataggcggcaagcaggcac

SEQ ID NO: 7909 - DNA, 2112 bp, Muscodor strobelii
  misc_feature: SGI cDNA ID NO. 562411
  misc_feature: Encodes the peptide sequence at SEQ ID NO 7910
atgccggacaccgagtggagagagtccaagcttcgacaccaggtcctgcagcccagaaactcggccaggggtcccttctctgtcgagtctcccggcgccccagacgtgcaaggcgagacgaagcctcgccggcaccccttggccaaggacggcctcatcaccaagcccgccgacaacatctccaccacctacgagctgctgcgtgtcagtgtcgccaagtatggcaatgccaaggctctcggctcgcgacgcctcgtccgcacccatcaggagaccaagaaggtcaagaagatggtcgacggtaaggagcaggaggtcgacaaggcctggacctacttcgagctcagcccctacgactacttgaccttcaacgactacgagaccctggctctcaacatcggctccggcctgaggaagctgggcatgaccaaggaagaccgcgtccacatcttcgccgccaccagcgcaaactggcttgccatgttccacggctccagctcccagtccatgcccgtcgtcaccgcctacgatacactcggggaggagggcttgcgtcactccatggtcgccaccggggccaaagccattttcctcgaccctcatctgctccctacgctcggcaatgttctcaaggacgctaaagacgtgcgctacgttatatggaacagccagaaccaggtcaagcaggagcatatcaacaacctcaagagcacctactccgatatcaccgttgtcagcttcaaggagctcgagaagcttggcagagagaacccttctgaccctctgcctccctcgcctgaagatctatgttgtatcatgtatacatccggatcaactggtacgcccaagggcgtgcctttgaagcacaagagtatcattgcagccgtggctggcgtcagcgttgttgtgcagccctatattggacctggtgacggtctcttgacgtatcttcccttggcccacattctggagcttgtgttcgaaaacgcatgcttgtactggggtacaacgatgggttacggaaaccccaagacactgtctgacacctccgtgcgcaactgcgctggcgacattcgagaattcaaaccttctgttcttgtcggtgtaccggctgtcttcgaaactgttaagaaaggaatcattgccaaggtgaacgctggcggccctgtagttcagaacatgttttggggggcgcttggcttgaagagcagactcatgtctatgggtcttcctggctctggactgctcgatcatgttgttttcaagaagattaaggaagctacaggtggccgtctcaagctttgcatgaacggtggtgggcccgtggcaaaggacacgcaacgcttcatttcgatggctattgctcccatgattatcggctatggtctcacggagactacggccatgggcgctctaatgaacccgtctgaatggtcgtctgaaactatcggtgccatgcctgcctctattgaagtcaaactagtcgacttcgctgatgctggctatcacgcgacgaacaagccaaatccacaaggtgagatttggatcagagggccgagcatcctggatgagtattaccagaacgacaaggaaaccaaggaaaaccttcaagacggctggttcaagacaggagacattggagaatgggactccaacggccacttgaagatcattgatcgaaagaagaaccttgtcaagaccctgaatggcgagtacattgccctggagaagctcgagtctgtctaccgatctgccacggtcgtcagcaatatctgcgtatatgcggatgagaacaaagcaaagcccattgctatcatcgtccctgccgagccagcgttgaagaagttggcatccgacaacggcatttcggctagcagcatagaagagatggtacagaacaagaagctaaagagtctcgttctcaaggagctacagaacgtaggacgggctggtggtctgtctggaattgagattattgaaggagtagctctatccgatgaggagtggactcctcaaaacggactcgtgactgcggctcagaagttgaatcgcaagccaattctgaacaagtacaaggagcaagtggacgaggcatatagttcatcaagttag

SEQ ID NO: 7910 - protein, 703 aa, Muscodor strobelii
  misc_feature: SGI Peptide ID NO. 562411
  misc_feature (122)..(593): Pfam Id: PF00501 Pfam Desc: AMP-binding enzyme
  misc_feature (16)..(699): NCBI GI: 145613542 Blast Desc: MGG_01551 [Magnaporthe grisea 70-15] gi|145020605|gb|EDK04734.1| MGG_01551 [Magnaporthe grisea 70-15]
  misc_feature (9)..(703): NCBI GI: 156045509 Blast Desc: SS1G_09944 [Sclerotinia sclerotiorum 1980] gi|154694338|gb|EDN94076.1| SS1G_09944 [Sclerotinia sclerotiorum 1980]
  misc_feature (16)..(699): NCBI GI: 171688368 Blast Desc: protein product [Podospora anserina] gi|170944146|emb|CAP70256.1| protein product [Podospora anserina]
  misc_feature (18)..(699): NCBI GI: 85085223 Blast Desc: NCU04380 [Neurospora crassa OR74A] gi|28918549|gb|EAA28221.1| NCU04380 [Neurospora crassa OR74A] gi|40882243|emb|CAF06068.1| long-chain-fatty-acid-CoA ligase
  misc_feature (11)..(703): NCBI GI: 154290515 Blast Desc: acyl-CoA synthetase [Botryotinia fuckeliana B05.10] gi|150847537|gb|EDN22730.1| acyl-CoA synthetase [Botryotinia fuckeliana B05.10]
  misc_feature (15)..(699): NCBI GI: 259479804 Blast Desc: TPA: fatty acid activator Faa4, (AFU_orthologue; AFUA_2G09910) [Aspergillus nidulans FGSC A4]
  misc_feature (15)..(702): NCBI GI: 119177850 Blast Desc: CIMG_07819 [Coccidioides immitis RS]
  misc_feature (15)..(702): NCBI GI: 240107562 Blast Desc: Long-chain-fatty-acid-CoA ligase, [Coccidioides posadasii C735 delta SOWgp]
  misc_feature (1)..(699): NCBI GI: 145252620 Blast Desc: An16g05150 [Aspergillus niger] gi|134083376|emb|CAK97369.1| protein product [Aspergillus niger]
  misc_feature (12)..(699): NCBI GI: 240276824 Blast Desc: acyl-CoA synthetase [Ajellomyces capsulatus H143]
  misc_feature (39)..(702): SWISSPROT Homolog: EC 6.2.1.3 Long-chain-fatty-acid--CoA ligase
MPDTEWRESKLRHQVLQPRNSARGPFSVESPGAPDVQGETKPRRHPLAKDGLITKPADNISTTYELLRVSVAKYGNAKALGSRRLVRTHQETKKVKKMVDGKEQEVDKAWTYFELSPYDYLTFNDYETLALNIGSGLRKLGMTKEDRVHIFAATSANWLAMFHGSSSQSMPVVTAYDTLGEEGLRHSMVATGAKAIFLDPHLLPTLGNVLKDAKDVRYVIWNSQNQVKQEHINNLKSTYSDITVVSFKELEKLGRENPSDPLPPSPEDLCCIMYTSGSTGTPKGVPLKHKSIIAAVAGVSVVVQPYIGPGDGLLTYLPLAHILELVFENACLYWGTTMGYGNPKTLSDTSVRNCAGDIREFKPSVLVGVPAVFETVKKGIIAKVNAGGPVVQNMFWGALGLKSRLMSMGLPGSGLLDHVVFKKIKEATGGRLKLCMNGGGPVAKDTQRFISMAIAPMIIGYGLTETTAMGALMNPSEWSSETIGAMPASIEVKLVDFADAGYHATNKPNPQGEIWIRGPSILDEYYQNDKETKENLQDGWFKTGDIGEWDSNGHLKIIDRKKNLVKTLNGEYIALEKLESVYRSATVVSNICVYADENKAKPIAIIVPAEPALKKLASDNGISASSIEEMVQNKKLKSLVLKELQNVGRAGGLSGIEIIEGVALSDEEWTPQNGLVTAAQKLNRKPILNKYKEQVDEAYSSSS

SEQ ID NO: 7911 - DNA, 3324 bp, Muscodor strobelii
  misc_feature: SGI EST ID NO. CUFF.19567.0
  misc_feature: Variant of the nucleotide sequence at SEQ ID NO 7909
gctgcatggtgttacatataagatacctttaagcgtgcgcaggacgaaatgatcatgatcccaaaactatggcttctctaggtactttgccggcatgcgtgaggttggcgaggttggggtggcactcaacataaaaccctgtggcatttcgtcataggctctaccccaacaccagtctgccgccccgcctagagggacacactaagacacctacgtctaggttggtaggtacccatgcgggttactggacggcaggggcatttgctgggagagtagacgcatagcggacctctttgattggccgggtcttgcaagctggttgtcactgacgatggctattcccaattggaaacaccttccaagtgacgactacatgctacttcgcgtgcgatcccgcctgatcactgatctctgggtcttgacgacctgaacctcccaacctcacctgccgtctccctcctcctgtctcaaccagcccgcctcatcatcaccatcccaccagctactctacttaggtatctaacacaagctgtgttgacaatctccgcccatcgcacagcttaacttattcaagacatcgctgttcaacacaccacttgtgcgactcgctgttgtctcctaatagctcattctaccgctgcttaaacccgttgccgaggcatgagcacaattccaacaacatattttcaatactgttaattgtaatattcttgttcatcgagccggccaataggccccgcactgtcgaacccacggagataccagcactctcaccttctctcccgaaaccctcctccttcgcggcctcgtccacatccatcgctatgccggacaccgagtggagagagtccaagcttcgacaccaggtcctgcagcccagaaactcggccaggggtcccttctctgtcgagtctcccggcgccccagacgtgcaaggcgagacgaagcctcgccggcaccccttggccaaggacggcctcatcaccaagcccgccgacaacatctccaccacctacgagctgctgcgtgtcagtgtcgccaagtatggcaatgccaaggctctcggctcgcgacgcctcgtccgcacccatcaggagaccaagaaggtcaagaagatggtcgacggtaaggagcaggaggtcgacaaggcctggacctacttcgagctcagcccctacgactacttgaccttcaacgactacgagaccctggctctcaacatcggctccggcctgaggaagctgggcatgaccaaggaagaccgcgtccacatcttcgccgccaccagcgcaaactggcttgccatgttccacggctccagctcccagtccatgcccgtcgtcaccgcctacgatacactcggggaggagggcttgcgtcactccatggtcgccaccggggccaaagccattttcctcgaccctcatctgctccctacgctcggcaatgttctcaaggacgctaaagacgtgcgctacgttatatggaacagccagaaccaggtcaagcaggagcatatcaacaacctcaagagcacctactccgatatcaccgttgtcagcttcaaggagctcgagaagcttggcagagagaacccttctgaccctctgcctccctcgcctgaagatctatgttgtatcatgtatacatccggatcaactggtacgcccaagggcgtgcctttgaagcacaagagtatcattgcagccgtggctggcgtcagcgttgttgtgcagccctatattggacctggtgacggtctcttgacgtatcttcccttggcccacattctggagcttgtgttcgaaaacgcatgcttgtactggggtacaacgatgggttacggaaaccccaagacactgtctgacacctccgtgcgcaactgcgctggcgacattcgagaattcaaaccttctgttcttgtcggtgtaccggctgtcttcgaaactgttaagaaaggaatcattgccaaggtgaacgctggcggccctgtagttcagaacatgttttggggggcgcttggcttgaagagcagactcatgtctatgggtcttcctggctctggactgctcgatcatgttgttttcaagaagattaaggaagctacaggtggccgtctcaagctttgcatgaacggtggtgggcccgtggcaaaggacacgcaacgcttcatttcgatggctattgctcccatgattatcggctatggtctcacggagactacggccatgggcgctctaatgaacccgtctgaatggtcgtctgaaactatcggtgccatgcctgcctctattgaagtcaaactagtcgacttcgctgatgctggctatcacgcgacgaacaagccaaatccacaaggtgagatttggatcagagggccgagcatcctggatgagtattaccagaacgacaaggaaaccaaggaaaaccttcaagacggctggttcaagacaggagacattggagaatgggactccaacggccacttgaagatcattgatcgaaagaagaaccttgtcaagaccctgaatggcgagtacattgccctggagaagctcgagtctgtctaccgatctgccacggtcgtcagcaatatctgcgtatatgcggatgagaacaaagcaaagcccattgctatcatcgtccctgccgagccagcgttgaagaagttggcatccgacaacggcatttcggctagcagcatagaagagatggtacagaacaagaagctaaagagtctcgttctcaaggagctacagaacgtaggacgggctggtggtctgtctggaattgagattattgaaggagtagctctatccgatgaggagtggactcctcaaaacggactcgtgactgcggctcagaagttgaatcgcaagccaattctgaacaagtacaaggagcaagtggacgaggcatatagttcatcaagttaggcacgagatgatggacgcattgcttcagggtctagcaccaaaatgtgtgtgaattcggttctgggaatctgcgcgcgatagatgaatggacgacgagactcacgcaagaggaatacccaattcgtagaaacgatgttacggtcctttctgtatagctacggcgcctaggttgttcctgctgtcttctatctttgttgtagcaagatttggttactttcctcattgagtgatctaatgtgcatactactataccatcacttctacgatatgggttttaacgtaacgattagcagagcgcatgattaccatgtgtttaaggacattttgaatagttcaatataactgcttagaacaatcattctatgtagttgcaacatataaaaagtcg

SEQ ID NO: 7912 - DNA, 1587 bp, Muscodor strobelii
  misc_feature: SGI cDNA ID NO. 562412
  misc_feature: Elevated expression when VOC is produced
  misc_feature: Encodes the peptide sequence at SEQ ID NO 7913
atgaagtcgggtcttgcagcgagcgtgctgccgctcctagcgcagctttcgccagtttctgcgtacagactgtcgcaagacattcgccgaatggcgacgccccgtctttcacttactcatgttcacttgagtgacgacaagaagtcgagagtggatgacgatgaagatgtcattatgggtaactcgacattcacacagcccatcgaccacaaggatccgaagaaggggaccttcgaacagagatattggtggaacgccgagtactacgaggaaggtggtccggtattcctcttcaatggtggcgagagtaatggggatgatctcgtcggttatgtggataactataccctccctggactcatggctcaggagttcaagggaatcgccattctcatcgagcatcgctacttcggagactccgtaccatacgataccctaacagccgagaccctccaatatctcaccttacctcaagctatcaaagacatgacgaattttgcctcgactatagacctgcccttttgtgagggcaactgcaacacgaacgacaacccttgggttttgatgggcggctcatacagtggtgcattggccgcctggacgcagcagattgatcctggcacatttacagcctaccatgcctcgtccgctgtcgtcgaggccatttacgatttcaacacttactaccaagccgtcacagatgccatgcccaagaactgcagttctgatgttaaggctgtaattaagtacgtcgacggcgtgctgtgctcggaagacaaggaagacatcaagactcttaagacacgtttcgggctttccgctctcaatgatgccgacttcgctcgttatatcactattcctcaggcacagtggcagagcgatcaagcatatgtgttccagttctgcgactacatcgagggtgttgccagcaactacaccaattacatgagcaactcggaggatggtgtcgggctcgtcgccgcactcaatgcgtactcaaaattcgtgaagactgagattgcttcaagctgtggaaaggacggcgcggactgcaacagctatagtgacgacatcaactacaatactcccaaggacttcgctgatcagggcagacaatgggattggctgctttgcaacgaaccctttgctttctggcaagttggcccggccagcaacgagaatggcactgccgtcatcccatcggctctgcgacctgattactaccagcgacaatgtcctctcaaattccccaagacgaacggtttcgagtctggttcagagatgggctttactgcggagcacctaaacatgtggactgggggctgggacgctgacttcgacaaagtcaacttcgtgcagggtaaatacgacccatggagggcagccacgatcggcgctgatacccgtcctggcggccccaaggccagcacggagtccgttcccaacctcgttgtcctcgatggtgttcatgttcctgaactcgctttcgtgaacggcatgactaggtaccagaaaccggttgtccaagcttctattgagaacatgaagcgcttcctgtccgattgggagaagccatcccgcaaataa

SEQ ID NO: 7913 - protein, 528 aa, Muscodor strobelii
  misc_feature: SGI Peptide ID NO. 562412
  misc_feature (66)..(501): Pfam Id: PF05577 Pfam Desc: Serine carboxypeptidase S28
  misc_feature (66)..(234): Pfam Id: PF05577 Pfam Desc: Serine carboxypeptidase S28
  misc_feature (58)..(527): NCBI GI: 145613662 Blast Desc: MGG_01453 [Magnaporthe grisea 70-15] gi|145020711|gb|EDK04840.1| MGG_01453 [Magnaporthe grisea 70-15]
  misc_feature (60)..(524): NCBI GI: 159128675 Blast Desc: serine peptidase, [Aspergillus fumigatus A1163]
  misc_feature (60)..(524): NCBI GI: 146322738 Blast Desc: serine peptidase [Aspergillus fumigatus Af293] gi|129556778|gb|EAL87223.2| serine peptidase, [Aspergillus fumigatus Af293]
  misc_feature (58)..(524): NCBI GI: 121711132 Blast Desc: serine peptidase, [Aspergillus clavatus NRRL 1] gi|119401332|gb|EAW11756.1| serine peptidase, [Aspergillus clavatus NRRL 1]
  misc_feature (30)..(522): NCBI GI: 145239841 Blast Desc: serine peptidase, [Aspergillus clavatus NRRL 1] gi|119401332|gb|EAW11756.1| serine peptidase, [Aspergillus clavatus NRRL 1]
  misc_feature (60)..(524): NCBI GI: 119497857 Blast Desc: serine peptidase, [Neosartorya fischeri NRRL 181] gi|119413850|gb|EAW23789.1| serine peptidase, [Neosartorya fischeri NRRL 181]
  misc_feature (1)..(499): NCBI GI: 156058698 Blast Desc: SS1G_03361 [Sclerotinia sclerotiorum 1980] gi|154701148|gb|EDO00887.1| SS1G_03361 [Sclerotinia sclerotiorum 1980]
  misc_feature (17)..(527): NCBI GI: 39942514 Blast Desc: MGG_03337 [Magnaporthe grisea 70-15] gi|145015650|gb|EDK00140.1| MGG_03337 [Magnaporthe grisea 70-15]
  misc_feature (60)..(522): NCBI GI: 154303088 Blast Desc: BC1G_09564 [Botryotinia fuckeliana B05.10] gi|150855027|gb|EDN30219.1| BC1G_09564 [Botryotinia fuckeliana B05.10]
  misc_feature (57)..(524): NCBI GI: 238490204 Blast Desc: serine peptidase, [Aspergillus flavus NRRL3357] gi|220696752|gb|EED53093.1| serine peptidase, [Aspergillus flavus NRRL3357]
  misc_feature: Useful for introducing or modulating the production of volatile compounds
MKSGLAASVLPLLAQLSPVSAYRLSQDIRRMATPRLSLTHVHLSDDKKSRVDDDEDVIMGNSTFTQPIDHKDPKKGTFEQRYWWNAEYYEEGGPVFLFNGGESNGDDLVGYVDNYTLPGLMAQEFKGIAILIEHRYFGDSVPYDTLTAETLQYLTLPQAIKDMTNFASTIDLPFCEGNCNTNDNPWVLMGGSYSGALAAWTQQIDPGTFTAYHASSAVVEAIYDFNTYYQAVTDAMPKNCSSDVKAVIKYVDGVLCSEDKEDIKTLKTRFGLSALNDADFARYITIPQAQWQSDQAYVFQFCDYIEGVASNYTNYMSNSEDGVGLVAALNAYSKFVKTEIASSCGKDGADCNSYSDDINYNTPKDFADQGRQWDWLLCNEPFAFWQVGPASNENGTAVIPSALRPDYYQRQCPLKFPKTNGFESGSEMGFTAEHLNMWTGGWDADFDKVNFVQGKYDPWRAATIGADTRPGGPKASTESVPNLVVLDGVHVPELAFVNGMTRYQKPVVQASIENMKRFLSDWEKPSRK

SEQ ID NO: 7914 - DNA, 2187 bp, Muscodor strobelii
  misc_feature: SGI EST ID NO. CUFF.19555.0
  misc_feature: Variant of the nucleotide sequence at SEQ ID NO 7912
ctcggaccagctggccgagctggcattttatgaccaatgccgtctatcactgctatccttgttagtctagtgctcttggcaggctccagctgtcgaggctgaggagagcagagatggagaccgagagaagctgcaacaaataggattgtaggctcgacgtaggacggacaagctatgcctgtgaagcaatcctggtagtggccctggaactgccagggcaggcatttttgggagtccttagggctgatgatagatccgcgacggcgaatgaaccatatatatagataggatgtggaagaacaaagcttttcatccctttccttctatgtgcgtctcttaataaacatcattattccttttcgttattggtagctcgtctcatagacgttcgacgagggtgtattttctttcttatctctctttagcttaccaacttcagacaaaatgaagtcgggtcttgcagcgagcgtgctgccgctcctagcgcagctttcgccagtttctgcgtacagactgtcgcaagacattcgccgaatggcgacgccccgtctttcacttactcatgttcacttgagtgacgacaagaagtcgagagtggatgacgatgaagatgtcattatgggtaactcgacattcacacagcccatcgaccacaaggatccgaagaaggggaccttcgaacagagatattggtggaacgccgagtactacgaggaaggtggtccggtattcctcttcaatggtggcgagagtaatggggatgatctcgtcggttatgtggataactataccctccctggactcatggctcaggagttcaagggaatcgccattctcatcgagcatcgctacttcggagactccgtaccatacgataccctaacagccgagaccctccaatatctcaccttacctcaagctatcaaagacatgacgaattttgcctcgactatagacctgcccttttgtgagggcaactgcaacacgaacgacaacccttgggttttgatgggcggctcatacagtggtgcattggccgcctggacgcagcagattgatcctggcacatttacagcctaccatgcctcgtccgctgtcgtcgaggccatttacgatttcaacacttactaccaagccgtcacagatgccatgcccaagaactgcagttctgatgttaaggctgtaattaagtacgtcgacggcgtgctgtgctcggaagacaaggaagacatcaagactcttaagacacgtttcgggctttccgctctcaatgatgccgacttcgctcgttatatcactattcctcaggcacagtggcagagcgatcaagcatatgtgttccagttctgcgactacatcgagggtgttgccagcaactacaccaattacatgagcaactcggaggatggtgtcgggctcgtcgccgcactcaatgcgtactcaaaattcgtgaagactgagattgcttcaagctgtggaaaggacggcgcggactgcaacagctatagtgacgacatcaactacaatactcccaaggacttcgctgatcagggcagacaatgggattggctgctttgcaacgaaccctttgctttctggcaagttggcccggccagcaacgagaatggcactgccgtcatcccatcggctctgcgacctgattactaccagcgacaatgtcctctcaaattccccaagacgaacggtttcgagtctggttcagagatgggctttactgcggagcacctaaacatgtggactgggggctgggacgctgacttcgacaaagtcaacttcgtgcagggtaaatacgacccatggagggcagccacgatcggcgctgatacccgtcctggcggccccaaggccagcacggagtccgttcccaacctcgttgtcctcgatggtgttcatgttcctgaactcgctttcgtgaacggcatgactaggtaccagaaaccggttgtccaagcttctattgagaacatgaagcgcttcctgtccgattgggagaagccatcccgcaaataatgaagaggaaaggagtgaagataggcgaactctgtttgagccgtgctgttgaaacatattcagaatcatgatatccctagtcgcatttggatttggcgtttttgtctattaaaaggacctataatttagttttgaatgaaagaaatgatacccatt

SEQ ID NO: 7915 - DNA, 2475 bp, Muscodor strobelii
  misc_feature: SGI cDNA ID NO. 562413
  misc_feature: Encodes the peptide sequence at SEQ ID NO 7916
atgcgctcaccaatgcggtcaagtatcgcctgtactagatgccggaagtccaagataaagtgcgagaatgtcaatggtacctcgccatgcgatagctgtattaagactggcaatgagtgcatcttcaaagtgccagatcctgttgcgcccaaacgatcggagcctcccattgcaatcaagccagaacgtgatggtggttcggatagaaaaaagctgaagaaaatagacgatgtctcaaaatctgacaatcagaagaccaccgtctacgcagaagatgtcctagctgtcccgttcttaacggaggatctgtgggagcaggttctggatatatacaagctgcattttgccactgaactcccattcctacatcttccgacaatgaaagagagattggctcggaaatctaaaacgttgagttctgacggtggatctgacagcaacttggtccttctaggcgtcttgactcttacggcgcgattccaccctgaccttgttaaatatctagcacacatgcaaaatcatcagtctgggaatgcgagaacgcggccgcttcaacctcaatctgatccagctgctgcgtccgaatactatgctgatgttctagccattgcccttggacccgtgcggacgatgatgagccacgcgtcggttgatcgggtggcagcgttgctcatgttagggctatacgaatggagccaaacacagccaaaggccggtggtatgaccgcttggatgtacgtgggagcggctatcaggatggctcagtatctggggctggggtttgaggatgcatcagaaaccagccgagactcgaaattcagatctggcgacatacagcttagaagttctggctgccagtctcaacttgcgctccaaaaggagaccaggaggcgggtcatgttcagctgtttcgttcttgaccggatgttagcatgtggaaagcatcgagtttcagtcatccgaggcgaggatcttgagatccagctgccttgttctgaagacaaattcgacctcgcaatggaagcacagactggataccttagggaagaagttaccggaacggatgacagtgtcttgagtcgcttcataagactggtacaactgtggggcgatatttccgcgtacagctttcgcggtggtcgccttgttgagaggtaccccccttggcatccagagtcaacgttctacaaacttaacaagaagcttgaatcttttgattctgccctccctggaactttcacattttctcgatcaaattacttcaagcacgagaatcatcacgcggcgagtacgtttgttctcctacacatgcttcggtttgtttgcttgatcatgcttcatcgcgaatatgttccattcgtgcctatccgatgccgcgagcccgaagggcctctggatcagcctaccttcacgagggaagaaactccagcaggattctggcggtccagtgcagaacaacttttcaaggctgcaaggggtatcgtagatttgatcgagatatgccagaggaaagaaagactcccacaatccaccatcgtactctttgctatctggaccgcagcctttgttgggctctatggttcccatttcccccaaatggacacagaaagacatatgttggattccaactatgaggatacacgattgaacgttcgtagggatgtgtttcagcatgggcctactgcaataacgtatcggagtctcatcaaaatgtcgacgtggcttaaaatggcgtctacctacgttggcattttgcaacaaatggacaagtatttcgacgatatcaagcaagattactataagttcagtgatcggaatgtgcagaacaacaaagcatcactgcgagtgcgagaaggtggaacaggcggtggactagaagaatatcagccgttggtcaggaagttgaaagatttcgggtcactccaacccgacgagcacgacgttgtcgacattcaagatcgatttcgcacacatccctttggccacttaccctccactgacatggagttactcggtcattccaagtctgcttcgcccggtgcttttactgcaatcaaccgtggatccgcattaccgactccagagccagctcggcctcaaagccgaccggtggaagtgaccagatcacacccatatccatcaaagtcattttcggagccttgggcgcatcccaatgtggtacaacagcaaacgcaactatcgccaggtcatgcttatccgacaccaggttcagtgcttgacccggccagtacgggtgcccaaacacaggagccaaacatggtacaagacgagagcgagggattttgggataattttcgaacggaagaaatccgtcgatttggggctacgggagatctttccctattttcaaccggcgagtcgcagttgactgacataccattcagcgactcggcttatgttttgaccgactcttcgtatcaactacttcagcaagcgggcaataatgatttctag

SEQ ID NO: 7916 - protein, 824 aa, Muscodor strobelii
  misc_feature: SGI Peptide ID NO. 562413
  misc_feature (9)..(49): Pfam Id: PF00172 Pfam Desc: Fungal Zn(2)-Cys(6) binuclear cluster domain
  misc_feature (216)..(334): Pfam Id: PF04082 Pfam Desc: Fungal specific transcription factor domain
  misc_feature (216)..(259): Pfam Id: PF04082 Pfam Desc: Fungal specific transcription factor domain
  misc_feature (292)..(334): Pfam Id: PF04082 Pfam Desc: Fungal specific transcription factor domain
  misc_feature (2)..(601): NCBI GI: 116194750 Blast Desc: CHGG_03973 [Chaetomium globosum CBS 148.51] gi|88179886|gb|EAQ87354.1| CHGG_03973 [Chaetomium globosum CBS 148.51]
  misc_feature (2)..(641): NCBI GI: 171683387 Blast Desc: protein product [Podospora anserina] gi|170941653|emb|CAP67307.1| protein product [Podospora anserina]
  misc_feature (29)..(648): NCBI GI: 164424432 Blast Desc: NCU06990 [Neurospora crassa OR74A] gi|157070509|gb|EAA33394.2| NCU06990 [Neurospora crassa OR74A]
  misc_feature (2)..(617): NCBI GI: 256729819 Blast Desc: NECHADRAFT_47160 [Nectria haematococca mpVI 77-13-4]
  misc_feature (3)..(645): NCBI GI: 261359723 Blast Desc: conserved [Verticillium albo-atrum VaMs.102]
  misc_feature (4)..(614): NCBI GI: 46122537 Blast Desc: FG05646.1 [Gibberella zeae PH-1]
  misc_feature (64)..(642): NCBI GI: 154317084 Blast Desc: BC1G_03444 [Botryotinia fuckeliana B05.10] gi|150844861|gb|EDN20054.1| BC1G_03444 [Botryotinia fuckeliana B05.10]
  misc_feature (145)..(642): NCBI GI: 156049125 Blast Desc: SS1G_08269 [Sclerotinia sclerotiorum 1980] gi|154692668|gb|EDN92406.1| SS1G_08269 [Sclerotinia sclerotiorum 1980]
  misc_feature (5)..(606): NCBI GI: 212533323 Blast Desc: C6 transcription factor, [Penicillium marneffei ATCC 18224] gi|210072182|gb|EEA26271.1| C6 transcription factor, [Penicillium marneffei ATCC 18224]
  misc_feature (5)..(627): NCBI GI: 239606226 Blast Desc: C6 transcription factor [Ajellomyces dermatitidis ER-3]
MRSPMRSSIACTRCRKSKIKCENVNGTSPCDSCIKTGNECIFKVPDPVAPKRSEPPIAIKPERDGGSDRKKLKKIDDVSKSDNQKTTVYAEDVLAVPFLTEDLWEQVLDIYKLHFATELPFLHLPTMKERLARKSKTLSSDGGSDSNLVLLGVLTLTARFHPDLVKYLAHMQNHQSGNARTRPLQPQSDPAAASEYYADVLAIALGPVRTMMSHASVDRVAALLMLGLYEWSQTQPKAGGMTAWMYVGAAIRMAQYLGLGFEDASETSRDSKFRSGDIQLRSSGCQSQLALQKETRRRVMFSCFVLDRMLACGKHRVSVIRGEDLEIQLPCSEDKFDLAMEAQTGYLREEVTGTDDSVLSRFIRLVQLWGDISAYSFRGGRLVERYPPWHPESTFYKLNKKLESFDSALPGTFTFSRSNYFKHENHHAASTFVLLHMLRFVCLIMLHREYVPFVPIRCREPEGPLDQPTFTREETPAGFWRSSAEQLFKAARGIVDLIEICQRKERLPQSTIVLFAIWTAAFVGLYGSHFPQMDTERHMLDSNYEDTRLNVRRDVFQHGPTAITYRSLIKMSTWLKMASTYVGILQQMDKYFDDIKQDYYKFSDRNVQNNKASLRVREGGTGGGLEEYQPLVRKLKDFGSLQPDEHDVVDIQDRFRTHPFGHLPSTDMELLGHSKSASPGAFTAINRGSALPTPEPARPQSRPVEVTRSHPYPSKSFSEPWAHPNVVQQQTQLSPGHAYPTPGSVLDPASTGAQTQEPNMVQDESEGFWDNFRTEEIRRFGATGDLSLFSTGESQLTDIPFSDSAYVLTDSSYQLLQQAGNNDF

SEQ ID NO: 7917 - DNA, 4191 bp, Muscodor strobelii
  misc_feature: SGI EST ID NO. CUFF.19589.1
  misc_feature: Variant of the nucleotide sequence at SEQ ID NO 7915
gggttgcaagggttcgacgagatacaagtctacttccgaatacctattctcatcactgggtctagaagaaaaggctcaattgtcaacaagccgcaccatgcgagtgaaaatctacgggcatccacatcggtgtgcacaacagggactactaaagcatcccgacacgacgggttcaatatctcacaccctgaaccaacaactacagtactttaatgtccctcatctcttaatgacacctaaaaattcatgttgtaagccatttgcctctagacgaccaggaagctacatatgtattcaacaatctcacgttgcccatttgtaaacaacactgcagagaccggcagtaagggaactgtacaggctgttgcttgccttgtcgcccttctggcccctgtccgcgaccaggttgggcggcggctttgatccagattcgttcgaccctgctgtcgttggctggtgttaagagagaacctatccgaccaccccttgtcctgttccgatctgccacccgcgggtgaccaggatcctagcccggctcgctctccaaaacgcccctcgactgaccggaaagtttggctgcagccacgagccgcctctctgcaccaccatcccttcgttccacccgcgaagacactgtgcttagcaattgtaattcatttagcactcgcccgttgtgatagtctttcgtgaaagagccgcatctgtattatcttattgataaacaacagagcaacgcccaattcttgagagcgcgtggtcaactccgtcgctgaattgctcacttcatactgccactctctagcttagtccctcgtcgaaacgcagtcgattctgtccacttgttcatcagcttataaacccatagcccccacaagccttccacggtgaaactaaatctatcgcatttctagctctataaagcggcataaagacgggcttgtcgagttacacattctcgctctaaccaactcggtcgctctaacacactactgtagctctgggcgtacaaattcatcccttgatcgaaaccttcgcgccttactttgatggcacgaagcttagcaccttgcgtaatcatcccctaactctcagctgatattcgggtctgcctcagacccagccgtcacaatttccaatccaatccgtatttgctctatcctctcccctccgaacccccaagaggtggacgatttatcgagtacaacgtctcgccacgtctcgccgaatgagagtctagaacaacgtgcattctctttatccacgtttccctctaggcagacctatccagctgagaaagcgaatgccgaagttgagcagtcagaaaacgagcgaccgccggcgaagggggtgggagatgggtatggacccgatcaaatgaggctcatcgcagccgctggtgttgatcggaagcgatcgtctggcaaaatgcgctcaccaatgcggtcaagtatcgcctgtactagatgccggaagtccaagataaagtgcgagaatgtcaatggtacctcgccatgcgatagctgtattaagactggcaatgagtgcatcttcaaagtgccagatcctgttgcgcccaaacgatcggagcctcccattgcaatcaagccagaacgtgatggtggttcggatagaaaaaagctgaagaaaatagacgatgtctcaaaatctgacaatcagaagaccaccgtctacgcagaagatgtcctagctgtcccgttcttaacggaggatctgtgggagcaggttctggatatatacaagctgcattttgccactgaactcccattcctacatcttccgacaatgaaagagagattggctcggaaatctaaaacgttgagttctgacggtggatctgacagcaacttggtccttctaggcgtcttgactcttacggcgcgattccaccctgaccttgttaaatatctagcacacatgcaaaatcatcagtctgggaatgcgagaacgcggccgcttcaacctcaatctgatccagctgctgcgtccgaatactatgctgatgttctagccattgcccttggacccgtgcggacgatgatgagccacgcgtcggttgatcgggtggcagcgttgctcatgttagggctatacgaatggagccaaacacagccaaaggccggtggtatgaccgcttggatgtacgtgggagcggctatcaggatggctcagtatctggggctggggtttgaggatgcatcagaaaccagccgagactcgaaattcagatctggcgacatacagcttagaagttctggctgccagtctcaacttgcgctccaaaaggagaccaggaggcgggtcatgttcagctgtttcgttcttgaccggatgttagcatgtggaaagcatcgagtttcagtcatccgaggcgaggatcttgagatccagctgccttgttctgaagacaaattcgacctcgcaatggaagcacagactggataccttagggaagaagttaccggaacggatgacagtgtcttgagtcgcttcataagactggtacaactgtggggcgatatttccgcgtacagctttcgcggtggtcgccttgttgagaggtaccccccttggcatccagagtcaacgttctacaaacttaacaagaagcttgaatcttttgattctgccctccctggaactttcacattttctcgatcaaattacttcaagcacgagaatcatcacgcggcgagtacgtttgttctcctacacatgcttcggtttgtttgcttgatcatgcttcatcgcgaatatgttccattcgtgcctatccgatgccgcgagcccgaagggcctctggatcagcctaccttcacgagggaagaaactccagcaggattctggcggtccagtgcagaacaacttttcaaggctgcaaggggtatcgtagatttgatcgagatatgccagaggaaagaaagactcccacaatccaccatcgtactctttgctatctggaccgcagcctttgttgggctctatggttcccatttcccccaaatggacacagaaagacatatgttggattccaactatgaggatacacgattgaacgttcgtagggatgtgtttcagcatgggcctactgcaataacgtatcggagtctcatcaaaatgtcgacgtggcttaaaatggcgtctacctacgttggcattttgcaacaaatggacaagtatttcgacgatatcaagcaagattactataagttcagtgatcggaatgtgcagaacaacaaagcatcactgcgagtgcgagaaggtggaacaggcggtggactagaagaatatcagccgttggtcaggaagttgaaagatttcgggtcactccaacccgacgagcacgacgttgtcgacattcaagatcgatttcgcacacatccctttggccacttaccctccactgacatggagttactcggtcattccaagtctgcttcgcccggtgcttttactgcaatcaaccgtggatccgcattaccgactccagagccagctcggcctcaaagccgaccggtggaagtgaccagatcacacccatatccatcaaagtcattttcggagccttgggcgcatcccaatgtggtacaacagcaaacgcaactatcgccaggtcatgcttatccgacaccaggttcagtgcttgacccggccagtacgggtgcccaaacacaggagccaaacatggtacaagacgagagcgagggattttgggataattttcgaacggaagaaatccgtcgatttggggctacgggagatctttccctattttcaaccggcgagtcgcagttgactgacataccattcagcgactcggcttatgttttgaccgactcttcgtatcaactacttcagcaagcgggcaataatgatttctagatctgaggaactttcaaatcggggcatgcctagttgttttggtcatacttcgaggtgcttttccttgggcatcaaatttaggttagaggataaaaaagtgtcggtggttcatgttggtgcgttggcggcgtacgagtttttgtatttagaggccctcaacaagcgagtttcaattgattttttggttcttacactcgaatcaaaaagtatgcaagattttatatgtttccttcacatctcatattttgtgggaattgcgaattggcatatctttagtacctttaagagaag

SEQ ID NO: 7918 - DNA, 1581 bp, Muscodor strobelii
  misc_feature: SGI cDNA ID NO. 562414
  misc_feature: Encodes the peptide sequence at SEQ ID NO 7919
atggcatctggccacaatgacccgaagctgctctatgccatcccgggcgtgtctgcctaccatcttgcgtacggcaaagaagaggccttgacgccgggcggcccccagactctgtctctgttgatggttcccacttcttcccctttcgccgatccctcgtccttcgatgcgcgcgatggtgcgccgcctgaggacttctacctccacctgcacttaccgccggagctcgatataccgctccctgcaacgacacagatctaccaccagccgcccacaagttatctgatcccacgatgggatctagggccggatagtggtgccttcactcgtctagagtttccatcggtcgggactcgcaaaggtctgcaggaagatgtcgatacatttgagacaatcctagcgcagtgtactgccttcctcgagagggctcctccgccccggactgccaaaatagataaagaaaaagaaaagccgtcctcgacgtcaccatcagcaacgaggtctcctaccggtgtttccaagacaggctccaagtcaaaagcgcaggcttcgtcgtccgcgcggagcgaaaagcttcccgcctataatccggctgagtacaagcctggcgagggctacgtacaagggagtcacagttctgcccatggcggccagattgtgctgattgatgaggaagacgggagtgttattggcgaactaaccgatggctttcaagttgtcgagtcgggagtaaagccggggtcgaaggatccggtggagataaccttaccaaccgaaggaaaccagcttgccgttgttccggcttcaacggaatccatcgaacaggagttgcatcccgcgtataagaaatcatttatcgtatcgaaagctgcgtacgcctcgcgactaatcatcactacgtcggacttagtttccaacgctatggcgagcggctctgacagctttgtcaagaacaccaaagcggcaaataaccctttgactttcaagcccaccacgcatgaaagagttcgccgaattggaaaattctctggaagtgtcgccgaggcgtcttctaagaccgtcggacaagtgacaaaggtggcgcagaatcttggagcgcacctcgccgggcgaggctataaggacaaatccggaacccgaggctatggtcccgacggtcaacctttggacacgttcaagcctggcttgctgaataagagcttgatggctttctctactgtcgcagacgggattgaacaggcatctcggagcttacttacttctgcttcttcgtcagctacaacagtggtcacgcaccgttggggttcggaagctggtgagctctccaagcatctcggttctagtgtcaagagtgtgggcctcgtatatatcgacgtcactggcgtttcccgacgtgccgttataaaggctgtagggaaagggatggttgttggcaaggttaatatcggcaacaatcaaacagcagacgtaattgtgggcggcgaagagtccactgccattgtaagaaatgagtcgacgcctttaatcaaagactcggctagtatcagcggcgcgtccacaaaacaaacgtcgaagcactag

SEQ ID NO: 7919 - protein, 526 aa, Muscodor strobelii
  misc_feature: SGI Peptide ID NO. 562414
  misc_feature (1)..(485): NCBI GI: 116194754 Blast Desc: CHGG_03975 [Chaetomium globosum CBS 148.51] gi|88179888|gb|EAQ87356.1| CHGG_03975 [Chaetomium globosum CBS 148.51]
  misc_feature (1)..(483): NCBI GI: 171683385 Blast Desc: protein product [Podospora anserina] gi|170941652|emb|CAP67306.1| protein product [Podospora anserina]
  misc_feature (1)..(479): NCBI GI: 85108714 Blast Desc: NCU06989 [Neurospora crassa OR74A] gi|28924239|gb|EAA33393.1| conserved [Neurospora crassa OR74A]
  misc_feature (1)..(499): NCBI GI: 256729639 Blast Desc: [Nectria haematococca mpVI 77-13-4]
  misc_feature (1)..(473): NCBI GI: 261359722 Blast Desc: conserved [Verticillium albo-atrum VaMs.102]
  misc_feature (6)..(500): NCBI GI: 46122535 Blast Desc: FG05645.1 [Gibberella zeae PH-1]
  misc_feature (1)..(480): NCBI GI: 154317090 Blast Desc: BC1G_03447 [Botryotinia fuckeliana B05.10] gi|150844864|gb|EDN20057.1| BC1G_03447 [Botryotinia fuckeliana B05.10]
  misc_feature (1)..(479): NCBI GI: 39951627 Blast Desc: MGG_01456 [Magnaporthe grisea 70-15] gi|145020708|gb|EDK04837.1| MGG_01456 [Magnaporthe grisea 70-15]
  misc_feature (7)..(473): NCBI GI: 156049119 Blast Desc: SS1G_08266 [Sclerotinia sclerotiorum 1980] gi|154692665|gb|EDN92403.1| SS1G_08266 [Sclerotinia sclerotiorum 1980]
  misc_feature (1)..(495): NCBI GI: 70996194 Blast Desc: conserved [Aspergillus fumigatus Af293] gi|66850487|gb|EAL90814.1| conserved [Aspergillus fumigatus Af293] gi|159131605|gb|EDP56718.1| conserved [Aspergillus A1163]
MASGHNDPKLLYAIPGVSAYHLAYGKEEALTPGGPQTLSLLMVPTSSPFADPSSFDARDGAPPEDFYLHLHLPPELDIPLPATTQIYHQPPTSYLIPRWDLGPDSGAFTRLEFPSVGTRKGLQEDVDTFETILAQCTAFLERAPPPRTAKIDKEKEKPSSTSPSATRSPTGVSKTGSKSKAQASSSARSEKLPAYNPAEYKPGEGYVQGSHSSAHGGQIVLIDEEDGSVIGELTDGFQVVESGVKPGSKDPVEITLPTEGNQLAVVPASTESIEQELHPAYKKSFIVSKAAYASRLIITTSDLVSNAMASGSDSFVKNTKAANNPLTFKPTTHERVRRIGKFSGSVAEASSKTVGQVTKVAQNLGAHLAGRGYKDKSGTRGYGPDGQPLDTFKPGLLNKSLMAFSTVADGIEQASRSLLTSASSSATTVVTHRWGSEAGELSKHLGSSVKSVGLVYIDVTGVSRRAVIKAVGKGMVVGKVNIGNNQTADVIVGGEESTAIVRNESTPLIKDSASISGASTKQTSKH

SEQ ID NO: 7920 - DNA, 2627 bp, Muscodor strobelii
  misc_feature: SGI EST ID NO. CUFF.19614.2
  misc_feature: Variant of the nucleotide sequence at SEQ ID NO 7918
tagctactgacatctactgggaatagtagtatagcagttgggcgatgccttcaaatattacaagacttctccccttgcctctatatgtgccaattggttgcggtgtcttttctgacttataaagataatgccagcccagaccatactccagcgactcttttctcaggcacctactttaaggttggacgtaatggacgatggaagatgtataccttacgtttcgtcccaggtttattattagatttctaagagtagtgttctcgcatgtgttcggcgcattctgtaattaggaaggtctgcatggtgatagtaggacgatgggatgataggagacctcagttccaagcacttggctcggggcgcttgcctcttcccggactatcgtgaaacaagcaggacaagagatgctgttggtctgtagctttgttggtccacaattactgcaattcactcatgccaagcaaccaagtgacatcacatttctgattgctcgttggggaatgcgacgcccacagcgccctcccccaccctcgacagctttaagcgccgtggttgcacaccacctatcagaacatcttccattttctattttcgtctctctcgtagttctggagactcttctgtacaccggcatgcaatatatatcctaggtactgcttgtcttgcatttgccgcttttccgctctccgcgcgggtccgcatagacctcccatcgccgacccctccagaccggtcaacccaagttgcgccctgctctttgcgccttgcgccgttgccgttgccggccattgcagattacagcaacatggcatctggccacaatgacccgaagctgctctatgccatcccgggcgtgtctgcctaccatcttgcgtacggcaaagaagaggccttgacgccgggcggcccccagactctgtctctgttgatggttcccacttcttcccctttcgccgatccctcgtccttcgatgcgcgcgatggtgcgccgcctgaggacttctacctccacctgcacttaccgccggagctcgatataccgctccctgcaacgacacagatctaccaccagccgcccacaagttatctgatcccacgatgggatctagggccggatagtggtgccttcactcgtctagagtttccatcggtcgggactcgcaaaggtctgcaggaagatgtcgatacatttgagacaatcctagcgcagtgtactgccttcctcgagagggctcctccgccccggactgccaaaatagataaagaaaaagaaaagccgtcctcgacgtcaccatcagcaacgaggtctcctaccggtgtttccaagacaggctccaagtcaaaagcgcaggcttcgtcgtccgcgcggagcgaaaagcttcccgcctataatccggctgagtacaagcctggcgagggctacgtacaagggagtcacagttctgcccatggcggccagattgtgctgattgatgaggaagacgggagtgttattggcgaactaaccgatggctttcaagttgtcgagtcgggagtaaagccggggtcgaaggatccggtggagataaccttaccaaccgaaggaaaccagcttgccgttgttccggcttcaacggaatccatcgaacaggagttgcatcccgcgtataagaaatcatttatcgtatcgaaagctgcgtacgcctcgcgactaatcatcactacgtcggacttagtttccaacgctatggcgagcggctctgacagctttgtcaagaacaccaaagcggcaaataaccctttgactttcaagcccaccacgcatgaaagagttcgccgaattggaaaattctctggaagtgtcgccgaggcgtcttctaagaccgtcggacaagtgacaaaggtggcgcagaatcttggagcgcacctcgccgggcgaggctataaggacaaatccggaacccgaggctatggtcccgacggtcaacctttggacacgttcaagcctggcttgctgaataagagcttgatggctttctctactgtcgcagacgggattgaacaggcatctcggagcttacttacttctgcttcttcgtcagctacaacagtggtcacgcaccgttggggttcggaagctggtgagctctccaagcatctcggttctagtgtcaagagtgtgggcctcgtatatatcgacgtcactggcgtttcccgacgtgccgttataaaggctgtagggaaagggatggttgttggcaaggttaatatcggcaacaatcaaacagcagacgtaattgtgggcggcgaagagtccactgccattgtaagaaatgagtcgacgcctttaatcaaagactcggctagtatcagcggcgcgtccacaaaacaaacgtcgaagcactagcgaatcggtgttgtttgaaatacctttgataattacctcatatagattctacgttgctttattgttcgcactttgtgaacaagccacacataaatcgaagtccacctgtacacatatcaggcagacgaacaagattttgtaaaaccacaaattttctgcatctatgtcctctcagtttcggtaactgggattagggtcctaattcaaccataactactaataataggtagctgaaagctgg

SEQ ID NO: 7921 - DNA, 660 bp, Muscodor strobelii
  misc_feature: SGI cDNA ID NO. 562415
  misc_feature: Elevated expression when VOC is produced
  misc_feature: Encodes the peptide sequence at SEQ ID NO 7922
atggcgagcggctctgacagctttgtcaagaacaccaaagcggcaaataaccctttgactttcaagcccaccacgcatgaaagagttcgccgaattggaaaattctctggaagtgtcgccgaggcgtcttctaagaccgtcggacaagtgacaaaggtggcgcagaatcttggagcgcacctcgccgggcgaggctataaggacaaatccggaacccgaggctatggtcccgacggtcaacctttggacacgttcaagcctggcttgctgaataagagcttgatggctttctctactgtcgcagacgggattgaacaggcatctcggagcttacttacttctgcttcttcgtcagctacaacagtggtcacgcaccgttggggttcggaagctggtgagctctccaagcatctcggttctagtgtcaagagtgtgggcctcgtatatatcgacgtcactggcgtttcccgacgtgccgttataaaggctgtagggaaagggatggttgttggcaaggttaatatcggcaacaatcaaacagcagacgtaattgtgggcggcgaagagtccactgccattgtaagaaatgagtcgacgcctttaatcaaagactcggctagtatcagcggcgcgtccacaaaacaaacgtcgaagcactag

SEQ ID NO: 7922 - protein, 219 aa, Muscodor strobelii
  misc_feature: SGI Peptide ID NO. 562415
  misc_feature (5)..(178): NCBI GI: 171683385 Blast Desc: protein product [Podospora anserina] gi|170941652|emb|CAP67306.1| protein product [Podospora anserina]
  misc_feature (5)..(172): NCBI GI: 85108714 Blast Desc: NCU06989 [Neurospora crassa OR74A] gi|28924239|gb|EAA33393.1| conserved [Neurospora crassa OR74A]
  misc_feature (5)..(178): NCBI GI: 116194754 Blast Desc: CHGG_03975 [Chaetomium globosum CBS 148.51] gi|88179888|gb|EAQ87356.1| CHGG_03975 [Chaetomium globosum CBS 148.51]
  misc_feature (1)..(192): NCBI GI: 256729639 Blast Desc: [Nectria haematococca mpVI 77-13-4]
  misc_feature (1)..(193): NCBI GI: 46122535 Blast Desc: FG05645.1 [Gibberella zeae PH-1]
  misc_feature (1)..(173): NCBI GI: 154317090 Blast Desc: BC1G_03447 [Botryotinia fuckeliana B05.10] gi|150844864|gb|EDN20057.1| BC1G_03447 [Botryotinia fuckeliana B05.10]
  misc_feature (1)..(176): NCBI GI: 39951627 Blast Desc: MGG_01456 [Magnaporthe grisea 70-15] gi|145020708|gb|EDK04837.1| MGG_01456 [Magnaporthe grisea 70-15]
  misc_feature (1)..(173): NCBI GI: 119186445 Blast Desc: CIMG_03270 [Coccidioides immitis RS]
  misc_feature (1)..(173): NCBI GI: 240108566 Blast Desc: CPC735_009160 [Coccidioides posadasii C735 delta SOWgp]
  misc_feature (1)..(200): NCBI GI: 226278838 Blast Desc: conserved [Paracoccidioides brasiliensis Pb01]
  misc_feature: Useful for introducing or modulating the production of volatile compounds
MASGSDSFVKNTKAANNPLTFKPTTHERVRRIGKFSGSVAEASSKTVGQVTKVAQNLGAHLAGRGYKDKSGTRGYGPDGQPLDTFKPGLLNKSLMAFSTVADGIEQASRSLLTSASSSATTVVTHRWGSEAGELSKHLGSSVKSVGLVYIDVTGVSRRAVIKAVGKGMVVGKVNIGNNQTADVIVGGEESTAIVRNESTPLIKDSASISGASTKQTSKH

SEQ ID NO: 7923 - DNA, 2627 bp, Muscodor strobelii; identical to SEQ ID NO: 7920
  misc_feature: SGI EST ID NO. CUFF.19614.2
  misc_feature: Variant of the nucleotide sequence at SEQ ID NO 7921

SEQ ID NO: 7924 - DNA, 1356 bp, Muscodor strobelii
  misc_feature: SGI cDNA ID NO. 562417
  misc_feature: Reduced expression when VOC is produced
  misc_feature: Encodes the peptide sequence at SEQ ID NO 7925
atgtcgaaaggaaaacagaacaacgtatccagctacaccacagacactcgacatacgagacagagctttgactcatacgactcgagaagcacgagcccatcatcgttatgtgatagtcctaggccatcgacgagggactcgagttcaagagctcatcgcttccagtcatcggtctatactcaagacttctcgccaggaaccagcttatatcctcgctcctcggcggagacatattcatcacaagcatcatgtgacgagttggaagatctagagttagaggaggatgacattgagaccccggaaatccccccactacccatatatcgccatgaaatcgaagatattcatgtccggccatcgacaccagaggatttcgcggcgcttttcccgtccatgaataggcttagcatccggcatgacgatctgacgcctgacggcaatatgaatcttcgcgtggacaccatcatctctggtggccgacgtaggaagaccattcagcttttccatctgaggatgtatgacctcaacaaacgcgagttctctcttcgacgctactgtcgcgattccggccgtgaagtttgcaattccaagcgcaaatacatagatccagtcgaagcgcgtcaccctatctcgacggcagtcaagaaccttgctgcccgaccaagccttcaccgcagaacctctagctcgttttcgattaggagtagacctggaacagcctgttcaacctatgcacccgatgatgatctcgcgaacaatcttgcacgctcgcttgcacttgagcaacaaaaacaaaaggctcgattagtaccttctaatacaatcaagctcgagttttctaattatgcccgtgtcgacgttcaacgccgtgggcacagcgccaaaaagtacgagtttgaatggtggcagcacaaatacacatggagaaaagttatagacaagctaactggcacgatctctttccacttattccgtgatggcgacaatgttcctgtcgctcacatggtaccagagacgaggtcaccaaatcaaattgttgttgatgaggatgccggtggctggatccctccgtaccatttctggataagcgatcaaagcctgatcgatgtccaaacagatgttgcagatgtggttgtggcgactggtctcatggccctcgttgacgattgtatcaaatcgaggtggcagcataacaagaagcgcgtccgacgcttcagcttgaccgacgttgagttcagcggtcctcggtcttttgtgcaacaactcttacatcgacgcttttcatcaagttatcaacagcggccccagagcccccagagccctcttcgttatgagaaggctgtggatctatattag

SEQ ID NO: 7925 - protein, 451 aa, Muscodor strobelii
  misc_feature: SGI Peptide ID NO. 562417
  misc_feature (24)..(444): NCBI GI: 116194712 Blast Desc: CHGG_03954 [Chaetomium globosum CBS 148.51] gi|88179867|gb|EAQ87335.1| CHGG_03954 [Chaetomium globosum CBS 148.51]
  misc_feature (20)..(451): NCBI GI: 171683417 Blast Desc: protein product [Podospora anserina] gi|170941668|emb|CAP67322.1| protein product [Podospora anserina]
  misc_feature (58)..(448): NCBI GI: 85107895 Blast Desc: NCU07305 [Neurospora crassa OR74A] gi|28924070|gb|EAA33227.1| [Neurospora crassa OR74A]
  misc_feature (22)..(451): NCBI GI: 261359720 Blast Desc: conserved [Verticillium albo-atrum VaMs.102]
  misc_feature (87)..(431): NCBI GI: 256729820 Blast Desc: [Nectria haematococca mpVI 77-13-4]
  misc_feature (96)..(431): NCBI GI: 46122531 Blast Desc: FG05643.1 [Gibberella zeae PH-1]
  misc_feature (39)..(443): NCBI GI: 145607253 Blast Desc: MGG_12150 [Magnaporthe grisea 70-15] gi|145014842|gb|EDJ99410.1| MGG_12150 [Magnaporthe grisea 70-15]
  misc_feature (39)..(430): NCBI GI: 145607263 Blast Desc: MGG_04117 [Magnaporthe grisea 70-15] gi|145014851|gb|EDJ99419.1| MGG_04117 [Magnaporthe grisea 70-15]
  misc_feature (12)..(446): NCBI GI: 156049127 Blast Desc: SS1G_08270 [Sclerotinia sclerotiorum 1980] gi|154692669|gb|EDN92407.1| SS1G_08270 [Sclerotinia sclerotiorum 1980]
  misc_feature (12)..(450): NCBI GI: 154317082 Blast Desc: BC1G_03443 [Botryotinia fuckeliana B05.10] gi|150844860|gb|EDN20053.1| BC1G_03443 [Botryotinia fuckeliana B05.10]
  misc_feature: Useful for introducing or modulating the production of volatile compounds
MSKGKQNNVSSYTTDTRHTRQSFDSYDSRSTSPSSLCDSPRPSTRDSSSRAHRFQSSVYTQDFSPGTSLYPRSSAETYSSQASCDELEDLELEEDDIETPEIPPLPIYRHEIEDIHVRPSTPEDFAALFPSMNRLSIRHDDLTPDGNMNLRVDTIISGGRRRKTIQLFHLRMYDLNKREFSLRRYCRDSGREVCNSKRKYIDPVEARHPISTAVKNLAARPSLHRRTSSSFSIRSRPGTACSTYAPDDDLANNLARSLALEQQKQKARLVPSNTIKLEFSNYARVDVQRRGHSAKKYEFEWWQHKYTWRKVIDKLTGTISFHLFRDGDNVPVAHMVPETRSPNQIVVDEDAGGWIPPYHFWISDQSLIDVQTDVADVVVATGLMALVDDCIKSRWQHNKKRVRRFSLTDVEFSGPRSFVQQLLHRRFSSSYQQRPQSPQSPLRYEKAVDLY

SEQ ID NO: 7926 - DNA, 7337 bp, Muscodor strobelii
  misc_feature: SGI EST ID NO. CUFF.19824.1
  misc_feature: Variant of the nucleotide sequence at SEQ ID NO 7924
cgagctttggatgtaacagcaaggaggaaaattgatggatgatgcgatccaggcagtgttggtgagcaccaattggtcaacggctcatcattgtatgatgatgttgtggcgcattgtacgattgctcaacttccgcaatcgctgacgagtagaatgctattcatcatacattcagacgaaccgaaaggtttgccgacaattgtcctcgttggagcccatcgttgcgatggacatccccatagtgcttgccgagtatctggaaagggatgtatgcattgtgacctgaccggacgttatgtcctttctcggcgacacgtggagtgttaccaaagtcgacaaccaaccgtgaaagtctctgcatcgcagcctcaggaaaggacgttactggtgctgaatcacgtgctcggacatgcttgggaaagcctgggatctgacgtgttagagtcgggcccattccatggatctctgaacggcgaatgagggcatgccacacgcctcaacacgcctaccaaaggggagcatcatgcagcagtgcggaaggccgaaaccgtatctagatgccaagtcaaggcgaaggagaattgagcaggtactatttcacgaagagtctgaaacgactctggatgtcatgctctacctagtaaatgaacgctagtggatgctactattcaggtcgtgcgaagcatcccgacacgaaggtaatgcgaagatgtgaagatagaagcccaatgcagttcttgtcatgtgacaggaccaaatgaagcatcttatcatgccctctgtaagttgaaattctgggatatgaaaatgagatggattcgagaataaattagtaaatgccatgctagtaggtatagaggtagcaaggttcgacatcctcgtgtggccgacatgccgactgcattgatcgtaggagctgtagatatcctgaaattgctctttgtaatcaagggaaacgcgtgagttcgcgtggcagggaaagactacagtacagggggaagctttcatccaaaaggccgaatgtctctcggcatagtcgctggacatttcctggcgaagatagtaatagagatagtcgaaccatctgtaaccagtgggcgaaagcctcggcatgcgccttttgccgccattggcaccctggccacagccattctgacgaggaaaagattgcgcgaagattaacacggagacccgtatgaacccgaatgaggatggaagcgggaataatcgcaatgctcgtagtaattctttcgcaaaatctggagtatgaacctgctcactacaactaagtaacgagagcatcacctcagactggacaattaccatcagcgccaaacacgttccgaaaaatgccacaacctttcaagaaagattgaataagatatcttgtccgtcataatctataaaataggtcaagtcgtaatcatacatctttggtatgcttcatcgtgatgatctcctgatcggctttattcatcgcaccaccgtgtggatgagacatggtatactcttgaaccacctcaagagtatagagaggtagtatcgtgtgatgtttgaccactctaacaagctgagaggatatatgcatgcgctctctactacctaaccgccgtggccgcccgatctcgcgctacctactctacgaagagcgacaaaggatcgggggacagctttctctgccgcccaacgtacaagcagtagattctgcggtcgcccacccccacgcatggagccactcacagcctgttaccacgtcagtagctccccagccgggattcccgccagagccatgacaaaaagcagagtcgcgatccaaacccttgatgcatcactacatctcccgatttgtgcccgctggctctctcaatggccttcaatggctcgccctcgcctggcgagtcgcgagtctgccgtcagctcacccctagcccgcattgtgaagctcaccccctgtacatgatatgttaatccacgtctcttgtcgtgccatgttgctttggtcgacttgttggactataatgggtgctgccctccccaggcgtacacgcacccttccactccgtaggcagtgtttccctttgtcaacagcttattatatgccacgccaataattaagaaagccttatcgtaacgtacgcttgtgttttcccctagcccgagtgtcgaattatagcccaggccagcacactgccattgacaacggcgaaagcaatctaacatcaggctccagcgggtcaaatatctcgaaacgcagcttctgcttgttcggcccacttcatccctcatctcacatctcaaggaccctgaaggcgtcaggcacaaactagccagacctaatataagtatcagccgcaccgccggcttggatatttggtgctggaaaggccatttgagacccctacacgttatatcgctgtaaggcttgactgtggcttcatcatgtcgaaaggaaaacagaacaacgtatccagctacaccacagacactcgacatacgagacagagctttgactcatacgactcgagaagcacgagcccatcatcgttatgtgatagtcctaggccatcgacgagggactcgagttcaagagctcatcgcttccagtcatcggtctatactcaagacttctcgccaggaaccagcttatatcctcgctcctcggcggagacatattcatcacaagcatcatgtgacgagttggaagatctagagttagaggaggatgacattgagaccccggaaatccccccactacccatatatcgccatgaaatcgaagatattcatgtccggccatcgacaccagaggatttcgcggcgcttttcccgtccatgaataggcttagcatccggcatgacgatctgacgcctgacggcaatatgaatcttcgcgtggacaccatcatctctggtggccgacgtaggaagaccattcagcttttccatctgaggatgtatgacctcaacaaacgcgagttctctcttcgacgctactgtcgcgattccggccgtgaagtttgcaattccaagcgcaaatacatagatccagtcgaagcgcgtcaccctatctcgacggcagtcaagaaccttgctgcccgaccaagccttcaccgcagaacctctagctcgttttcgattaggagtagacctggaacagcctgttcaacctatgcacccgatgatgatctcgcgaacaatcttgcacgctcgcttgcacttgagcaacaaaaacaaaaggctcgattagtaccttctaatacaatcaagctcgagttttctaattatgcccgtgtcgacgttcaacgccgtgggcacagcgccaaaaagtacgagtttgaatggtggcagcacaaatacacatggagaaaagttatagacaagctaactggcacgatctctttccacttattccgtgatggcgacaatgttcctgtcgctcacatggtaccagagacgaggtcaccaaatcaaattgttgttgatgaggatgccggtggctggatccctccgtaccatttctggataagcgatcaaagcctgatcgatgtccaaacagatgttgcagatgtggttgtggcgactggtctcatggccctcgttgacgattgtatcaaatcgaggtggcagcataacaagaagcgcgtccgacgcttcagcttgaccgacgttgagttcagcggtcctcggtcttttgtgcaacaactcttacatcgacgcttttcatcaagttatcaacagcggccccagagcccccagagccctcttcgttatgagaaggctgtggatctatattagaccacacctccacgaacacacgacagaacccccaaagacgagacgagcatcttgctcgggggcagcattcagagctcacatattacgctcataactacagattcttagcaaacagttgcggttattctctgtttcccttcatgctgcggcgcaaatatattggccttttaatactttcacacttcatccacctattgtcttattattgagatttctcgtacttgccggtggtccattcagttgtggccgagaatcacacaccgtcttcacggctttccatcttttactcttcttctatcgcaggagtattgttgtgtaaaatagacaggcaaataaggggctcggtggcatcagcattatgggggttgggagataagcggcgtttgggaaccacgagtgctttgcacgctatcacgagagctgtaaacagcagcagtttctttgtcgtgggataattgggctaagtttgactaagaccgagctgggaagccttgagaggcaacattatcgagttctcggaaatataacaatctcgaccatgcgtctttttccgtctctcatgattcatttcatttccacctcacatcgccacgtgacatgagatacatctgatccgcctcataaaactacggattagttgccttgaaattctcccatcacacgtataatccgcccactcacatcgaggcgtgaattcccttcgcaactcttgtggcgatctcaacaacgcacatgacctcgagcctcacagaccgtgcatcggtatctccacctcacagttcaatgatccgatttgtacaatttcatgagcttggtaactcaattactcgttggcccaaaccattggccgaaatcaagcttcatcaacaagcgatcaataccgcccacacgtcgaggtcgataacgaccctctccatcatctcctccctgagtaaaatcgtcaacattttcatccagttccatatcagccgcaaagttggagtcgagacttagtgcccgaagtgagacgatgacttcttcgatgccatgcttgacattacgctcaatggcgcgcaattgtgctcttacctctctctcttccgcatcgagatttgaaaatgcatcaacaacaccctcgtctgcctcaagatcaagcgatacccagatatcttggaggcggtgaatatgtgatacgagatgatcgatatggatgaggagatcgtatagaggggccgtgtatgtcgattgtgtcaataaaattcgttttgtcaaggtactcagatacaaggagtgagcagtgctcagactttgcggatcatggttcggtcgcgcgttttgttctgtctggttctcgtctgtgacctggtcgttgacagactcattagggtctttttgggcgaaatcgcggtctccggtcaaccattcgtgaaagttagagctcagaccctcgactacctcaacttgcaaatatgactcagtttctgcaagaaagaataatgctgcgctacacgtgctccaagagcttcgagtaattgaggagcgaagagaccagcgttcacgaagcagtttggttttagcaatgcctccctttgtattgccataaggggctctgggaggtggcggatggtgacgacgtagtgaacttattttccagaggtttgtaagtcggatatgggcgcgtcgaatagacaacagaaatgaattaatcgaagtgtagatttccaggtcggattgagttaaaaagagatcaagaggtgacaatattggtaatgtcaatgttacaggagctgagaaaagaagattacggaacggtgtcggcgcaattgagtcaagaagtccagcgcttgtcctgtcgaaaatctttccctgggctgaattggttgtagacgttggaatctcaagtcgcagtaattctcgaccaagctctagtgcatcatcttcgtccgcatgttgaccttgtattgcacctaaagaggaccaagctctggccaggacagttgccaattcgccttctttgataacgacgttgccaattccaggtacgcttcgtttttcataaacaagattgtccgcccttcgccaacggccgcggatcttctcatcagcttgttggatgagagccatagcgaattcgccgcgaccaatgagaaaaaattgccgaagaacaacaagtatttcgacgaccttctccaatggtaagagcgatgacaacacagttcttgacagcgttgaccggatactcgagattgcccgagaaaaaacgacattattgatgggagatgacagatgggccagctcttgatgttgcgcagctagacgaccaagatgatcagcggctagactggtgttacctctagaactagtccgatttatcgagacgccgatgaagagcattgacgcagctgtggatggtgccacaaaggaaggcagtaggctttggactattctgtaaccctgttgagaaacgtcaattggtgtacgatctcggctctcaggataatgtacctgattactctcttcacttttctcgtcctggcggatgaagaagtcatattggcccaccaaaggcatccttccatacaagatccaggcggacgtttgcttcagccaagaagtctcagcaacctgaagtaggctttgtgcagtttcggcgatatcagcataaccggtctgtaattcatctcgcagccggtcgagaagttgcgctgcctggcatggcgaaccatcactttctttattgataaattctaccagattgtggagccattccagccgtcttgtccagctagagaacgctccgactacagcggtcagcggcacaatattatatgcaccgacgagggccgtgtctttgcgtaaaatgctttcttcgacctccagaattttgcgttgaaattcggccaggtagcgggacacgatagccgtagacacagcacgacagatcacagaaggatgttcccggctaatttgacttgttgtagctcgcagtttgcaatgaaggtcactcagattcgcggcggtgttcaagagctgcctctctggtggagagatgagcagagacgtatcttcatctgactgggcgtttcttagtaaaggcgacgggtgtcctgacagtgacagcaagatctcgtgcaacatggctgacaggatgaggatgtcgatctacgtaaacagcatcagagtcaaatcgtttcaagatgtcaggtgcgttggctgcagacccttgaaaacgggtgggttcgccttagatcgcgctctgtcgctgacgtcttgaaataaaagcacaacaacaccgaggcattcgtatcggcacatcgaaaccctcgttagtgaccctaatgattgttgacgattgagtcgtggctgatgtcttcacatgtattggtcaaaagccccggtacctaggcgagagagagttcgaagtcgggaaggatgtctaaagagcagtatgtcggctctgttagggacattgtagacacgcgcaataacacatatacatttgtcagccagccggcgagttcgatgcggtagatttctaagtatgagaatatgcaagaactctg

SEQ ID NO: 7927 - DNA, 1128 bp, Muscodor strobelii
  misc_feature: SGI cDNA ID NO. 562418
  misc_feature: Encodes the peptide sequence at SEQ ID NO 7928
atgagtctcccaggagaattgccaccaggcaccaacttgtgcaaaatatcaatcattcctcccccagatggtatgatgcaaaatttcgacgaccccggcattaagtcaattaccacttctgtcggcgtcatcattactgttatctcagttgcttttggtctcggcagactgtgcaataactggcggaaatacagctggactgatttgttcgttcttatagcgatactatcgaacatagcacaccttgtcgtcaacatcgtgtttggccgctatttccgtcacttctggaatgtgcctttgtgctggctcaacgttcaattccagcaggttcagtatgtctgggagactcttctcaacttcggcctattcttctccaagacagcaaccttgataatgttccatgaactgttcgccgtgtcgactccgatgaagagagccatctggattggagtagttttcactttcttgatatactcctccagctttgtcttcattacgtactatggtacaccacacgttggcgaaacgtgggaacagctgggatctgaaactaatggcaccaaagttatctccctatactgggcggttggggaaagtgcggcaaacactttgcttgacgtctatatcttcattttacccctcctaattattccgaagctcaagctttcggtacgcagaaagatgcagctcatggcggtcttcttcgttgctgtactcgctgtcgttgcgagcattggatctcttatcattcgagtgaaatatgtccaactcactaattacgatgcgacctactacactggtgttgtacttactcttaatcttatcgaaatggatatcgccgtcattatatgttcggctcctgcatttaccagactgtttcgcactcatattctcccgtcaccaggagtcagaaagctgcttcgaacagtgggcattaaccgtgacatgaacccgagccacgcggatccgaaccagccacgttctggccagaggaaactgccaaagcaggacagcgtgctcgtgacggatcttcatagtcatcgacaaatcagccaaacaacgcttcttggcaatgacatcgtgattgaaatggagtctgggaaacagatcaaggaggctttatattaa

SEQ ID NO: 7928 - protein, 375 aa, Muscodor strobelii
  misc_feature: SGI Peptide ID NO. 562418
  misc_feature (6)..(300): NCBI GI: 119481749 Blast Desc: NFIA_089630 [Neosartorya fischeri NRRL 181] gi|119409057|gb|EAW19006.1| conserved [Neosartorya fischeri NRRL 181]
  misc_feature (3)..(336): NCBI GI: 242764820 Blast Desc: TSTA_068860 [Talaromyces stipitatus ATCC 10500] gi|218724045|gb|EED23462.1| TSTA_068860 [Talaromyces stipitatus ATCC 10500]
  misc_feature (5)..(309): NCBI GI: 71002194 Blast Desc: AFUA_2G14450 [Aspergillus fumigatus Af293] gi|66853416|gb|EAL93740.1| AFUA_2G14450 [Aspergillus fumigatus Af293] gi|159129833|gb|EDP54947.1| AFUB_030070 [Aspergillus
  misc_feature (12)..(353): NCBI GI: 212538419 Blast Desc: PMAA_097870 [Penicillium marneffei ATCC 18224] gi|210069107|gb|EEA23198.1| PMAA_097870 [Penicillium marneffei ATCC 18224]
  misc_feature (11)..(368): NCBI GI: 242764997 Blast Desc: conserved [Talaromyces stipitatus ATCC 10500] gi|218724081|gb|EED23498.1| conserved [Talaromyces stipitatus ATCC 10500]
  misc_feature (32)..(338): NCBI GI: 238845707 Blast Desc: conserved [Microsporum canis CBS 113480]
  misc_feature (20)..(338): NCBI GI: 50949206 Blast Desc: G protein-coupled receptor alpha [Botryotinia fuckeliana]
  misc_feature (12)..(330): NCBI GI: 238840889 Blast Desc: conserved [Microsporum canis CBS 113480]
  misc_feature (19)..(295): NCBI GI: 242784837 Blast Desc: conserved [Talaromyces stipitatus ATCC 10500] gi|218720621|gb|EED20040.1| conserved [Talaromyces stipitatus ATCC 10500]
  misc_feature (6)..(293): NCBI GI: 169612652 Blast Desc: SNOG_09450 [Phaeosphaeria nodorum SN15] gi|111061595|gb|EAT82715.1| SNOG_09450 [Phaeosphaeria nodorum SN15]
MSLPGELPPGTNLCKISIIPPPDGMMQNFDDPGIKSITTSVGVIITVISVAFGLGRLCNNWRKYSWTDLFVLIAILSNIAHLVVNIVFGRYFRHFWNVPLCWLNVQFQQVQYVWETLLNFGLFFSKTATLIMFHELFAVSTPMKRAIWIGVVFTFLIYSSSFVFITYYGTPHVGETWEQLGSETNGTKVISLYWAVGESAANTLLDVYIFILPLLIIPKLKLSVRRKMQLMAVFFVAVLAVVASIGSLIIRVKYVQLTNYDATYYTGVVLTLNLIEMDIAVIICSAPAFTRLFRTHILPSPGVRKLLRTVGINRDMNPSHADPNQPRSGQRKLPKQDSVLVTDLHSHRQISQTTLLGNDIVIEMESGKQIKEALY

SEQ ID NO: 7929 - DNA, 564 bp, Muscodor strobelii
  misc_feature: SGI EST ID NO. CUFF.19583.0
  misc_feature: Variant of the nucleotide sequence at SEQ ID NO 7927
ttctggaatgtgcctttgtgctggctcaacgttcaattccagcaggttcagtatgtctgggagactcttctcaacttcggcctattcttctccaagacagcaaccttgataatgttccatgaactgttcgccgtgtcgactccgatgaagagagccatctggattggagtagttttcactttcttgatatactcctccagctttgtcttcattacgtactatggtacaccacacgttggcgaaacgtgggaacagctgggatctgaaactaatggcaccaaagttatctccctatactgggcggttggggaaagtgcggcaaacactttgcttgacgtctatatcttcattttacccctcctaattattccgaagctcaagctttcggtacgcagaaagatgcagctcatggcggtcttcttcgttgctgtactgtaagactcctttgcactccgcgtaactccaatctgtctctctgataacttcgtctagcgctgtcgttgcgagcattggatctcttatcattcgagtgaaatatgtccaactcactaattacgatgcgac

SEQ ID NO: 7930 - DNA, 3534 bp, Muscodor strobelii
  misc_feature: SGI cDNA ID NO. 562419
  misc_feature: Encodes the peptide sequence at SEQ ID NO 7931
atggctgccgcgtcattcaaggtcaaggctgtgtatgactatgcgtccagccacgaagacgacctccccttcaacgtcggccagatcatcaccgtcaatgacgatgaggaccccgagtggtacggtggcgagtatgtcgacgacgacggcgtgaagcgcgagggcatcttcccgcggaactttgtcgagaagtacgagcccaccgctcccccgcgtccgacacggcgcaagaaagaagccgagcccgtcgccgcccctcctccgccaccagccgacgatattgctcccgagacataccccgtgcatgctcctgaagatgctcctatagagcatgctactgctacgaacgtgcctgttccagagccccgagcgccttcgccggtggaagagacccggccgatcgagcccccatctattccagtcgccaacccgcccgagattgcctctgtgcccgcaccggctcctattgagcccccaagagcccgacaccgtcagtcctccgcccgtcgctgctccccagccgaagcctgcgccgacccgtgcccggcccgccccccggtgtcgcagaaaccaagcagcaatgccttcaaggaccgcatcgctgccttcaacaagcccgcggcacctcccgtggcgcctttcaagcctggtgggctcggttccggttccggctccggctctggattcatcaggaagcctttcgttgcgccaccgcccagtcgtaacgcttttgtgcctccgccgcgcgatgtacccaccgctaaggtataccgacgtgaggaggatcccgaaattaaagaagcagaggctgagtcgcaagagaatgccgaaaaagctgggcttgttccaggtgtaagtgctgagccgcaaggcgaggatcagcccaagcccactacactcaaggaacgcatcgccttgctccagaagcagcaggccgaggccgcgcaaaggcacatggacgcagccacgaagaaggagaagcctaaacgtcccccgaagaagcgcatggacagcgaaggtctccaggagccgcacgagacggcaacgactgaggaagcggcggcagaggtaccactaccgccactagagcgtaaatctacagccgagacaagtggcaaagcttccatggatgagccccgctcctcgcggccgtcattgaccatccgtcgaaaatccactggtctggcggaaaatgacggcaacgaggcagatatgtcgggtgctggcgataccacagaaggccaagaagatcttacggaacgtgatgacacggatgaaaagccaactccacttgcccgtcctgcccctgactctcccgctgtggaccaggagcccgcgggagaggaggacgaggaggaagacgacgacgttgatccagaagtccggcggaaggaggaactacgtgcgcgtatggcaaagatgagtgggggcatgggaatggccggcatgtttggtcccccggggatgatgccgcttggaggcggcggcaggaaacccaaacctcccgcgcctgtcgaacgacgtcccagcgaattgtccgagggcccatcgtctccaagaatggctgcaccgcctatgatgatggctcttcctggcatgggcaagccaaaacccgtggaggaggaggcacctgacaacgaagcagctgaagactctccgacggaagatattacgccagtcccaactattcttcatgcttcagaaactccgtctttcacttctgctccaccgcctccagttcccggtggaagaccggcaccgcctccgatacccgctgattctcgacctccacctccaccgccgcctgctgctgtggcatcgcctagcataggctcagaatctgacgacgaactgtcggagaatccgcctcttgagacgcccaaaggcgagagtccttcaaggagccgggtaccacctcccatacctgtagcgtcgcctcctgtgcccacttcacctcgcatgtcaattgacaagcgcacttcgtccattggagagggaatgtccccaacgtcgcctggcctatcccaacaacaaagtaagaggaacagccgacctccacctcctattccaggcgctgctccgcccataccaggtcaagcacgaccgccaccaccgcctcctccaggtactgcaccgagccgtacttctaccagcgatgagcgagtgacgcccatgcagcccggtcgcttggacaatggagaagagggcgaagttactgagtatgagggtgattatgacacagacattggatcttctgtgcatcacaaagacgctctcaaggcccacgctagagactcaagcattgatactagcactccgctacagtccccggccgccgagcgacgtcctaccatgccgcctccaattccaagtggcagcatacctagagccgctccgccgccgatccccagccagcccgcacccagttcaagagtatcagtagatgctcctcgggcggctccgccgccgccgccgccacagccgaaacagagtgcatattcttatgatgacgatgattatgatccttacaactacaatgccatggaaactccccggaatcattccgtgccagtatctcgcagctcaaccatgcatgaggaaattaatatgggaacacggtctgaagttgcaccttatggatctccgccacctccgccgccaccacaatcggcgtcccgggctccccctagaaaatctcttgatgttctgcgaacgtcaaccggaagacgatcagtagatgctgggcggccatcgatggacactagcttcatagccaatgatgtcgatttaggcattcagtcgcagtggtggctcgcttcaaatggcattcctcccgtcttccaaggacgaagagacatattcaccgaaagtacggaatcgacagccatagaagatgggaggaacatggtcacaaagcagcttttcgtattattccatgactattctcaaactatcattaccagtcactttgatcctggagacccgtctcaaaccgaagttgatcaacgccacgagcctcctccgcgtacactacgacaagacgagctcgaggatgcctacgaaagctttgggaggaagctcgccagctcggtcgcttcaaagaaagactcggtcatcggcgacgggaaaccccaatctcttgttcatgagcttcttcgacctatgaaaggagcactaccgcctattggcactcgtgcatatggcgctctcgtgtactcaaacatggccaatgccgcgacccagctcaatgatgagattcggccgggtgatattgtgtcaatacgtaatgccaaattccaaggaaagcatggcgcaatgcatcagaagtattcgatcgaagtgggcaagccagatcacgtagccattgttgccgagtgggacggtacgaagaagaaggtgcgggcatgggagcaaggccgagaaagcaaaaaagtcaagcaagagagttacaagctggatgacctgcggagtggcgaggtcaagatctggcgagtcatgccacgaacttgggttgggtggaggtcttcggattag

SEQ ID NO: 7931 - protein, 1177 aa, Muscodor strobelii
  misc_feature: SGI Peptide ID NO. 562419
  misc_feature (6)..(65): Pfam Id: PF00018 Pfam Desc: SH3 domain
  misc_feature (7)..(65): Pfam Id: PF07653 Pfam Desc: Variant SH3 domain
  misc_feature (185)..(1173): NCBI GI: 145607261 Blast Desc: MGG_04116 [Magnaporthe grisea 70-15] gi|145014850|gb|EDJ99418.1| MGG_04116 [Magnaporthe grisea 70-15]
  misc_feature (173)..(1171): NCBI GI: 171683405 Blast Desc: protein product [Podospora anserina] gi|170941662|emb|CAP67316.1| protein product [Podospora anserina]
  misc_feature (1)..(1175): NCBI GI: 71001368 Blast Desc: SH3 domain protein [Aspergillus fumigatus Af293] gi|66853003|gb|EAL93327.1| SH3 domain protein [Aspergillus fumigatus Af293] gi|159129440|gb|EDP54554.1| SH3 domain protein
  misc_feature (1)..(1175): NCBI GI: 119480971 Blast Desc: SH3 domain protein [Neosartorya fischeri NRRL 181] gi|119408668|gb|EAW18617.1| SH3 domain protein [Neosartorya fischeri NRRL 181]
  misc_feature (1)..(1173): NCBI GI: 258575815 Blast Desc: [Uncinocarpus reesii 1704] gi|237902355|gb|EEP76756.1| [Uncinocarpus reesii 1704]
  misc_feature (1)..(1173): NCBI GI: 225556179 Blast Desc: SH3 domain-containing protein [Ajellomyces capsulatus G186AR]
  misc_feature (187)..(1175): NCBI GI: 115396018 Blast Desc: conserved [Aspergillus terreus NIH2624] gi|114193217|gb|EAU34917.1| conserved [Aspergillus terreus NIH2624]
  misc_feature (187)..(1173): NCBI GI: 119188627 Blast Desc: CIMG_04361 [Coccidioides immitis RS]
  misc_feature (187)..(1173): NCBI GI: 240111536 Blast Desc: SH3 domain containing protein [Coccidioides posadasii C735 delta SOWgp]
  misc_feature (185)..(1173): NCBI GI: 67539622 Blast Desc: AN5981.2 [Aspergillus nidulans FGSC A4] gi|40738540|gb|EAA57730.1| AN5981.2 [Aspergillus nidulans FGSC A4] gi|259479836|tpe|CBF70424.1| TPA: SH3 domain protein nidulans
MAAASFKVKAVYDYASSHEDDLPFNVGQIITVNDDEDPEWYGGEYVDDDGVKREGIFPRNFVEKYEPTAPPRPTRRKKEAEPVAAPPPPPADDIAPETYPVHAPEDAPIEHATATNVPVPEPRAPSPVEETRPIEPPSIPVANPPEIASVPAPAPIEPPRARHRQSSARRCSPAEACADPCPARPPVSQKPSSNAFKDRIAAFNKPAAPPVAPFKPGGLGSGSGSGSGFIRKPFVAPPPSRNAFVPPPRDVPTAKVYRREEDPEIKEAEAESQENAEKAGLVPGVSAEPQGEDQPKPTTLKERIALLQKQQAEAAQRHMDAATKKEKPKRPPKKRMDSEGLQEPHETATTEEAAAEVPLPPLERKSTAETSGKASMDEPRSSRPSLTIRRKSTGLAENDGNEADMSGAGDTTEGQEDLTERDDTDEKPTPLARPAPDSPAVDQEPAGEEDEEEDDDVDPEVRRKEELRARMAKMSGGMGMAGMFGPPGMMPLGGGGRKPKPPAPVERRPSELSEGPSSPRMAAPPMMMALPGMGKPKPVEEEAPDNEAAEDSPTEDITPVPTILHASETPSFTSAPPPPVPGGRPAPPPIPADSRPPPPPPPAAVASPSIGSESDDELSENPPLETPKGESPSRSRVPPPIPVASPPVPTSPRMSIDKRTSSIGEGMSPTSPGLSQQQSKRNSRPPPPIPGAAPPIPGQARPPPPPPPGTAPSRTSTSDERVTPMQPGRLDNGEEGEVTEYEGDYDTDIGSSVHHKDALKAHARDSSIDTSTPLQSPAAERRPTMPPPIPSGSIPRAAPPPIPSQPAPSSRVSVDAPRAAPPPPPPQPKQSAYSYDDDDYDPYNYNAMETPRNHSVPVSRSSTMHEEINMGTRSEVAPYGSPPPPPPPQSASRAPPRKSLDVLRTSTGRRSVDAGRPSMDTSFIANDVDLGIQSQWWLASNGIPPVFQGRRDIFTESTESTAIEDGRNMVTKQLFVLFHDYSQTIITSHFDPGDPSQTEVDQRHEPPPRTLRQDELEDAYESFGRKLASSVASKKDSVIGDGKPQSLVHELLRPMKGALPPIGTRAYGALVYSNMANAATQLNDEIRPGDIVSIRNAKFQGKHGAMHQKYSIEVGKPDHVAIVAEWDGTKKKVRAWEQGRESKKVKQESYKLDDLRSGEVKIWRVMPRTWVGWRSSD

SEQ ID NO: 7932 - DNA, 4369 bp, Muscodor strobelii
  misc_feature: SGI EST ID NO. CUFF.19646.0
  misc_feature: Variant of the nucleotide sequence at SEQ ID NO 7930
gtgagctccgcccttccagacaccaccaagatccgccggcagaagccaggcgtcacaccttcatgcgctgacgtcgacctgcctgcacttgggagctacgtcgttacaactcgcagcctagtcgggtctgctcactgctcagcctccgagcctccatccatagtgccatccagagttgcatcctgtcgagcaagtcccatgccgagggtccatcccacagcccatagtcacagcccatccgtacttgcagcgatatttgtagcttgctttgactcgggttggccatcgtaattaaccccgaaacacacacctcctccgcactgcatcccagcaccagcctagctgccatcccgaccctcattagcgactagtagctaaaagtaataactacataccaactacctgtctcctcacgtctacgccacttttgtgttcgcaaccgcatcagatagtgcccattcagcaacagtctaattacaagccagtcacgatcttttcgtccaccttgtcgagcctcagcactgtccccaacatcgtcagacccgcaggcagccagcgtacggcgtccaggtacaatggctgccgcgtcattcaaggtcaaggctgtgtatgactatgcgtccagccacgaagacgacctccccttcaacgtcggccagatcatcaccgtcaatgacgatgaggaccccgagtggtacggtggcgagtatgtcgacgacgacggcgtgaagcgcgagggcatcttcccgcggaactttgtcgagaagtacgagcccaccgctcccccgcgtccgacacggcgcaagaaagaagccgagcccgtcgccgcccctcctccgccaccagccgacgatattgctcccgagacataccccgtgcatgctcctgaagatgctcctatagagcatgctactgctacgaacgtgcctgttccagagccccgagcgccttcgccggtggaagagacccggccgatcgagcccccatctattccagtcgccaacccgcccgagattgcctctgtgcccgcaccggctcctattgagcccccaagagcccgacaccgtcagtcctccgcccgtcgctgctccccagccgaagcctgcgccgacccgtgcccggcccgccccccggtgtcgcagaaaccaagcagcaatgccttcaaggaccgcatcgctgccttcaacaagcccgcggcacctcccgtggcgcctttcaagcctggtgggctcggttccggttccggctccggctctggattcatcaggaagcctttcgttgcgccaccgcccagtcgtaacgcttttgtgcctccgccgcgcgatgtacccaccgctaaggtataccgacgtgaggaggatcccgaaattaaagaagcagaggctgagtcgcaagagaatgccgaaaaagctgggcttgttccaggtgtaagtgctgagccgcaaggcgaggatcagcccaagcccactacactcaaggaacgcatcgccttgctccagaagcagcaggccgaggccgcgcaaaggcacatggacgcagccacgaagaaggagaagcctaaacgtcccccgaagaagcgcatggacagcgaaggtctccaggagccgcacgagacggcaacgactgaggaagcggcggcagaggtaccactaccgccactagagcgtaaatctacagccgagacaagtggcaaagcttccatggatgagccccgctcctcgcggccgtcattgaccatccgtcgaaaatccactggtctggcggaaaatgacggcaacgaggcagatatgtcgggtgctggcgataccacagaaggccaagaagatcttacggaacgtgatgacacggatgaaaagccaactccacttgcccgtcctgcccctgactctcccgctgtggaccaggagcccgcgggagaggaggacgaggaggaagacgacgacgttgatccagaagtccggcggaaggaggaactacgtgcgcgtatggcaaagatgagtgggggcatgggaatggccggcatgtttggtcccccggggatgatgccgcttggaggcggcggcaggaaacccaaacctcccgcgcctgtcgaacgacgtcccagcgaattgtccgagggcccatcgtctccaagaatggctgcaccgcctatgatgatggctcttcctggcatgggcaagccaaaacccgtggaggaggaggcacctgacaacgaagcagctgaagactctccgacggaagatattacgccagtcccaactattcttcatgcttcagaaagtaagttatgtaacggcaagaatcgcgagaggatacgagcgtcagcatgttaatatgtattcagctccgtctttcacttctgctccaccgcctccagttcccggtggaagaccggcaccgcctccgatacccgctgattctcgacctccacctccaccgccgcctgctgctgtggcatcgcctagcataggctcagaatctgacgacgaactgtcggagaatccgcctcttgagacgcccaaaggcgagagtccttcaaggagccgggtaccacctcccatacctgtagcgtcgcctcctgtgcccacttcacctcgcatgtcaattgacaagcgcacttcgtccattggagagggaatgtccccaacgtcgcctggcctatcccaacaacaaagtaagaggaacagccgacctccacctcctattccaggcgctgctccgcccataccaggtcaagcacgaccgccaccaccgcctcctccaggtactgcaccgagccgtacttctaccagcgatgagcgagtgacgcccatgcagcccggtcgcttggacaatggagaagagggcgaagttactgagtatgagggtgattatgacacagacattggatcttctgtgcatcacaaagacgctctcaaggcccacgctagagactcaagcattgatactagcactccgctacagtccccggccgccgagcgacgtcctaccatgccgcctccaattccaagtggcagcatacctagagccgctccgccgccgatccccagccagcccgcacccagttcaagagtatcagtagatgctcctcgggcggctccgccgccgccgccgccacagccgaaacagagtgcatattcttatgatgacgatgattatgatccttacaactacaatgccatggaaactccccggaatcattccgtgccagtatctcgcagctcaaccatgcatgaggaaattaatatgggaacacggtctgaagttgcaccttatggatctccgccacctccgccgccaccacaatcggcgtcccgggctccccctagaaaatctcttgatgttctgcgaacgtcaaccggaagacgatcagtagatgctgggcggccatcgatggacactagcttcatagccaatgatgtcgatttaggcattcagtcgcagtggtggctcgcttcaaatggcattcctcccgtcttccaaggacgaagagacatattcaccgaaagtacggaatcgacagccatagaagatgggaggaacatggtcacaaagcagcttttcgtattattccatgactattctcaaactatcattaccagtcactttgatcctggagacccgtctcaaaccgaagttgatcaacgccacgagcctcctccgcgtacactacgacaagacgagctcgaggatgcctacgaaagctttgggaggaagctcgccagctcggtcgcttcaaagaaagactcggtcatcggcgacgggaaaccccaatctcttgttcatgagcttcttcgacctatgaaaggagcactaccgcctattggcactcgtgcatatggcgctctcgtgtactcaaacatggccaatgccgcgacccagctcaatgatgagattcggccgggtgatattgtgtcaatacgtaatgccaaattccaaggaaagcatggcgcaatgcatcagaagtattcgatcgaagtgggcaagccagatcacgtagccattgttgccgagtgggacggtacgaagaagaaggtgcgggcatgggagcaaggccgagaaagcaaaaaagtcaagcaagagagttacaagctggatgacctgcggagtggcgaggtcaagatctggcgagtcatgccacgaacttgggttgggtggaggtcttcggattagtgctttcggatcttgccatcctacgtgcttattcgggtgaatccagatggcagtatcgaagaagcaagttgtagcagtatcgaaagagacagtttcgaatatcatcgattgagttcctgtggacgagatagttatagtggatgataggtattcactttatacaaaacgggggaatatgatatgtcacagacttgga

SEQ ID NO: 7933 - DNA, 738 bp, Muscodor strobelii
  misc_feature: SGI cDNA ID NO. 562420
  misc_feature: Encodes the peptide sequence at SEQ ID NO 7934
atggcaactgcctcgaaaccacccaaggggatcctcaaaaagcccagctcaaccccgacagtcgcccccatcctacagcgcagcaaccccccgccagctgacgcagagacattcaagaacctcatccgtctctaccaaccgagcgactacgacgacctcatcgaggagcgcaacgcaaacaacctatgtggctacgctctatgtcctttaccgaaatcccgtgttaccagcggcggcaccttcaagctcgtcaactatggccgccaggacttcaatatcgtgcctaccaaggagctcgagaagtggtgttcgcagaagtgcgctaagagagccatgtacatcaaggtccagctgagcgagaccgccgcttgggagcgcgcgggaatcgactctatccggattgatctcttcgaggaagaggaaaagcctgtggaccagctggctcgcggggtggaaggcatcagcctggaggctcagcagaagagtgcacagaatgctcgggacctcgccctggagaggggcgacaagatggacaacggcaaaccagcaaagccacctgtccagatcaatttgagagagaaaaaaatcactacgcccgcgcaagagccagtcttggccagcggcacgcaggctcatctacttatggaaggctatcagactacgtttgaagccaaggcacaggacgctaatcaggctggcccatcggctggaggcaccttcaccttgccgtacaggtag

SEQ ID NO: 7934 - protein, 245 aa, Muscodor strobelii
  misc_feature: SGI Peptide ID NO. 562420
  misc_feature (1)..(232): NCBI GI: 46122527 Blast Desc: FG05641.1 [Gibberella zeae PH-1]
  misc_feature (2)..(231): NCBI GI: 256729641 Blast Desc: NECHADRAFT_95438 [Nectria haematococca mpVI 77-13-4]
  misc_feature (28)..(222): NCBI GI: 39944208 Blast Desc: MGG_04115 [Magnaporthe grisea 70-15] gi|145014849|gb|EDJ99417.1| MGG_04115 [Magnaporthe grisea 70-15]
  misc_feature (28)..(219): NCBI GI: 261359715 Blast Desc: DUF408 domain-containing protein [Verticillium albo-atrum VaMs.102]
  misc_feature (28)..(233): NCBI GI: 156049135 Blast Desc: SS1G_08274 [Sclerotinia sclerotiorum 1980] gi|154692673|gb|EDN92411.1| SS1G_08274 [Sclerotinia sclerotiorum 1980]
  misc_feature (28)..(222): NCBI GI: 154317072 Blast Desc: BC1G_03438 [Botryotinia fuckeliana B05.10] gi|150844855|gb|EDN20048.1| BC1G_03438 [Botryotinia fuckeliana B05.10]
  misc_feature (17)..(218): NCBI GI: 169783506 Blast Desc: [Aspergillus oryzae RIB40] gi|83774959|dbj|BAE65082.1| protein product [Aspergillus oryzae]
  misc_feature (17)..(218): NCBI GI: 238493315 Blast Desc: DUF408 domain protein [Aspergillus flavus NRRL3357] gi|220696388|gb|EED52730.1| DUF408 domain protein [Aspergillus flavus NRRL3357]
  misc_feature (28)..(224): NCBI GI: 258575817 Blast Desc: [Uncinocarpus reesii 1704] gi|237902356|gb|EEP76757.1| [Uncinocarpus reesii 1704]
  misc_feature (30)..(218): NCBI GI: 115396010 Blast Desc: conserved [Aspergillus terreus NIH2624] gi|114193213|gb|EAU34913.1| conserved [Aspergillus terreus NIH2624]
MATASKPPKGILKKPSSTPTVAPILQRSNPPPADAETFKNLIRLYQPSDYDDLIEERNANNLCGYALCPLPKSRVTSGGTFKLVNYGRQDFNIVPTKELEKWCSQKCAKRAMYIKVQLSETAAWERAGIDSIRIDLFEEEEKPVDQLARGVEGISLEAQQKSAQNARDLALERGDKMDNGKPAKPPVQINLREKKITTPAQEPVLASGTQAHLLMEGYQTTFEAKAQDANQAGPSAGGTFTLPYR

SEQ ID NO: 7935 - DNA, 438 bp, Muscodor strobelii
  misc_feature: SGI cDNA ID NO. 562421
  misc_feature: Reduced expression when VOC is produced
  misc_feature: Encodes the peptide sequence at SEQ ID NO 7936
atgggtcgcgttcgtacgaagacagtcaagaagtccgccaagggcattattgagcgcttctatccccgcctctgcctcgacttcgacaccaacaagcgtgtcgtcgacgagatcgccatcgtctcgtcccgccgtctccgcaacaagattgccggctatgtcacccatctcatgaagcgtatccagcgtggtcccgtccgcggtatctccttcaagctgcaggaagaggagagagagcgcaaggatcaatacgtccccgaggtctccgctctcgacttcgcccagaacaccgagcatggccagctcgacatcgatggcgagaccaaggacctgctcaagcacctcggcttcgactcgatccccgtcaacgttgtccccgttgtccagcagcagagcatcgagcgcccccgccgattcggcgaccgcccccagcggtaa

SEQ ID NO: 7936 - protein, 145 aa, Muscodor strobelii
  misc_feature: SGI Peptide ID NO. 562421
  misc_feature (1)..(128): Pfam Id: PF00833 Pfam Desc: Ribosomal S17
  misc_feature (1)..(145): NCBI GI: 85104930 Blast Desc: 40S ribosomal protein S17 [Neurospora crassa OR74A] gi|133828|sp|P27770.1|RS17_NEUCR RecName: Full=40S ribosomal protein S17; AltName: Full=CRP3 gi|168796|gb|AAA33579.1| protein
  misc_feature (1)..(145): NCBI GI: 169620730 Blast Desc: SNOG_13569 [Phaeosphaeria nodorum SN15] gi|111057896|gb|EAT79016.1| SNOG_13569 [Phaeosphaeria nodorum SN15]
  misc_feature (1)..(145): NCBI GI: 171683401 Blast Desc: protein product [Podospora anserina] gi|170941660|emb|CAP67314.1| protein product [Podospora anserina]
  misc_feature (1)..(145): NCBI GI: 261359714 Blast Desc: 40S ribosomal protein S17 [Verticillium albo-atrum VaMs.102]
  misc_feature (1)..(145): NCBI GI: 256729822 Blast Desc: [Nectria haematococca mpVI 77-13-4]
  misc_feature (1)..(145): NCBI GI: 189194047 Blast Desc: 40S ribosomal protein S17 [Pyrenophora tritici-repentis Pt-1C-BFP] gi|187978926|gb|EDU45552.1| 40S ribosomal protein S17 [Pyrenophora tritici-repentis Pt-1C-BFP]
  misc_feature (1)..(145): NCBI GI: 46122525 Blast Desc: RS17_NEUCR 40S ribosomal protein S17 (CRP3) [Gibberella zeae PH-1]
  misc_feature (1)..(145): NCBI GI: 154317070 Blast Desc: 40S ribosomal protein S17 [Botryotinia fuckeliana B05.10] gi|150844854|gb|EDN20047.1| 40S ribosomal protein S17 [Botryotinia fuckeliana B05.10]
  misc_feature (1)..(145): NCBI GI: 156049137 Blast Desc: SS1G_08275 [Sclerotinia sclerotiorum 1980] gi|154692674|gb|EDN92412.1| SS1G_08275 [Sclerotinia sclerotiorum 1980]
  misc_feature (1)..(145): NCBI GI: 116194718 Blast Desc: 40S ribosomal protein S17 [Chaetomium globosum CBS 148.51] gi|88179870|gb|EAQ87338.1| 40S ribosomal protein S17 [Chaetomium globosum CBS 148.51]
  misc_feature: Useful for introducing or modulating the production of volatile compounds
MGRVRTKTVKKSAKGIIERFYPRLCLDFDTNKRVVDEIAIVSSRRLRNKIAGYVTHLMKRIQRGPVRGISFKLQEEERERKDQYVPEVSALDFAQNTEHGQLDIDGETKDLLKHLGFDSIPVNVVPVVQQQSIERPRRFGDRPQR

SEQ ID NO: 7937 - DNA, 2073 bp, Muscodor strobelii
  misc_feature: SGI EST ID NO. CUFF.19596.0
  misc_feature: Variant of the nucleotide sequence at SEQ ID NO 7935
aaacacctgagttttgccgaaagaaacccccacacaaagattctcaattagagcctccaataattgttcgcgaacacttccttcccgccttccgcccagcgacaatttaccatcaccaccaccctccttacgcctcactaacccgtcgacatcgccaatcagtaaatcgtcaagatgggtcgcgttcgtacgaagacagtcaagaagtccgccaagggcattattgagcgcttctatccccgcctctgcctcgacttcgacaccaacaagcgtgtcgtcgacgagatcgccatcgtctcgtcccgccgtctccgcaacaagattgccggctatgtcacccatctcatgaagcgtatccagcgtggtcccgtccgcggtatctccttcaagctgcaggaagaggagagagagcgcaaggatcaatacgtccccgaggtctccgctctcgacttcgcccagaacaccgagcatggccagctcgacatcgatggcgagaccaaggacctgctcaagcacctcggcttcgactcgatccccgtcaacgttgtccccgttgtccagcagcagagcatcgagcgcccccgccgattcggcgaccgcccccagcggtaaatgtacattgcaggaatggatggtttggggttttacggcggttagggcaaaactgggcattgagcctcatcatggcttcacggcgtctacatgaacgatagtacctcctttagggctacgcaaaacaacacgaatttatgaacaataggtgtccctgagtcaggcctgcactcgcagccgacgacggtcgattgccattggttcccatgcagtgtgagtgatgcacccgcgtggccagcaacagaatatctctcttaagatcaatcacaatcctcgggtttgcaaagggatcacgatgccacgaaagccaacgactagaactgtgatgtctccctgcgggtttcaaaatttccgcggctcatgttcgtatgtttggggtatctcgtactctatcctactaccaacaggaacgcctcgtaatgcagtgtcaaacacaaactcaaatgcaggagtaactacctgtacggcaaggtgaaggtgcctccagccgatgggccagcctgattagcgtcctgtgccttggcttcaaacgtagtctgatagccttccataagtagatgagcctgcgtgccgctggccaagactggctcttgcgcgggcgtagtgatttttttctctctcaaattgatctggacaggtggctttgctggtttgccgttgtccatcttgtcgcccctctccagggcgaggtcccgagcattctgtgcactcttctgctgagcctccaggctgatgccttccaccccgcgagccagctggtccacaggcttttcctcttcctcgaagagatcaatccggatagagtcgattcccgcgcgctcccaagcggcggtctcgctcagctggaccttgatgtacatggctctcttagcgcacttctgcgaacaccacttctcgagctccttggtaggcacgatattgaagtcctggcggccatagttgacgagcttgaaggtgccgccgctggtaacacgggatttcggtaaaggacatagagcgtagccacataggttgtttgcgttgcgctcctcgatgaggtcgtcgtagtcgctcggttggtagagacggatgaggttcttgaatgtctctgcgtcagctggcggggggttgctgcgctgtaggatgggctacgagtcaagggatatttggacagaacgatcaaagaatctgaaatctgatcttcgatggcatggcgggaatggatgattttcgcgtgttgagtggctagctcgcgagggctgggctttggtttgtcatgatcagtgacggcgactgtcggggttgagctgggctttttgaggatccccttgggtggtttcgaggcagttgccatagctgtttgttttgccagagcagatcttgcaagctctgatcttattgtgatcgggatctatgagaagaggagaggaggattcgtggtgcatcaagtcccagctctgcagttacagttcaacggcagcg

SEQ ID NO: 7938 - DNA, 1395 bp, Muscodor strobelii
  misc_feature: SGI cDNA ID NO. 562422
  misc_feature: Reduced expression when VOC is produced
  misc_feature: Encodes the peptide sequence at SEQ ID NO 7939
atggcagctcggtcggtctctccgggcgctgcgctcctgaggtcgtcgcgtctgttctccatcccgacgccgatacctgcggcgaccgacgactactcgtctgcgaccaagaactattccgccacggccaccatccccttcccgacccatctgtccatcaccacgccctcgacgtcccgcaacaatggcgattggggcttcaagcgctccttgcccctcaagaccacctccaagcagaccatccccctcatacgccttcgccaagtcgactctaccgagcacgtcaccgacttcgcatctgcctcggaccactccatcaccctcaagaagttccaggagctgaacctgcccatctccatgccccagagcgagacccacaagggccgacccgataagtctgtctttgaggaggcaggcgacatcaccgccctcgactcctccaacatggtccagaccgaggatattcgatggaggtttaagggcccctggctcgccggcatgaccgacggccaattcaaccgctggctccaggacaccgtccgatccaagcgagcagagttcaatctcttcctgaaagaggcctatgcccaagagctaacggacctgcgcgccaaggaggcaacagaagcgcatcttccgactcctccaccactggcagccagcgacatcacggatgcgcagcttgttgagtatctgatagacattcgccaggatcgattggtcttgttccggcacgttagccgctttttcgatctcgcgcctctcccgggcccggccttggtacacaacgtggatcgcatgaagacaggtcgggcgcaaatcatccccaagcccaacccctttagctcgcaaggaccgccgatcactcacccatcggctggtctatcatacctacgaacatcaagcttcgtggataatcacccagtctatggacctcagaaaaatcatcctcctgtcaagggccgaatcctaaagcccgtgaataaatcgacaggcgtacaccatccggtcgttggtgttgctggcttcgtggctgatttcgacaagggcatgtcatcgaacgcgtcgaacaagcaagcggccttgtcacagctgaacctagatggtcggggaggctcgacagtctactacaacacggaatcggcgaccgttggacccactggacgggtgtcgataaaggtccaaagtgcagcgggcggcgatggcagctccagcatgagcgagcttgtgcagcgagagctggtaggcgatggcgagcctcgagtctaccaggaggcgacagagcagagaccttatcggagactgtctcattttcgcaacaccgaaggtcattcgccctctaaacgacctggcacgcacatcgtggggagctcaacgacgtatggtatgtcgtga

SEQ ID NO: 7939 - protein, 464 aa, Muscodor strobelii
  misc_feature: SGI Peptide ID NO. 562422
  misc_feature (1)..(463): NCBI GI: 261359713 Blast Desc: conserved [Verticillium albo-atrum VaMs.102]
  misc_feature (3)..(397): NCBI GI: 39944202 Blast Desc: MGG_04112 [Magnaporthe grisea 70-15] gi|145014846|gb|EDJ99414.1| MGG_04112 [Magnaporthe grisea 70-15]
  misc_feature (3)..(463): NCBI GI: 164424447 Blast Desc: NCU11345 [Neurospora crassa OR74A] gi|157070515|gb|EDO65059.1| NCU11345 [Neurospora crassa OR74A]
  misc_feature (1)..(463): NCBI GI: 256729823 Blast Desc: NECHADRAFT_70976 [Nectria haematococca mpVI 77-13-4]
  misc_feature (1)..(428): NCBI GI: 171683399 Blast Desc: protein product [Podospora anserina] gi|170941659|emb|CAP67313.1| protein product [Podospora anserina]
  misc_feature (1)..(423): NCBI GI: 46122523 Blast Desc: FG05639.1 [Gibberella zeae PH-1]
  misc_feature (1)..(429): NCBI GI: 116194720 Blast Desc: CHGG_03958 [Chaetomium globosum CBS 148.51] gi|88179871|gb|EAQ87339.1| CHGG_03958 [Chaetomium globosum CBS 148.51]
  misc_feature (1)..(397): NCBI GI: 154317080 Blast Desc: BC1G_03442 [Botryotinia fuckeliana B05.10] gi|150844859|gb|EDN20052.1| BC1G_03442 [Botryotinia fuckeliana B05.10]
  misc_feature (1)..(398): NCBI GI: 226288554 Blast Desc: conserved [Paracoccidioides brasiliensis Pb18]
  misc_feature (1)..(434): NCBI GI: 261192314 Blast Desc: conserved [Ajellomyces dermatitidis SLH14081] gi|239589439|gb|EEQ72082.1| conserved [Ajellomyces dermatitidis SLH14081] gi|239615152|gb|EEQ92139.1| conserved [Ajellomyces
  misc_feature: Useful for introducing or modulating the production of volatile compounds
MAARSVSPGAALLRSSRLFSIPTPIPAATDDYSSATKNYSATATIPFPTHLSITTPSTSRNNGDWGFKRSLPLKTTSKQTIPLIRLRQVDSTEHVTDFASASDHSITLKKFQELNLPISMPQSETHKGRPDKSVFEEAGDITALDSSNMVQTEDIRWRFKGPWLAGMTDGQFNRWLQDTVRSKRAEFNLFLKEAYAQELTDLRAKEATEAHLPTPPPLAASDITDAQLVEYLIDIRQDRLVLFRHVSRFFDLAPLPGPALVHNVDRMKTGRAQIIPKPNPFSSQGPPITHPSAGLSYLRTSSFVDNHPVYGPQKNHPPVKGRILKPVNKSTGVHHPVVGVAGFVADFDKGMSSNASNKQAALSQLNLDGRGGSTVYYNTESATVGPTGRVSIKVQSAAGGDGSSSMSELVQRELVGDGEPRVYQEATEQRPYRRLSHFRNTEGHSPSKRPGTHIVGSSTTYGMS

SEQ ID NO: 7940 - DNA, 1804 bp, Muscodor strobelii
  misc_feature: SGI EST ID NO. CUFF.19598.0
  misc_feature: Variant of the nucleotide sequence at SEQ ID NO 7938
cgggctctagcctggccggcccatagaaaattgtcgccgtgtgaacctgttacgttaaacaccagccagcgtgagctacagatacagcttcaagatcgctcacgacttcctcgctgcccaccagctgcgagccagatcgacaatggcagctcggtcggtctctccgggcgctgcgctcctgaggtcgtcgcgtctgttctccatcccgacgccgatacctgcggcgaccgacgactactcgtctgcgaccaagaactattccgccacggccaccatccccttcccgacccatctgtccatcaccacgccctcgacgtcccgcaacaatggcgattggggcttcaagcgctccttgcccctcaagaccacctccaagcagaccatccccctcatacgccttcgccaagtcgactctaccgagcacgtcaccgacttcgcatctgcctcggaccactccatcaccctcaagaagttccaggagctgaacctgcccatctccatgccccagagcgagacccacaagggccgacccgataagtctgtctttgaggaggcaggcgacatcaccgccctcgactcctccaacatggtccagaccgaggatattcgatggaggtttaagggcccctggctcgccggcatgaccgacggccaattcaaccgctggctccaggacaccgtccgatccaagcgagcagagttcaatctcttcctgaaagaggcctatgcccaagagctaacggacctgcgcgccaaggaggcaacagaagcgcatcttccgactcctccaccactggcagccagcgacatcacggatgcgcagcttgttgagtatctgatagacattcgccaggatcgattggtcttgttccggcacgttagccgctttttcgatctcgcgcctctcccgggcccggccttggtacacaacgtggatcgcatgaagacaggtcgggcgcaaatcatccccaagcccaacccctttagctcgcaaggaccgccgatcactcacccatcggctggtctatcatacctacgaacatcaagcttcgtggataatcacccagtctatggacctcagaaaaatcatcctcctgtcaagggccgaatcctaaagcccgtgaataaatcgacaggcgtacaccatccggtcgttggtgttgctggcttcgtggctgatttcgacaagggcatgtcatcgaacgcgtcgaacaagcaagcggccttgtcacagctgaacctagatggtcggggaggctcgacagtctactacaacacggaatcggcgaccgttggacccactggacgggtgtcgataaaggtccaaagtgcagcgggcggcgatggcagctccagcatgagcgagcttgtgcagcgagagctggtaggcgatggcgagcctcgagtctaccaggaggcgacagagcagagaccttatcggagactgtctcattttcgcaacaccgaaggtcattcgccctctaaacgacctggcacgcacatcgtggggagctcaacgacgtatggtatgtcgtgagtctctagacctgtaagatagcggaatcatgtatttatacagttactgagatgtagaagtggttttgcgtcttagtacggagagtacgtctacaatcaagataggatcatgtagctcgtcgaagcgtattggctacacatcacagttgtcaagtcatgtattcacgtttgtatatatatcacttgcatataagacaaggctattatttccagacctgcggctcagactcaaggagactaaaagggccaccaatatattggcttgcaa

SEQ ID NO: 7941 - DNA, 861 bp, Muscodor strobelii
  misc_feature: SGI cDNA ID NO. 562423
  misc_feature: Encodes the peptide sequence at SEQ ID NO 7942
atggacccaattgatcctgctacaggacagctattgcctgctgatgctatccagcgtgtattattcgttatcagcaccgttcatgtttacaatatcccgccgatgacaccaggcaaaggccatctcgccgcatcctggaccgcggatgggaataagcgtcagattttcactgctcggctgcgcgtgcttgagacagccataccacggaaaagagatggcaatgccttagatatcccacactataatggtttagaaaattcattgacatgttttgatacgatagaacaatcggacgaggataaggtttccgcagcggtcgtcctagaggaccctaagaatggccagttgttcgccgctgctccatacacagctaccgccgtcgtcgaacctgtttccgatagttctcggttcttcgctctccgcgttcaggatgaggctggtaggaaagccaccttaggcattggatttgaagagagaagcgatgcgttcgactttagcgtggcgttacaagaggcccagaagactctaggttggccccaaggcggccagcctggcaaaaagccggccacggagagtaaagacactgctgaaaaacgcgacctgagtctcaaagacggggaaacaatcacggtaaatctcccgggacgattctcccgtagcagaccccagccagctcaagaatcgtccggtgctggtctttcgtcattctctctgcctccaccgccctcttcctccgcttcctcacaaggggctggcatacttccaccaccgccatctgcaccattgaccagctcaagagcaaagcgtctgtctgcacaaaacttaggtttcgatgatggaaaattcggcgaatttgcgtag

SEQ ID NO: 7942 - protein, 286 aa, Muscodor strobelii
  misc_feature: SGI Peptide ID NO. 562423
  misc_feature (15)..(242): Pfam Id: PF07933 Pfam Desc: Domain of function (DUF1681)
  misc_feature (1)..(285): NCBI GI: 156049273 Blast Desc: SS1G_08343 [Sclerotinia sclerotiorum 1980] gi|154692742|gb|EDN92480.1| SS1G_08343 [Sclerotinia sclerotiorum 1980]
  misc_feature (1)..(285): NCBI GI: 154317423 Blast Desc: BC1G_03063 [Botryotinia fuckeliana B05.10] gi|150844237|gb|EDN19430.1| BC1G_03063 [Botryotinia fuckeliana B05.10]
  misc_feature (1)..(286): NCBI GI: 46122543 Blast Desc: FG05649.1 [Gibberella zeae PH-1]
  misc_feature (1)..(258): NCBI GI: 261359727 Blast Desc: adaptin ear-binding coat-associated protein [Verticillium albo-atrum VaMs.102]
  misc_feature (1)..(286): NCBI GI: 256729817 Blast Desc: NECHADRAFT_46854 [Nectria haematococca mpVI 77-13-4]
  misc_feature (7)..(286): NCBI GI: 145603394 Blast Desc: MGG_06078 [Magnaporthe grisea 70-15] gi|145011634|gb|EDJ96290.1| MGG_06078 [Magnaporthe grisea 70-15]
  misc_feature (4)..(285): NCBI GI: 85079308 Blast Desc: NCU04345 [Neurospora crassa OR74A] gi|28917385|gb|EAA27090.1| conserved [Neurospora crassa OR74A]
  misc_feature (4)..(285): NCBI GI: 169610750 Blast Desc: SNOG_08482 [Phaeosphaeria nodorum SN15] gi|160702143|gb|EAT83650.2| SNOG_08482 [Phaeosphaeria nodorum SN15]
  misc_feature (4)..(285): NCBI GI: 189205791 Blast Desc: adaptin ear-binding coat-associated protein 2 [Pyrenophora tritici-repentis Pt-1C-BFP] gi|187975323|gb|EDU41949.1| adaptin ear-binding coat-associated 2
  misc_feature (4)..(257): NCBI GI: 261201856 Blast Desc: conserved [Ajellomyces dermatitidis SLH14081] gi|239590239|gb|EEQ72820.1| conserved [Ajellomyces dermatitidis SLH14081]
MDPIDPATGQLLPADAIQRVLFVISTVHVYNIPPMTPGKGHLAASWTADGNKRQIFTARLRVLETAIPRKRDGNALDIPHYNGLENSLTCFDTIEQSDEDKVSAAVVLEDPKNGQLFAAAPYTATAVVEPVSDSSRFFALRVQDEAGRKATLGIGFEERSDAFDFSVALQEAQKTLGWPQGGQPGKKPATESKDTAEKRDLSLKDGETITVNLPGRFSRSRPQPAQESSGAGLSSFSLPPPPSSSASSQGAGILPPPPSAPLTSSRAKRLSAQNLGFDDGKFGEFA

SEQ ID NO: 7943 - DNA, 1348 bp, Muscodor strobelii
  misc_feature: SGI EST ID NO. CUFF.19601.0
  misc_feature: Variant of the nucleotide sequence at SEQ ID NO 7941
ctccaatcaggtcctgtcctcaaaactgacagcttttctgtgctgcagtctgatctcaattaatcctaccaaaagctaaggtagatggtgctcccaattgccgcctaccatattaccacgctctcgcaagcgttacttaaaatgtcgacttatatggtattcagcgagaaggatcaattgcattgcatgggttaaatgatgtgctctttgcctgtcgtcgtattttcaatgcttccgcctgtttcgggcttcgtgaatgtccatctctaccactcctagttcttagctgcctacagtcaatcaagaggttttgtcgtgcgggcatgacctccactcgttcaactcctccgtgcatctcgttgcatgcctcgtatctagacatccccttttgcacactgaatacctgactgccgcatacaacacaatggacccaattgatcctgctacaggacagctattgcctgctgatgctatccagcgtgtattattcgttatcagcaccgttcatgtttacaatatcccgccgatgacaccaggcaaaggccatctcgccgcatcctggaccgcggatgggaataagcgtcagattttcactgctcggctgcgcgtgcttgagacagccataccacggtacgcataaatgcatcttattccacttcaaaccatcgctgtccaggaggatttaatctaacttgcatcgtaaacaatcggacgaggataaggtttccgcagcggtcgtcctagaggaccctaagaatggccagttgttcgccgctgctccatacacagctaccgccgtcgtcgaacctgtttccgatagttctcggttcttcgctctccgcgttcaggatgaggctggtaggaaagccaccttaggcattggatttgaagagagaagcgatgcgttcgactttagcgtggcgttacaagaggcccagaagactctaggttggccccaaggcggccagcctggcaaaaagccggccacggagagtaaagacactgctgaaaaacgcgacctgagtctcaaagacggggaaacaatcacggtaaatctcccgggacgattctcccgtagcagaccccagccagctcaagaatcgtccggtgctggtctttcgtcattctctctgcctccaccgccctcttcctccgcttcctcacaaggggctggcatacttccaccaccgccatctgcaccattgaccagctcaagagcaaagcgtctgtctgcacaaaacttaggtttcgatgatggaaaattcggcgaatttgcgtagtggttgaaactggcactgtcatttacgtagatgctgctaaaatttaatgcaaaatgttcaaacatgaa

SEQ ID NO: 7944 - DNA, 1239 bp, Muscodor strobelii
  misc_feature: SGI cDNA ID NO. 562424
  misc_feature: Reduced expression when VOC is produced
  misc_feature: Encodes the peptide sequence at SEQ ID NO 7945
atggcatccacaatagcatcttcctcatctgcggctctcacatttgatctccttgcgcgttgctcaactactcgagcgagagcttcgcttttgacacttccccatggctctgttccgttacccatattcatgcccgtcgcaacccaagcatcgctgaaaggtctgacatcagagcaactcgaggagacgggatgtcgactctgcctcaacaacacctatcatttgggtctcaaacctggccaagaagcgctggacgctatcggcggggcgcataagttgcaaggatgggaccacaacttgttgactgacagcggaggtttccaaatggtcagtcttctaagtctagcaaacatcaccgaagaaggcgtcagatttctgagcccgcatgacggcacacccatgcttctgacgccagagcactctatatcgctccagaacaccatcggcagtgacataatgatgcagttggacgacgtcctcgtcactacctcccccgatcataaacgtatgcgagaagcaatggaacgaagcgttcggtggcttgaccgatgcattgccgctcacaagaaccccgatcgacaaaatctgttctgcattattcagggagggctagataccgaaatgcgcaaggagtgttgcaaggagatggtcgcgcgagacactccgggaattgccataggcgggctgagtggtggtgaggccaaacccgatttctgtcgcgtcgtaaagacatgtaccgaactgctgcccgagttgaaaccccgatatgtcatgggtattggctatcccgaggatctcgtcgtgagcgtggctttaggcgccgacatgttcgactgtgtatggccgacgcgtacggcaaggtttggcagcgctattacgaggcatggtgtactcaaaatcaagaggcctgagtatgcgaacgatttcggtccaattgaagaagggtgcggatgcgtttgctgcagagagggtgagggtgccctcggtataacacgcgcatttgttcatcacaatgtagccaaggagacagtctcagcacatctgctttccatacacaatgtgtggtaccagctgaatctcatgcgagaagtacgaaatgccatcattgcagatgagtaccctgctttcatacagcagttttttgcaaacatatatccagacaggtcggcctatccggaatgggccgtagatgctctgcggggagtgggcgtcgacttgcgaccagatagcaatatataa

SEQ ID NO: 7945 - protein, 412 aa, Muscodor strobelii
  misc_feature: SGI Peptide ID NO. 562424
  misc_feature (139)..(382): Pfam Id: PF01702 Pfam Desc: Queuine tRNA-ribosyltransferase
  misc_feature (1)..(406): NCBI GI: 164424449 Blast Desc: queuine tRNA-ribosyltransferase [Neurospora crassa OR74A] gi|157070516|gb|EDO65060.1| queuine tRNA-ribosyltransferase [Neurospora crassa OR74A]
  misc_feature (23)..(406): NCBI GI: 116194722 Blast Desc: conserved [Chaetomium globosum CBS 148.51] gi|88179872|gb|EAQ87340.1| conserved [Chaetomium globosum CBS 148.51]
  misc_feature (1)..(406): NCBI GI: 256729642 Blast Desc: [Nectria haematococca mpVI 77-13-4]
  misc_feature (11)..(406): NCBI GI: 156049141 Blast Desc: SS1G_08277 [Sclerotinia sclerotiorum 1980] gi|154692676|gb|EDN92414.1| SS1G_08277 [Sclerotinia sclerotiorum 1980]
  misc_feature (22)..(409): NCBI GI: 39944198 Blast Desc: conserved [Magnaporthe grisea 70-15] gi|145014840|gb|EDJ99408.1| conserved [Magnaporthe grisea 70-15]
  misc_feature (18)..(409): NCBI GI: 46122521 Blast Desc: FG05638.1 [Gibberella zeae PH-1]
  misc_feature (1)..(406): NCBI GI: 171683397 Blast Desc: protein product [Podospora anserina] gi|170941658|emb|CAP67312.1| protein product [Podospora anserina]
  misc_feature (1)..(410): NCBI GI: 255936105 Blast Desc: Pc13g06450 [Penicillium chrysogenum Wisconsin 54-1255] gi|211583699|emb|CAP91714.1| Pc13g06450 [Penicillium chrysogenum Wisconsin 54-1255]
  misc_feature (8)..(409): NCBI GI: 189194039 Blast Desc: queuine tRNA-ribosyltransferase [Pyrenophora tritici-repentis Pt-1C-BFP] gi|187978922|gb|EDU45548.1| queuine tRNA-ribosyltransferase [Pyrenophora tritici-repentis Pt-1C-BFP]
  misc_feature (11)..(409): NCBI GI: 121714365 Blast Desc: queuine tRNA-ribosyltransferase [Aspergillus clavatus NRRL 1] gi|119402947|gb|EAW13367.1| queuine tRNA-ribosyltransferase [Aspergillus clavatus NRRL 1]
  misc_feature (13)..(406): SWISSPROT Homolog: EC 2.4.2.29 tRNA-guanine transglycosylase
  misc_feature: Useful for introducing or modulating the production of volatile compounds
MASTIASSSSAALTFDLLARCSTTRARASLLTLPHGSVPLPIFMPVATQASLKGLTSEQLEETGCRLCLNNTYHLGLKPGQEALDAIGGAHKLQGWDHNLLTDSGGFQMVSLLSLANITEEGVRFLSPHDGTPMLLTPEHSISLQNTIGSDIMMQLDDVLVTTSPDHKRMREAMERSVRWLDRCIAAHKNPDRQNLFCIIQGGLDTEMRKECCKEMVARDTPGIAIGGLSGGEAKPDFCRVVKTCTELLPELKPRYVMGIGYPEDLVVSVALGADMFDCVWPTRTARFGSAITRHGVLKIKRPEYANDFGPIEEGCGCVCCREGEGALGITRAFVHHNVAKETVSAHLLSIHNVWYQLNLMREVRNAIIADEYPAFIQQFFANIYPDRSAYPEWAVDALRGVGVDLRPDSNI

SEQ ID NO: 7946 - DNA, 6163 bp, Muscodor strobelii
  misc_feature: SGI EST ID NO. CUFF.19673.0
  misc_feature: Variant of the nucleotide sequence at SEQ ID NO 7944
tgaggataaaaaatcttcgaacaagggacttcgtcagcacctcgaagtctattcttttgggcagaagagactaattatcgtccagaaatctctgcttcggttatctaagtgacctaaagccgcgtacatgtctatctattaacgttaggtatgattgctacctcttgagatttactgaggttaagtgaaccatgctgaaggacacagctggcgactggcgactggcgtcgagctgctggcaattgctaacactttacccctgcaagaaattgtgtgagctcggtacatcagccgctaaactcagctgcgcaaacatgaggtagcaaaatatgaaaatcggccacttacacacctcgatcaccaacttgtaaatgatagattgactccttaaatctggaagataaagtgctattgtgatcatattggtgttggtcactcattcagcaaatccggtctttgtcatgtcgatcaggaggatggcatccacaatagcatcttcctcatctgcggctctcacatttgatctccttgcgcgttgctcaactactcgagcgagagcttcgcttttgacacttccccatggctctgttccgttacccatattcatgcccgtcgcaacccaagcatcgctgaaaggtctgacatcagagcaactcgaggagacgggatgtcgactctgcctcaacaacacctatcatttgggtctcaaacctggccaagaagcgctggacgctatcggcggggcgcataagttgcaaggatgggaccacaacttgttgactgacagcggaggtttccaaatggtcagtcttctaagtctagcaaacatcaccgaagaaggcgtcagatttctgagcccgcatgacggcacacccatgcttctgacgccagagcactctatatcgctccagaacaccatcggcagtgacataatgatgcagttggacgacgtcctcgtcactacctcccccgatcataaacgtatgcgagaagcaatggaacgaagcgttcggtggcttgaccgatgcattgccgctcacaagaaccccgatcgacaaaatctgttctgcattattcagggagggctagataccgaaatgcgcaaggagtgttgcaaggagatggtcgcgcgagacactccgggaattgccataggcgggctgagtggtggtgaggccaaacccgatttctgtcgcgtcgtaaagacatgtaccgaactgctgcccgagttgaaaccccgatatgtcatgggtattggctatcccgaggatctcgtcgtgagcgtggctttaggcgccgacatgttcgactgtgtatggccgacgcgtacggcaaggtttggcagcgctattacgaggcatggtgtactcaaaatcaagaggcctgagtatgcgaacgatttcggtccaattgaagaagggtgcggatgcgtttgctgcagagagggtgagggtgccctcggtataacacgcgcatttgttcatcacaatgtagccaaggagacagtctcagcacatctgctttccatacacaatgtgtggtaccagctgaatctcatgcgagaagtacgaaatgccatcattgcagatgagtaccctgctttcatacagcagttttttgcaaacatatatccagacaggtcggcctatccggaatgggccgtagatgctctgcggggagtgggcgtcgacttgcgaccagatagcaatatataaagctcttacattcgacttcagccgcttcttcatcacacgctatggcgtagcctaagccccaaattttcagctggagtgccgagtctcttcaggaccaccatgtcatgttgtttcccaaataagctggcaaatggaaattctcaccccgatgtgactttccctacaacctggaagttatcacatgcatgttaggaagaacattcactaaaaataggtctgctcctggcaggatatcgtggggaagtggggctgctaagctttaaatccccgtcgtcgtctgcattctccaaggtcgaatgttcattctcctcagtctatcctgaaagctaccccgctgatgactgcggcgcatcgtcggatcgcatgatcattacgaactcaaatcggcggtgttcttccttgtattacacttgaaagctgtctaaaaggtgatatttgtacttgatttcctgcatccggatcgagagcgcagttttccaatccatcaagctgtgcctaagctagcaacatctgcgccgaggtccatatacttcaacctctcttaaccatggcgtcctcaacgtcgcaaaccacaaaagcattgaacaagttgtcacttgatacccctatcgcctcaacagtatcttcatcgaagacgaaaccaaagtcaaaagcgaagaaagtagcagattcgtgggaagacgacgagagcagcgaagacgaggttgcaactcccgtacagcaggacagtaaaccaggcggcgtgaatgctccgcctccgacacctatatcaccttcttacggtcgtcacggacccgatggcagtaccaacgatgccccgtggctagcgagcagcagttccgggggtgggtcgtattcgtaccaggacgagtctaccagacgacctgagaaaacggatgcagtggcacgtcgtatgattgcgagcgcattaggtgttcgtgcacccagggccaccgaggagcagaaggcgtatgatcgtgctgtgcgcgagcaagagcgcaagagacgtgaagacgagaaggaagttgagcgaaaacggaaagaggaggctgacaaggccaaggccgcaatgtgggatgactagggcaaaaagtcattgtagttgctgcacgtcgttttttcttactcttctatcacgggatcgttcggagtcggttccgttacgtgtgcatctttcgcagtgctttttctcattgctttgcggaggggtcttcatggcataaagctctatatcacaatctctccgttttactatctaaagatgcagagatgatacgccgcgaggcaccatcgagtttctcaagagttgagatattctcttcaattattatctttcaataaggtagacatgtgcgtttgagtaaggcatcttcttgcccagaacgacttgggtttaattcaagtactatccaacgttgttcgcgctctgatgtacttgcgggtgcatcccacatgattccaaagtacatgcatatgattcgcgatgttcgtttctgttaaattgcaggagcttaatccacatatcgtcggctcagcggcattactcgtgccaactcatactctttcatatgactttagtactttccctagctcattatgccgatgaaagtgaaagtccccatgccgcacaaggctgaatcggagcaatgttccctcgagccctggaagtggccacctagccgctttgcctcgcatcttgtgttgcctttgtcacgggccagacatgtctagtaaatgtctcagcgggatacctttaggtagtagagcccgggtttccgtatgagatatttgagcgctctcatgatgcttgcgatgcttgcgatgcttcgggttcttcggactgggtaggcgggataataggagtataaggtcgtccagaccacgtcaaaacaaggccggctgctttttcatgatcaccatccagaagcttcggggccacacccaattgctcgagtccttcctcgctagccctcctattccacagaaactgttcgatggtcccatctagggagcaggatatgtaccctaagggccatcggctgtgcactaaagtttccctgacaccttttgaagcatggcagggcccgactagaagacccaacactccggagccgcgccatcctgaaggtccgttctggtaggttccttccagttcgcgcacatgttgtggacctagacgaccgaccttttttggcctctccggtgcgtttcgtatatgctttgcattgtagcaggacgcgcaaaggcagatgttcaggcgtagatggtaggctccatatcccaagtaagtcaatacccttgtctgatttcccgccgacgcgccggagatcaaagcccagtgagtgcaatgtagatgctacagtatactcgtagcgcgtgccgtggtagacggtggaatcgacattaacacctttccgctgcgcatatgcatcgtatgattctaggtcatgatgttcttctgttgagggttttggatagttcaaagggccccatgagagaagtcgttttgatacatggtggctacccagcactgagacgcatttaggcctaaagagagctagagcacgccacattccgcatctcctttcgtccagatatgaatagaagaagactcgacgtgatgcgatcggaacatggcgtggggccagggtactaaggttgaggtagactgcttataggtgctgcagtgaatgaaaagactggaacttggaagctggtgagctggtgacatgagattaaagcttcgatctacctgatccctgcaagtctcgttgtagtcaatcctggtcaattgcgccgcaccccagaccatgcaggcagaggagctacctgacatgcaaggaccctgaatacctctgagggaagcttcgtggacaccgcttcatactccccatcaatcgtcttactcactcacgcaaccagcctgtgcggaacgcggagtcgtcaagatgggtgataggctcactcagctacaggacgctgtcgatcagctcgcaacccagttcgtcgcatccatcaactatatcaaccaacaccacagcctcgagacactcggcccgcgcgatcagatcgtcgtcatacctaagcaagaggctgataaccaggaggtggatccgcatcccgaagatgtcttccgggccgctcaagtcgaattggcccaagacctgattacaaaggagcagcagatcgaactgcttatctctattctcccgggcctagacaacagcgaacaagaccaggaacgcaatatacgtgagctcgaggaggaactcaaagtcgctgaagctcagcgccaggaagccatccaagagcgcgaggagacacttgcgaagctcgattctgtcatccggagcattcgacgaccgtgatattactaccccgtggccgttcactcggttgaaaacgtggtgattcaaatcatggcacctcgaccgaccattttaccaacacattctaagcgtcgggagaccaaatggggaatagaaagtgttttattaagatacccaggagaattaaattagctttggcgaatggcgtttagtcaggcaagggacgtttcgtctagctatattcatctagtctatgcttgtaaaggtcttttctttgcctagtcatctaaaaggccaagctcatggtacagacttcttaagcacaatccagtggcaaggtattctcagactgataatgttctgcggccatgattgatcctataacgccctatgcgcaccgaagtcttcggaaccgaaacaatgaggctcaaggtgacttgaacagttgtgggtagattgtcggtagctcatttaggtgtcgaatctggtatttggatgccttcgtttccggcactttgataccttcctctaccaagtgagcggtggtccaccccaaattttgagacgagacacaattctgataggaatcatctgtccataattattagcatggcatatttgaacaagggagaaggagtgatttccaaacagttgtccttaccaacaaagaaacaatcttccacattctctacgccggcttctttcatggccttgtgatacatgtttacgtgtggtttgcacactatagggattgacgaatagtcacagtatgtcaggccctcgaacaggtcatcaatgcctagcagcttgacgactctccgggcatgcgtgacatatgcattagtcagcagccatagcttcactttgctggtgtcgatactctgcagcattttgcgaagttccgggttgggcttgatgatgccctcgaggggcagcgcatcatcgaccttcgtgttatactccagagggtcgatctggtgatgacgtactagtccctcaatggctaagccatagttcttgtagtattcctgatgcaagcggattgcttcttcttcaggaagccccaagtgcttctcgaagtattcatctatgagagcagccatcaagtcgtgtactttg

SEQ ID NO: 7947 - DNA, 840 bp, Muscodor strobelii
  misc_feature: SGI cDNA ID NO. 562425
  misc_feature: Reduced expression when VOC is produced
  misc_feature: Encodes the peptide sequence at SEQ ID NO 7948
atgcttctgacgccagagcactctatatcgctccagaacaccatcggcagtgacataatgatgcagttggacgacgtcctcgtcactacctcccccgatcataaacgtatgcgagaagcaatggaacgaagcgttcggtggcttgaccgatgcattgccgctcacaagaaccccgatcgacaaaatctgttctgcattattcagggagggctagataccgaaatgcgcaaggagtgttgcaaggagatggtcgcgcgagacactccgggaattgccataggcgggctgagtggtggtgaggccaaacccgatttctgtcgcgtcgtaaagacatgtaccgaactgctgcccgagttgaaaccccgatatgtcatgggtattggctatcccgaggatctcgtcgtgagcgtggctttaggcgccgacatgttcgactgtgtatggccgacgcgtacggcaaggtttggcagcgctattacgaggcatggtgtactcaaaatcaagaggcctgagtatgcgaacgatttcggtccaattgaagaagggtgcggatgcgtttgctgcagagagggtgagggtgccctcggtataacacgcgcatttgttcatcacaatgtagccaaggagacagtctcagcacatctgctttccatacacaatgtgtggtaccagctgaatctcatgcgagaagtacgaaatgccatcattgcagatgagtaccctgctttcatacagcagttttttgcaaacatatatccagacaggtcggcctatccggaatgggccgtagatgctctgcggggagtgggcgtcgacttgcgaccagatagcaatatataa

SEQ ID NO: 7948 - protein, 279 aa, Muscodor strobelii
  misc_feature: SGI Peptide ID NO. 562425
  misc_feature (6)..(249): Pfam Id: PF01702 Pfam Desc: Queuine tRNA-ribosyltransferase
  misc_feature (1)..(273): NCBI GI: 116194722 Blast Desc: conserved [Chaetomium globosum CBS 148.51] gi|88179872|gb|EAQ87340.1| conserved [Chaetomium globosum CBS 148.51]
  misc_feature (1)..(273): NCBI GI: 164424449 Blast Desc: queuine tRNA-ribosyltransferase [Neurospora crassa OR74A] gi|157070516|gb|EDO65060.1| queuine tRNA-ribosyltransferase [Neurospora crassa OR74A]
  misc_feature (1)..(273): NCBI GI: 171683397 Blast Desc: protein product [Podospora anserina] gi|170941658|emb|CAP67312.1| protein product [Podospora anserina]
  misc_feature (1)..(276): NCBI GI: 39944198 Blast Desc: conserved [Magnaporthe grisea 70-15] gi|145014840|gb|EDJ99408.1| conserved [Magnaporthe grisea 70-15]
  misc_feature (1)..(273): NCBI GI: 256729642 Blast Desc: [Nectria haematococca mpVI 77-13-4]
  misc_feature (1)..(276): NCBI GI: 46122521 Blast Desc: FG05638.1 [Gibberella zeae PH-1]
  misc_feature (1)..(273): NCBI GI: 156049141 Blast Desc: SS1G_08277 [Sclerotinia sclerotiorum 1980] gi|154692676|gb|EDN92414.1| SS1G_08277 [Sclerotinia sclerotiorum 1980]
  misc_feature (1)..(276): NCBI GI: 189194039 Blast Desc: queuine tRNA-ribosyltransferase [Pyrenophora tritici-repentis Pt-1C-BFP] gi|187978922|gb|EDU45548.1| queuine tRNA-ribosyltransferase [Pyrenophora tritici-repentis Pt-1C-BFP]
  misc_feature (1)..(277): NCBI GI: 255936105 Blast Desc: Pc13g06450 [Penicillium chrysogenum Wisconsin 54-1255] gi|211583699|emb|CAP91714.1| Pc13g06450 [Penicillium chrysogenum Wisconsin 54-1255]
  misc_feature (1)..(276): NCBI GI: 119179947 Blast Desc: conserved [Coccidioides immitis RS]
  misc_feature (1)..(273): SWISSPROT Homolog: EC 2.4.2.29 tRNA-guanine transglycosylase
  misc_feature: Useful for introducing or modulating the production of volatile compounds
MLLTPEHSISLQNTIGSDIMMQLDDVLVTTSPDHKRMREAMERSVRWLDRCIAAHKNPDRQNLFCIIQGGLDTEMRKECCKEMVARDTPGIAIGGLSGGEAKPDFCRVVKTCTELLPELKPRYVMGIGYPEDLVVSVALGADMFDCVWPTRTARFGSAITRHGVLKIKRPEYANDFGPIEEGCGCVCCREGEGALGITRAFVHHNVAKETVSAHLLSIHNVWYQLNLMREVRNAIIADEYPAFIQQFFANIYPDRSAYPEWAVDALRGVGVDLRPDSNI

SEQ ID NO: 7949 - DNA, 6163 bp, Muscodor strobelii; identical to SEQ ID NO: 7946
  misc_feature: SGI EST ID NO. CUFF.19673.0
  misc_feature: Variant of the nucleotide sequence at SEQ ID NO 7947

SEQ ID NO: 7950 - DNA, 537 bp, Muscodor strobelii
  misc_feature: SGI cDNA ID NO. 562426
  misc_feature: Elevated expression when VOC is produced
  misc_feature: Encodes the peptide sequence at SEQ ID NO 7951
atggcgtcctcaacgtcgcaaaccacaaaagcattgaacaagttgtcacttgatacccctatcgcctcaacagtatcttcatcgaagacgaaaccaaagtcaaaagcgaagaaagtagcagattcgtgggaagacgacgagagcagcgaagacgaggttgcaactcccgtacagcaggacagtaaaccaggcggcgtgaatgctccgcctccgacacctatatcaccttcttacggtcgtcacggacccgatggcagtaccaacgatgccccgtggctagcgagcagcagttccgggggtgggtcgtattcgtaccaggacgagtctaccagacgacctgagaaaacggatgcagtggcacgtcgtatgattgcgagcgcattaggtgttcgtgcacccagggccaccgaggagcagaaggcgtatgatcgtgctgtgcgcgagcaagagcgcaagagacgtgaagacgagaaggaagttgagcgaaaacggaaagaggaggctgacaaggccaaggccgcaatgtgggatgactag

SEQ ID NO: 7951 - protein, 178 aa, Muscodor strobelii
  misc_feature: SGI Peptide ID NO. 562426
  misc_feature (11)..(178): NCBI GI: 256726874 Blast Desc: NECHADRAFT_76295 [Nectria haematococca mpVI 77-13-4]
  misc_feature (11)..(178): NCBI GI: 226285910 Blast Desc: conserved [Paracoccidioides brasiliensis Pb01]
  misc_feature (11)..(178): NCBI GI: 225679645 Blast Desc: conserved [Paracoccidioides brasiliensis Pb03]
  misc_feature (11)..(178): NCBI GI: 226291383 Blast Desc: conserved [Paracoccidioides brasiliensis Pb18]
  misc_feature (41)..(178): NCBI GI: 171688522 Blast Desc: protein product [Podospora anserina] gi|170944223|emb|CAP70333.1| protein product [Podospora anserina]
  misc_feature (49)..(177): NCBI GI: 238839087 Blast Desc: conserved [Microsporum canis CBS 113480]
  misc_feature (39)..(177): NCBI GI: 242768243 Blast Desc: conserved [Talaromyces stipitatus ATCC 10500] gi|218724724|gb|EED24141.1| conserved [Talaromyces stipitatus ATCC 10500]
  misc_feature (39)..(178): NCBI GI: 39952287 Blast Desc: [Magnaporthe grisea 70-15] gi|145020359|gb|EDK04488.1| [Magnaporthe grisea 70-15]
  misc_feature (33)..(178): NCBI GI: 116196406 Blast Desc: [Chaetomium globosum CBS 148.51] gi|88180714|gb|EAQ88182.1| [Chaetomium globosum CBS 148.51]
  misc_feature (12)..(177): NCBI GI: 212542513 Blast Desc: conserved [Penicillium marneffei ATCC 18224] gi|210066318|gb|EEA20411.1| conserved [Penicillium marneffei ATCC 18224]
  misc_feature: Useful for introducing or modulating the production of volatile compounds
MASSTSQTTKALNKLSLDTPIASTVSSSKTKPKSKAKKVADSWEDDESSEDEVATPVQQDSKPGGVNAPPPTPISPSYGRHGPDGSTNDAPWLASSSSGGGSYSYQDESTRRPEKTDAVARRMIASALGVRAPRATEEQKAYDRAVREQERKRREDEKEVERKRKEEADKAKAAMWDD

SEQ ID NO: 7952 - DNA, 6163 bp, Muscodor strobelii; identical to SEQ ID NO: 7946
  misc_feature: SGI EST ID NO. CUFF.19673.0
  misc_feature: Variant of the nucleotide sequence at SEQ ID NO 7950

SEQ ID NO: 7953 - DNA, 420 bp, Muscodor strobelii
  misc_feature: SGI cDNA ID NO. 562427
  misc_feature: Encodes the peptide sequence at SEQ ID NO 7954
atgggtgataggctcactcagctacaggacgctgtcgatcagctcgcaacccagttcgtcgcatccatcaactatatcaaccaacaccacagcctcgagacactcggcccgcgcgatcagatcgtcgtcatacctaagcaagaggctgataaccaggaggtggatccgcatcccgaagatgtcttccgggccgctcaagtcgaattggcccaagacctgattacaaaggagcagcagatcgaactgcttatctctattctcccgggcctagacaacagcgaacaagaccaggaacgcaatatacgtgagctcgaggaggaactcaaagtcgctgaagctcagcgccaggaagccatccaagagcgcgaggagacacttgcgaagctcgattctgtcatccggagcattcgacgaccgtga

SEQ ID NO: 7954 - protein, 139 aa, Muscodor strobelii
  misc_feature: SGI Peptide ID NO. 562427
  misc_feature (45)..(135): Pfam Id: PF07544 Pfam Desc: RNA polymerase II transcription mediator
  misc_feature (1)..(139): NCBI GI: 145613241 Blast Desc: MGG_01784 [Magnaporthe grisea 70-15] gi|145020361|gb|EDK04490.1| MGG_01784 [Magnaporthe grisea 70-15]
  misc_feature (1)..(139): NCBI GI: 256727445 Blast Desc: [Nectria haematococca mpVI 77-13-4]
  misc_feature (1)..(139): NCBI GI: 46123601 Blast Desc: FG06178.1 [Gibberella zeae PH-1]
  misc_feature (1)..(139): NCBI GI: 261352205 Blast Desc: mediator of RNA polymerase II transcription subunit 21 [Verticillium albo-atrum VaMs.102]
  misc_feature (1)..(138): NCBI GI: 85104890 Blast Desc: NCU05263 [Neurospora crassa OR74A] gi|74616604|sp|Q7S8C2.1|MED21_NEUCR RecName: Full=Mediator of RNA polymerase II transcription subunit 21; AltName: Full=Mediator 21
  misc_feature (1)..(139): NCBI GI: 154297005 Blast Desc: BC1G_12591 [Botryotinia fuckeliana B05.10] gi|150843118|gb|EDN18311.1| BC1G_12591 [Botryotinia fuckeliana B05.10]
  misc_feature (1)..(139): NCBI GI: 156063584 Blast Desc: SS1G_01910 [Sclerotinia sclerotiorum 1980] gi|154697244|gb|EDN96982.1| SS1G_01910 [Sclerotinia sclerotiorum 1980]
  misc_feature (12)..(138): NCBI GI: 171688520 Blast Desc: protein product [Podospora anserina] gi|170944222|emb|CAP70332.1| protein product [Podospora anserina]
  misc_feature (1)..(136): NCBI GI: 225557591 Blast Desc: conserved [Ajellomyces capsulatus G186AR]
  misc_feature (1)..(136): NCBI GI: 154275028 Blast Desc: [Ajellomyces capsulatus NAm1] gi|150414805|gb|EDN10167.1| [Ajellomyces capsulatus NAm1]
MGDRLTQLQDAVDQLATQFVASINYINQHHSLETLGPRDQIVVIPKQEADNQEVDPHPEDVFRAAQVELAQDLITKEQQIELLISILPGLDNSEQDQERNIRELEEELKVAEAQRQEAIQEREETLAKLDSVIRSIRRP

SEQ ID NO: 7955 - DNA, 6163 bp, Muscodor strobelii; identical to SEQ ID NO: 7946
  misc_feature: SGI EST ID NO. CUFF.19673.0
  misc_feature: Variant of the nucleotide sequence at SEQ ID NO 7953

SEQ ID NO: 7956 - DNA, 714 bp, Muscodor strobelii
  misc_feature: SGI cDNA ID NO. 562428
  misc_feature: Encodes the peptide sequence at SEQ ID NO 7957
atgggatcgcaaaatgcagaactaaatgggttacaccccaaccgggtggtattctttttcgatatcgacaattgcttgtatcctaggagtaccaaagtacacgacttgatggctgctctcatagatgaatacttcgagaagcacttggggcttcctgaagaagaagcaatccgcttgcatcaggaatactacaagaactatggcttagccattgagggactagtacgtcatcaccagatcgaccctctggagtataacacgaaggtcgatgatgcgctgcccctcgagggcatcatcaagcccaacccggaacttcgcaaaatgctgcagagtatcgacaccagcaaagtgaagctatggctgctgactaatgcatatgtcacgcatgcccggagagtcgtcaagctgctaggcattgatgacctgttcgagggcctgacatactgtgactattcgtcaatccctatagtgtgcaaaccacacgtaaacatgtatcacaaggccatgaaagaagccggcgtagagaatgtggaagattgtttctttgttgatgattcctatcagaattgtgtctcgtctcaaaatttggggtggaccaccgctcacttggtagaggaaggtatcaaagtgccggaaacgaaggcatccaaataccagattcgacacctaaatgagctaccgacaatctacccacaactgttcaagtcaccttga

SEQ ID NO: 7957 - protein, 237 aa, Muscodor strobelii
  misc_feature: SGI Peptide ID NO. 562428
  misc_feature (15)..(206): Pfam Id: PF00702 Pfam Desc: haloacid dehalogenase-like hydrolase
  misc_feature (1)..(237): NCBI GI: 145613243 Blast Desc: MGG_01783 [Magnaporthe grisea 70-15] gi|145020362|gb|EDK04491.1| MGG_01783 [Magnaporthe grisea 70-15]
  misc_feature (9)..(235): NCBI GI: 116196410 Blast Desc: CHGG_04803 [Chaetomium globosum CBS 148.51] gi|88180716|gb|EAQ88184.1| CHGG_04803 [Chaetomium globosum CBS 148.51]
  misc_feature (1)..(236): NCBI GI: 46123603 Blast Desc: FG06179.1 [Gibberella zeae PH-1]
  misc_feature (14)..(235): NCBI GI: 85104893 Blast Desc: NCU05264 [Neurospora crassa OR74A] gi|28923407|gb|EAA32593.1| conserved [Neurospora crassa OR74A]
  misc_feature (1)..(236): NCBI GI: 261352206 Blast Desc: SSM1 [Verticillium albo-atrum VaMs.102]
  misc_feature (14)..(234): NCBI GI: 156063586 Blast Desc: SS1G_01911 [Sclerotinia sclerotiorum 1980] gi|154697245|gb|EDN96983.1| SS1G_01911 [Sclerotinia sclerotiorum 1980]
  misc_feature (17)..(236): NCBI GI: 169605757 Blast Desc: SNOG_05905 [Phaeosphaeria nodorum SN15] gi|111065849|gb|EAT86969.1| SNOG_05905 [Phaeosphaeria nodorum SN15]
  misc_feature (15)..(236): NCBI GI: 189198545 Blast Desc: pyrimidine 5'-nucleotidase [Pyrenophora tritici-repentis Pt-1C-BFP] gi|187981558|gb|EDU48184.1| pyrimidine 5'-nucleotidase [Pyrenophora tritici-repentis
  misc_feature (37)..(237): NCBI GI: 171688518 Blast Desc: protein product [Podospora anserina] gi|170944221|emb|CAP70331.1| protein product [Podospora anserina]
  misc_feature (12)..(236): NCBI GI: 240278306 Blast Desc: pyrimidine 5'-nucleotidase [Ajellomyces capsulatus H143]
MGSQNAELNGLHPNRVVFFFDIDNCLYPRSTKVHDLMAALIDEYFEKHLGLPEEEAIRLHQEYYKNYGLAIEGLVRHHQIDPLEYNTKVDDALPLEGIIKPNPELRKMLQSIDTSKVKLWLLTNAYVTHARRVVKLLGIDDLFEGLTYCDYSSIPIVCKPHVNMYHKAMKEAGVENVEDCFFVDDSYQNCVSSQNLGWTTAHLVEEGIKVPETKASKYQIRHLNELPTIYPQLFKSP

SEQ ID NO: 7958 - DNA, 1731 bp, Muscodor strobelii
  misc_feature: SGI EST ID NO. CUFF.19674.2
  misc_feature: Variant of the nucleotide sequence at SEQ ID NO 7956
tctcgactggccggtgactcaaaacgcaataatactagcaccatttagctacacaaatacttttcttcttgacctctaagacaagagactggagtaaataatcaaggactttacttaggactgtctccaacttctctttgctaacattatattcatagctcagcttgatcagactagagcaaaccacaaaggcagctcatacttggtttcccttaagccccaactccgcactactactttgtagaaccctcgcaacatccgtccagcgctattgctcaagtttcttatagatatactgagtctacaaggaccttcatggcaagatgggatcgcaaaatgcagaactaaatgggttacaccccaaccgggtggtattctttttcgatatcgacaattgcttgtatcctaggagtaccaaagtacacgacttgatggctgctctcatagatgaatacttcgagaagcacttggggcttcctgaagaagaagcaatccgcttgcatcaggaatactacaagaactatggcttagccattgagggactagtacgtcatcaccagatcgaccctctggagtataacacgaaggtcgatgatgcgctgcccctcgagggcatcatcaagcccaacccggaacttcgcaaaatgctgcagagtatcgacaccagcaaagtgaagctatggctgctgactaatgcatatgtcacgcatgcccggagagtcgtcaagctgctaggcattgatgacctgttcgagggcctgacatactgtgactattcgtcaatccctatagtgtgcaaaccacacgtaaacatgtatcacaaggccatgaaagaagccggcgtagagaatgtggaagattgtttctttgttgatgattcctatcagaattgtgtctcgtctcaaaatttggggtggaccaccgctcacttggtagaggaaggtatcaaagtgccggaaacgaaggcatccaaataccagattcgacacctaaatgagctaccgacaatctacccacaactgttcaagtcaccttgagcctcattgtttcggttccgaagacttcggtgcgcatagggcgttataggatcaatcatggccgcagaacattatcagtctgagaataccttgccactggattgtgcttaagaagtctgtaccatgagcttggccttttagatgactaggcaaagaaaagacctttacaagcatagactagatgaatatagctagacgaaacgtcccttgcctgactaaacgccattcgccaaagctaatttaattctcctgggtatcttaataaaacactttctattccccatttggtctcccgacgcttagaatgtgttggtaaaatggtcggtcgaggtgccatgatttgaatcaccacgttttcaaccgagtgaacggccacggggtagtaatatcacggtcgtcgaatgctccggatgacagaatcgagcttcgcaagtgtctcctcgcgctcttggatggcttcctggcgctgagcttcagcgactttgagttcctcctcgagctcacgtatattgcgttcctggtcttgttcgctgttgtctaggcccgggagaatagagataagcagttcgatctgctgctcctttgtaatcaggtcttgggccaattcgacttgagcggcccggaagacatcttcgggatgcggatccactgtaaacaaggcatattagcatcacgtatcgggacgagatcgcga

SEQ ID NO: 7959 - DNA, 2679 bp, Muscodor strobelii
  misc_feature: SGI cDNA ID NO. 562429
  misc_feature: Encodes the peptide sequence at SEQ ID NO 7960
atgtcgacgactgcatttgatgaggccggcgagtatcacaagattgtccaattccgcgatgctgtgttgtccgggaagcatgcgcacatcaaagtaccggcttcaacggtggccaagcatgccactgctgctgctcctgctgctgctcctgcgcctgcctcaaccactcgtgcatcgcagctgtctccatcatctccctcgtctgcacctcatcttgtagcaaacacatcctcgcagtcacatgttagcaaagctgtcaatggacacgctctaggcaacgcccaatcctttaagactaacgcgcagcaaccatctgttacccttcctcctaccactgcgtcctcggtcatcccgggattctccagcagcttcagtggcacgaagccagctttcaaccctgtcctattgcagaagtctgatggccttgtcaaggcagagctgcaggtccagagacagcgaatcgagaaggcccttggggagcaagtcgagcagcgaagactcgcagccaaggatgtacaacttctagcagagcagctatctgaccttgatcttccagatatcttagccaaggcattaacactcgtgcaggccaccgcgccccagcctatttccactatcacgtcctcagctgctaatgcctcagatgccaccgactcgttcgacgacaacacgttctactccagccctgttgacacgcccgagtcgcatccatctgttccccaggttcgtagcgcatctgaagacatgcgcatgcagtatgcgcagacagtgacacgacctatcgagcagcatacccttctgcaacatccccaaacatctcagtcggctgctttcaacgagcctgtagtccagccagtcgcgcctccagtgccttcgcaacgccagattatcaacaacggagacccatattcacctagtggcttgaatgtgccgacacagcgtagagatccagccgggactatcaatacacgtgtccaaacgccaaatcgcatagatctaacacggcaaagagagcacttagaggctcaggtcatcagctccgttagccgaggcgccagtcgatccgacaattctgggaacacagactcggacatatctgctgatcagcagcgctcacagaaccagcatcacactgggctgataccaggccttagacaccccggagagcctcttgtccgagttcataacctatcgcccctcgcaccccagcctgcccatgtgtccccactcgctactgctagacagccccccatccgtgacctagctacaggcgcccagcaacgtgtgccctctcaagccactgccgtaagacaggagcagccgctcgtcatcagtcctgagagctctccacaaggggacaagggcggtaagaagaagaacaagaagaagaacaataagaggaaatctgatggcagagcgcgagagctgcagggctctcccgaaatcaagccagagcccaaatccccatctccgttaacagcaccgccgttcatgccacccaacaagcgcgctcgacgatcgggcaggcaggacgcacagattatatatgacgaaccggctctcggtcgtccgatctcgcgactcgagcaggagcgttttgtacgcacgaacgatccgccagcccctgttcagattgacagagtcgatcagggttacgagggagtgggtgacatgtatccgcgacaggcacgtcaatcagtcgcaccaatggctcaagaaccggaagagacgttgtatgaggaacgaagagcagacggtaccattgttcgctatgtgcgccgagcgccaagccctgtgagatatgtcgacccctatggctccattgagcgtcgctcagtgcgtactgcgtcttattctgtagtcaacgctactcctgatgtccgggagccctctgtgtatgggtcaattcaccgtgagggccgtatgagcgccaggcctcaagttgaaagaggcagatcacggtctccaattgtcatagagagacgctcatcagctatgccaccccctatgcagcgtcggattgtgcttgacgagtacggccgcgagtactatgagcctctgcagcctgctgctgttccccgacagtcgatgatgccaccttcacggcccggtgaatatgaagtcatttatgagagagccccaacccgagctgtatctcgaatgccagcccctgagattataggtgaagatggtactgtctatcgacgagcatcgccaggctatgcttcgcgaagggtggtaacccagcctgactatcacagcgacgtgagaagctaccgagagcgtgactacatgggcccgcctgctccagactatcttcctgcagcggctgctgaacgtacgcccagagaatatcttcctcgagcagcttccgtcaggcccgcagaacctttaccatacagccggcttacaagcagccaccccgaactgcctcctagacaatacgctgccagcgtgcatccggaggcaagaagagataatgcggcccatgtggtgcgtgaatacagtgtgcgtccagccgaggtggacttgacgcaacgagcctacagcactcgacccgttgagcggtactatgaacccctgccacgaagagaggtaacttacacggaggatgggtcacgccacgagatcatcagatattcagacgatgctgccccacgtaggcaagtgtatcagtaa

SEQ ID NO: 7960 - protein, 892 aa, Muscodor strobelii
  misc_feature: SGI Peptide ID NO. 562429
  misc_feature (1)..(855): NCBI GI: 39952279 Blast Desc: MGG_01782 [Magnaporthe grisea 70-15] gi|145020363|gb|EDK04492.1| MGG_01782 [Magnaporthe grisea 70-15]
  misc_feature (14)..(858): NCBI GI: 261352207 Blast Desc: conserved [Verticillium albo-atrum VaMs.102]
  misc_feature (11)..(892): NCBI GI: 46123605 Blast Desc: FG06180.1 [Gibberella zeae PH-1]
  misc_feature (1)..(859): NCBI GI: 154297009 Blast Desc: BC1G_12593 [Botryotinia fuckeliana B05.10] gi|150843120|gb|EDN18313.1| BC1G_12593 [Botryotinia fuckeliana B05.10]
  misc_feature (1)..(836): NCBI GI: 116196412 Blast Desc: CHGG_04804 [Chaetomium globosum CBS 148.51] gi|88180717|gb|EAQ88185.1| CHGG_04804 [Chaetomium globosum CBS 148.51]
  misc_feature (389)..(892): NCBI GI: 156063588 Blast Desc: SS1G_01912 [Sclerotinia sclerotiorum 1980] gi|154697246|gb|EDN96984.1| SS1G_01912 [Sclerotinia sclerotiorum 1980]
  misc_feature (8)..(692): NCBI GI: 164429228 Blast Desc: NCU05265 [Neurospora crassa OR74A] gi|157072989|gb|EAA32594.2| [Neurospora crassa OR74A]
  misc_feature (11)..(518): NCBI GI: 256727444 Blast Desc: NECHADRAFT_76298 [Nectria haematococca mpVI 77-13-4]
  misc_feature (374)..(840): NCBI GI: 171688516 Blast Desc: protein product [Podospora anserina] gi|170944220|emb|CAP70330.1| protein product [Podospora anserina]
  misc_feature (6)..(497): NCBI GI: 226280323 Blast Desc: conserved [Paracoccidioides brasiliensis Pb01]
MSTTAFDEAGEYHKIVQFRDAVLSGKHAHIKVPASTVAKHATAAAPAAAPAPASTTRASQLSPSSPSSAPHLVANTSSQSHVSKAVNGHALGNAQSFKTNAQQPSVTLPPTTASSVIPGFSSSFSGTKPAFNPVLLQKSDGLVKAELQVQRQRIEKALGEQVEQRRLAAKDVQLLAEQLSDLDLPDILAKALTLVQATAPQPISTITSSAANASDATDSFDDNTFYSSPVDTPESHPSVPQVRSASEDMRMQYAQTVTRPIEQHTLLQHPQTSQSAAFNEPVVQPVAPPVPSQRQIINNGDPYSPSGLNVPTQRRDPAGTINTRVQTPNRIDLTRQREHLEAQVISSVSRGASRSDNSGNTDSDISADQQRSQNQHHTGLIPGLRHPGEPLVRVHNLSPLAPQPAHVSPLATARQPPIRDLATGAQQRVPSQATAVRQEQPLVISPESSPQGDKGGKKKNKKKNNKRKSDGRARELQGSPEIKPEPKSPSPLTAPPFMPPNKRARRSGRQDAQIIYDEPALGRPISRLEQERFVRTNDPPAPVQIDRVDQGYEGVGDMYPRQARQSVAPMAQEPEETLYEERRADGTIVRYVRRAPSPVRYVDPYGSIERRSVRTASYSVVNATPDVREPSVYGSIHREGRMSARPQVERGRSRSPIVIERRSSAMPPPMQRRIVLDEYGREYYEPLQPAAVPRQSMMPPSRPGEYEVIYERAPTRAVSRMPAPEIIGEDGTVYRRASPGYASRRVVTQPDYHSDVRSYRERDYMGPPAPDYLPAAAAERTPREYLPRAASVRPAEPLPYSRLTSSHPELPPRQYAASVHPEARRDNAAHVVREYSVRPAEVDLTQRAYSTRPVERYYEPLPRREVTYTEDGSRHEIIRYSDDAAPRRQVYQ

SEQ ID NO: 7961 - DNA, 4473 bp, Muscodor strobelii
  misc_feature: SGI EST ID NO. CUFF.19677.0
  misc_feature: Variant of the nucleotide sequence at SEQ ID NO 7959
caaaatttagaatttgctgctgtgatttaaaaacatcggcgacacgcattatctcgccgtcttctcccttctcccagcattgagaagagcggcaactcctacggcacaacatccgtcgccttatcgtgcacgccgtactacacgtttccatttgcattgcatctttgttctgattttcatgctaagttgaaggcagcattttgaacgcgtctgtctttctgtctctgtcgcatccattccagcctcgtgggcggaaggagtgccccgtggcgatggtaggataggtggtgtttccaactcaactcactgaaatgtctcaagccttgacggctgttcctcagccagccctcgcagcagcgacaaacatgtcgacgactgcatttgatgaggccggcgagtatcacaagattgtccaattccgcgatgctgtgttgtccgggaagcatgcgcacatcaaagtaccggcttcaacggtggccaagcatgccactgctgctgctcctgctgctgctcctgcgcctgcctcaaccactcgtgcatcgcagctgtctccatcatctccctcgtctgcacctcatcttgtagcaaacacatcctcgcagtcacatgttagcaaagctgtcaatggacacgctctaggcaacgcccaatcctttaagactaacgcgcagcaaccatctgttacccttcctcctaccactgcgtcctcggtcatcccgggattctccagcagcttcagtggcacgaagccagctttcaaccctgtcctattgcagaagtctgatggccttgtcaaggcagagctgcaggtccagagacagcgaatcgagaaggcccttggggagcaagtcgagcagcgaagactcgcagccaaggatgtacaacttctagcagagcagctatctgaccttgatcttccagatatcttagccaaggcattaacactcgtgcaggccaccgcgccccagcctatttccactatcacgtcctcagctgctaatgcctcagatgccaccgactcgttcgacgacaacacgttctactccagccctgttgacacgcccgagtcgcatccatctgttccccaggttcgtagcgcatctgaagacatgcgcatgcagtatgcgcagacagtgacacgacctatcgagcagcatacccttctgcaacatccccaaacatctcagtcggctgctttcaacgagcctgtagtccagccagtcgcgcctccagtgccttcgcaacgccagattatcaacaacggagacccatattcacctagtggcttgaatgtgccgacacagcgtagagatccagccgggactatcaatacacgtgtccaaacgccaaatcgcatagatctaacacggcaaagagagcacttagaggctcaggtcatcagctccgttagccgaggcgccagtcgatccgacaattctgggaacacagactcggacatatctgctgatcagcagcgctcacagaaccagcatcacactgggctgataccaggccttagacaccccggagagcctcttgtccgagttcataacctatcgcccctcgcaccccagcctgcccatgtgtccccactcgctactgctagacagccccccatccgtgacctagctacaggcgcccagcaacgtgtgccctctcaagccactgccgtaagacaggagcagccgctcgtcatcagtcctgagagctctccacaaggggacaagggcggtaagaagaagaacaagaagaagaacaataagaggaaatctgatggcagagcgcgagagctgcagggctctcccgaaatcaagccagagcccaaatccccatctccgttaacagcaccgccgttcatgccacccaacaagcgcgctcgacgatcgggcaggcaggacgcacagattatatatgacgaaccggctctcggtcgtccgatctcgcgactcgagcaggagcgttttgtacgcacgaacgatccgccagcccctgttcagattgacagagtcgatcagggttacgagggagtgggtgacatgtatccgcgacaggcacgtcaatcagtcgcaccaatggctcaagaaccggaagagacgttgtatgaggaacgaagagcagacggtaccattgttcgctatgtgcgccgagcgccaagccctgtgagatatgtcgacccctatggctccattgagcgtcgctcagtgcgtactgcgtcttattctgtagtcaacgctactcctgatgtccgggagccctctgtgtatgggtcaattcaccgtgagggccgtatgagcgccaggcctcaagttgaaagaggcagatcacggtctccaattgtcatagagagacgctcatcagctatgccaccccctatgcagcgtcggattgtgcttgacgagtacggccgcgagtactatgagcctctgcagcctgctgctgttccccgacagtcgatgatgccaccttcacggcccggtgaatatgaagtcatttatgagagagccccaacccgagctgtatctcgaatgccagcccctgagattataggtgaagatggtactgtctatcgacgagcatcgccaggctatgcttcgcgaagggtggtaacccagcctgactatcacagcgacgtgagaagctaccgagagcgtgactacatgggcccgcctgctccagactatcttcctgcagcggctgctgaacgtacgcccagagaatatcttcctcgagcagcttccgtcaggcccgcagaacctttaccatacagccggcttacaagcagccaccccgaactgcctcctagacaatacgctgccagcgtgcatccggaggcaagaagagataatgcggcccatgtggtgcgtgaatacagtgtgcgtccagccgaggtggacttgacgcaacgagcctacagcactcgacccgttgagcggtactatgaacccctgccacgaagagaggtaacttacacggaggatgggtcacgccacgagatcatcagatattcagacgatgctgccccacgtaggcaagtgtatcagtaattcaactttgcatctgctgagcatggagttcggagtcccgctcgctttgagctattgctaacattgatttcgcgatgcattctctgtggcatgcggaagaagttactgctttgatgtgaataattggttgtcacgtgtacaagtattggcggtgaccaggagatcctactggattaaaatagggtgttgtttgtaggaacttctgcaccggtgagacgatccgaccaaaatgaagataaggtatagcacgaaggcattgcgttctggtagctagatggcttgtagcataggagaaaaaaacttcatcaacacaaatatcttccattctcattctgacgtgaaaagactacaatttacgatttccatgccatagtgtccggctcgccgggcgtgttagccgcgccagcatatcccggtcagctttgaatggctccgaaaccatcgtacgattggtgatagcgttgggtacaaatgatggtacaatctcgtcttatcagttatccctctgcaacgctgtgagtacaaatcagagcaatcttcttaactttgtcaagcctgttcatatttaagggctgctattctgtcctgaaatattccaagacgcagaagtggtcttggcaactatgagtggactttacggcaggtagaacctagcgactgagttacctacgtactagtacggatgctactgccgagctagacttgaggcttgatccgcattgcatcaaggaaccggcaacgaggcagaatattcagagtatgcatgtcatgtcttcgatagctgggtatctgtgtcgcctcgacattgattcgatgtgaattgatcaatgaaacacggtaatcgaagctgccgctaggatgtaagacatagttctggataagatattgttgattaaagctgatcaaatggaagctccagtatcgcaccccaaacactagaacataccactgagccacgcccacgctacaagagtgtcgaacgcccgacagtggtcaccagtggtagtatggtatataagggggtggatagccaactcaaacctacctaggtctaaaaattactaggggagcttgttccgttaatagcttggtagcatgatcgcgatgattccagatgaggagatctaaacctgcatcctcaataatgtatacttgcaaagccgtgttctacatcgaatgttgcgatgtgatggagtcacgcgagaagaacgtacagccacaaagtctgaccctggcaaactgatctagggttccagagggcgacaaactcttcaatgtgctcaataacgatgagaggtaagccagcctatagttatctatgcctctgttgccgaaaacaggtcagtttctcggttcgcagcagatgagtgtatatacgtctgcctcagtaatagaataagcaaacttatgcagagacaaatcacagtcg

SEQ ID NO: 7962 - DNA, 2946 bp, Muscodor strobelii
  misc_feature: SGI cDNA ID NO. 562430
  misc_feature: Reduced expression when VOC is produced
  misc_feature: Encodes the peptide sequence at SEQ ID NO 7963
atgcaaaagcttgcggccaacatgggcatgcgtcactggagcgatcgaatccagagccccaacttcggcatgtcgtcgcgtcccaacgtgaacaacatgaacatggcgcccatgaacccgcacaccaagcccggcccgccccagcccctcagcccgtcgcccgccgcggacacgaccatccacttcgccttcaacatccccttcgcctcggacctggctgggcccaacacggaggacatcctgcacgcgacgcccgactcggtcgaccgctggacgcaccccgccgaggcccccgacgacgtgcccatctacaggctgcccatccaccagttccacctggccaacctccgccgcatgtgccacgacatcaccaccggcccgctgcccgtcgacgcccacgtcatcgagaccacccccaagcacgtcaagggccaggttgtcaccgtctcgctgtccggcacccccgagcttgtccacacgacgcgtgagaccatcctgagcggtgtgccccttgcattgaggtgcaccaccgtcgacgtggactataacttgatcgtgaactctgctacttctactcttgacaagaacgtgactgagggtctcgacaccctcgctgtcttctgcggcgtagatattttcgtcctcggccccaagctcacgcccaccgtggacgggctcaatggtgatgtggaagtcatccgtgaccagagatggagagttgctgtgttcggtgacatcgagtctgcctactatgccaagacccagatcctgattctcattgacaaattgctcgggcggcaggtcgacatggtaaccctcgagtccacaatgcaccccatcatctgcggccggtctcgtaagaacatcaagaccatcgagtcccagactaacacggccatctactttccccccttcgctcagctgtctagatattgcccgcccaatgctcaacatcgggaccccaacaccatctatatcaccggcgagagccgtgaaggtatcgagctagccaagcgtaggattcacgacacagtagctcggacaaagctcttcatgaaagatgccgttgtctcgccggccaagatcgatagtatcctccttacccgcatggacaaagtgcgaaagaccatggaaatcaacggcacctatatcatgtttccaagactagcctcaacacgcaccatgatccgcatccagggtgtagagggcctccacattgagcgcaccatgaaggagatcatgtctcttgctggccagttttattttgcgtcttggtggatccagccaggccctcagcacccgggtccccacgatatccgtggcatgctcggtgacatctgctccaactccgatgccgacattcaatttgacaagatgaactttcaaattaccggctcggacgatgctgtcaagtcagcgctaacggttatgtctcaaaacaagtttgtcacctcagcacagcaacagattcgcgtcaagattgagctcgcaaatgagcacaaagaattcgtctccggcaaaaagaatggtaagattaataaaatcatgacacagagcaatgttcagattatctttgacagcttcagagaatataacttcgatatcgatgtcatcgccccctcgtatgactcgatgaaacagggcatgactcttgttgagcaagagatgcctgcttccatttcatttcatgtccctgatcagtaccataaacgcatcatcgggattgggggtcagcacatccagcgtatcatgaaaaagcactccgtttttgtcaagttctcaaatgccatggatcgaggtggtatgggtcgtgaggatgacgacgtcaaagttgacaatgtcatctgccgcactccagcccgcaatgcccagaacctggagctggtgaagaccgaaatccttgacatggtagacagagcccattctgagttcacttctcaaattgtacacgttgatcggctgtaccacaggcagctcattgcgcggctcaatgaaattgacggactagagaagaggtggaactgcaagatcgttttcccaagtaccgaacttgcgagtgatgaaatcacagtcactggtcctgagtggcaggtgcccatgtgcgctgatgactttctgggcatggtccccgaaaaccacgagctggttctcatgcgaactccatccttggtaaaattcctcgagagcccggagttcgtcaacgagcttactacgaagctcaaaactcaatacgaagtgtccctggaggtccacgaaaatcccgacgaaaagaccgaagacggtgagcgtacgatgaccttgctctggaagttgactcgcaacaatgccggtggtctccgagatgccatggactatttaatgcagcatcttaccgctgcaagtgtcgaaatgactattgtcaagggcgctctccctcgccctaaatcagactcatttgaggactcgttgcaatattttgactcgaaactgcttcaacatgcccctgcttcggttgggaccgattcaccaacgcagccggcattcggagacgacatgggacagcagcgtccggctacccttttcgataaactgcggaagccctcgcagctgctctcatcgcttgatcgtagaaagaacagctctcactcgatgaacatgttcttcaaaggatcgagcaacgtgtctaagtcgtcgctcatctcaatcgagtcgacccgcagctttcatgctgaccgtaacccctggaatgatagcggtgtcaatcttccagacgacgacaacagcccttggccgacgcggcatttcggtcaaaatggccacgaccaaaaggtgacgcctagcagcgttcctcacggcggcgatgtaacgccgcgtcacaacacacgtgcgtccggcgacagcggccggccctcaacttcgcattccaccaattcaggataccctggtcccattggaccttaccgttag

SEQ ID NO: 7963 - protein, 981 aa, Muscodor strobelii
  misc_feature: SGI Peptide ID NO. 562430
  misc_feature (268)..(341): Pfam Id: PF00013 Pfam Desc: KH domain
  misc_feature (559)..(633): Pfam Id: PF00013 Pfam Desc: KH domain
  misc_feature (1)..(981): NCBI GI: 46123607 Blast Desc: FG06181.1 [Gibberella zeae PH-1]
  misc_feature (39)..(981): NCBI GI: 256727443 Blast Desc: [Nectria haematococca mpVI 77-13-4]
  misc_feature (1)..(981): NCBI GI: 261352208 Blast Desc: KH domain-containing protein [Verticillium albo-atrum VaMs.102]
  misc_feature (1)..(981): NCBI GI: 156063592 Blast Desc: SS1G_01914 [Sclerotinia sclerotiorum 1980] gi|154697248|gb|EDN96986.1| SS1G_01914 [Sclerotinia sclerotiorum 1980]
  misc_feature (10)..(981): NCBI GI: 85104540 Blast Desc: NCU05266 [Neurospora crassa OR74A] gi|28923325|gb|EAA32520.1| NCU05266 [Neurospora crassa OR74A]
  misc_feature (38)..(981): NCBI GI: 154297015 Blast Desc: BC1G_12596 [Botryotinia fuckeliana B05.10] gi|150843123|gb|EDN18316.1| BC1G_12596 [Botryotinia fuckeliana B05.10]
  misc_feature (1)..(981): NCBI GI: 145613245 Blast Desc: MGG_01781 [Magnaporthe grisea 70-15] gi|145020364|gb|EDK04493.1| MGG_01781 [Magnaporthe grisea 70-15]
  misc_feature (57)..(942): NCBI GI: 116196414 Blast Desc: CHGG_04805 [Chaetomium globosum CBS 148.51] gi|88180718|gb|EAQ88186.1| CHGG_04805 [Chaetomium globosum CBS 148.51]
  misc_feature (1)..(981): NCBI GI: 171688514 Blast Desc: protein product [Podospora anserina] gi|170944219|emb|CAP70329.1| protein product [Podospora anserina]
  misc_feature (1)..(981): NCBI GI: 212530176 Blast Desc: KH domain protein [Penicillium marneffei ATCC 18224] gi|210074643|gb|EEA28730.1| KH domain protein [Penicillium marneffei ATCC 18224]
  misc_feature: Useful for introducing or modulating the production of volatile compounds
MQKLAANMGMRHWSDRIQSPNFGMSSRPNVNNMNMAPMNPHTKPGPPQPLSPSPAADTTIHFAFNIPFASDLAGPNTEDILHATPDSVDRWTHPAEAPDDVPIYRLPIHQFHLANLRRMCHDITTGPLPVDAHVIETTPKHVKGQVVTVSLSGTPELVHTTRETILSGVPLALRCTTVDVDYNLIVNSATSTLDKNVTEGLDTLAVFCGVDIFVLGPKLTPTVDGLNGDVEVIRDQRWRVAVFGDIESAYYAKTQILILIDKLLGRQVDMVTLESTMHPIICGRSRKNIKTIESQTNTAIYFPPFAQLSRYCPPNAQHRDPNTIYITGESREGIELAKRRIHDTVARTKLFMKDAVVSPAKIDSILLTRMDKVRKTMEINGTYIMFPRLASTRTMIRIQGVEGLHIERTMKEIMSLAGQFYFASWWIQPGPQHPGPHDIRGMLGDICSNSDADIQFDKMNFQITGSDDAVKSALTVMSQNKFVTSAQQQIRVKIELANEHKEFVSGKKNGKINKIMTQSNVQIIFDSFREYNFDIDVIAPSYDSMKQGMTLVEQEMPASISFHVPDQYHKRIIGIGGQHIQRIMKKHSVFVKFSNAMDRGGMGREDDDVKVDNVICRTPARNAQNLELVKTEILDMVDRAHSEFTSQIVHVDRLYHRQLIARLNEIDGLEKRWNCKIVFPSTELASDEITVTGPEWQVPMCADDFLGMVPENHELVLMRTPSLVKFLESPEFVNELTTKLKTQYEVSLEVHENPDEKTEDGERTMTLLWKLTRNNAGGLRDAMDYLMQHLTAASVEMTIVKGALPRPKSDSFEDSLQYFDSKLLQHAPASVGTDSPTQPAFGDDMGQQRPATLFDKLRKPSQLLSSLDRRKNSSHSMNMFFKGSSNVSKSSLISIESTRSFHADRNPWNDSGVNLPDDDNSPWPTRHFGQNGHDQKVTPSSVPHGGDVTPRHNTRASGDSGRPSTSHSTNSGYPGPIGPYR

SEQ ID NO: 7964 - DNA, 4160 bp, Muscodor strobelii
  misc_feature: SGI EST ID NO. CUFF.19757.1
  misc_feature: Variant of the nucleotide sequence at SEQ ID NO 7962
aggccatcgacgcccatccccccatctcgcacatcgacctcttttcgtccacttctcctcatccacatccacatctacatccatctcaaccaccaccaccatcacctccgcctccacacctcgtctcgactgcgagctggacaggcacgcaccgcaccgcaccgcaccgccctttccttccccttctctttccctccttgagtctctttcttttccctttccttcgttgtcgtcggcgtggtctgcgtctgtctctctggcccggttccgccctagtgtgtcttctttttctcagtctctcagtttagtgataccccgatacccccggccggagtctcgcatgccacccgcaacctgtcctcgtcgtccatcatgcaaaagcttgcggccaacatgggcatgcgtcactggagcgatcgaatccagagccccaacttcggcatgtcgtcgcgtcccaacgtgaacaacatgaacatggcgcccatgaacccgcacaccaagcccggcccgccccagcccctcagcccgtcgcccgccgcggacacgaccatccacttcgccttcaacatccccttcgcctcggacctggctgggcccaacacggaggacatcctgcacgcgacgcccgactcggtcgaccgctggacgcaccccgccgaggcccccgacgacgtgcccatctacaggctgcccatccaccagttccacctggccaacctccgccgcatgtgccacgacatcaccaccggcccgctgcccgtcgacgcccacgtcatcgagaccacccccaagcacgtcaagggccaggttgtcaccgtctcgctgtccggcacccccgagcttgtccacacgacgcgtgagaccatcctgagcggtgtgccccttgcattgaggtgcaccaccgtcgacgtggactataacttgatcgtgaactctgctacttctactcttgacaagaacgtgactgagggtctcgacaccctcgctgtcttctgcggcgtagatattttcgtcctcggccccaagctcacgcccaccgtggacgggctcaatggtgatgtggaagtcatccgtgaccagagatggagagttgctgtgttcggtgacatcgagtctgcctactatgccaagacccagatcctgattctcattgacaaattggtgcggtgtgacagcgtaatcccaaagatagctcctagactgacacaaggtgtagctcgggcggcaggtcgacatggtaaccctcgagtccacaatgcaccccatcatctgcggccggtctcgtaagaacatcaagaccatcgagtcccagactaacacggccatctactttccccccttcgctcagctgtctagatattgcccgcccaatgctcaacatcgggaccccaacaccatctatatcaccggcgagagccgtgaaggtatcgagctagccaagcgtaggattcacgacacagtagctcggacaaagctcttcatgaaagatgccgttgtctcgccggccaagatcgatagtatcctccttacccgcatggacaaagtgcgaaagaccatggaaatcaacggcacctatatcatgtttccaagactagcctcaacacgcaccatgatccgcatccagggtgtagagggcctccacattgagcgcaccatgaaggagatcatgtctcttgctggccagttttattttgcgtcttggtggatccagccaggccctcagcacccgggtccccacgatatccgtggcatgctcggtgacatctgctccaactccgatgccgacattcaatttgacaagatgaactttcaaattaccggctcggacgatgctgtcaagtcagcgctaacggttatgtctcaaaacaagtttgtcacctcagcacagcaacagattcgcgtcaagattgagctcgcaaatgagcacaaagaattcgtctccggcaaaaagaatggtaagattaataaaatcatgacacagagcaatgttcagattatctttgacagcttcagagaatataacttcgatatcgatgtcatcgccccctcgtatgactcgatgaaacagggcatgactcttgttgagcaagagatgcctgcttccatttcatttcatgtccctgatcagtaccataaacgcatcatcgggattgggggtcagcacatccagcgtatcatgaaaaagcactccgtttttgtcaagttctcaaatgccatggatcgaggtggtatgggtcgtgaggatgacgacgtcaaagttgacaatgtcatctgccgcactccagcccgcaatgcccagaacctggagctggtgaagaccgaaatccttgacatggtagacagagcccattctgagttcacttctcaaattgtacacgttgatcggctgtaccacaggcagctcattgcgcggctcaatgaaattgacggactagagaagaggtggaactgcaagatcgttttcccaagtaccgaacttgcgagtgatgaaatcacagtcactggtcctgagtggcaggtgcccatgtgcgctgatgactttctgggcatggtccccgaaaaccacgagctggttctcatgcgaactccatccttggtaaaattcctcgagagcccggagttcgtcaacgagcttactacgaagctcaaaactcaatacgaagtgtccctggaggtccacgaaaatcccgacgaaaagaccgaagacggtgagcgtacgatgaccttgctctggaagttgactcgcaacaatgccggtggtctccgagatgccatggactatttaatgcagcatcttaccgctgcaagtgtcgaaatgactattgtcaagggcgctctccctcgccctaaatcagactcatttgaggactcgttgcaatattttgactcgaaactgcttcaacatgcccctgcttcggttgggaccgattcaccaacgcagccggcattcggagacgacatgggacagcagcgtccggctacccttttcgataaactgcggaagccctcgcagctgctctcatcgcttgatcgtagaaagaacagctctcactcgatgaacatgttcttcaaaggatcgagcaacgtgtctaagtcgtcgctcatctcaatcgagtcgacccgcagctttcatgctgaccgtaacccctggaatgatagcggtgtcaatcttccagacgacgacaacagcccttggccgacgcggcatttcggtcaaaatggccacgaccaaaaggtgacgcctagcagcgttcctcacggcggcgatgtaacgccgcgtcacaacacacgtgcgtccggcgacagcggccggccctcaacttcgcattccaccaattcaggataccctggtcccattggaccttaccgttagattcccgtctttctagatgctcacatgcaaattaccccgttttcccggttgggatatacccctggcgtacaagatacccggtcctacgactcgcgcattggtcggctctggttttgattttactctccctagaatgctgtccatgcaacaacagtggggattgctttctatttatgattgctcgacacgttcttccggtttactgttttgttttcagagtttatttcttactgcttgattccccccaaaatggtcgggtgactgtgcgcacacgattctcttttgatgctatatggaccaatatggccggatacgataccacgacccgccttcggcggttataaggcgttgccagaaacggcgagatggactgcgactgggagataccacgataccacaaaaagcacagggacgtcgaatgagccgatggatgaaaaaataccacgatgatttattgttctttgcttttacactcacgcgggtcctcgaagattgttttctcttttctgccttgtcatttgaacattctcggttcagcgcctgttattttgtgtggacgatatagcgataccaaacacggtactggacattcgtagatacgcagaaactggctgcttacgaggatgcgagagttcgagggcagactacaagcaaatgacgagagccgggcggtggggagcaaccaaaccagatgtgtgtgtgtggctttggtgttcgaagagttgttgatgtacgatagaagtagtacgcaagcaatgataccctcaagatgaaaccgtgagccata

SEQ ID NO: 7965 - DNA, 654 bp, Muscodor strobelii
  misc_feature: SGI cDNA ID NO. 562431
  misc_feature: Elevated expression when VOC is produced
  misc_feature: Encodes the peptide sequence at SEQ ID NO 7966
atgaccttgctctggaagttgactcgcaacaatgccggtggtctccgagatgccatggactatttaatgcagcatcttaccgctgcaagtgtcgaaatgactattgtcaagggcgctctccctcgccctaaatcagactcatttgaggactcgttgcaatattttgactcgaaactgcttcaacatgcccctgcttcggttgggaccgattcaccaacgcagccggcattcggagacgacatgggacagcagcgtccggctacccttttcgataaactgcggaagccctcgcagctgctctcatcgcttgatcgtagaaagaacagctctcactcgatgaacatgttcttcaaaggatcgagcaacgtgtctaagtcgtcgctcatctcaatcgagtcgacccgcagctttcatgctgaccgtaacccctggaatgatagcggtgtcaatcttccagacgacgacaacagcccttggccgacgcggcatttcggtcaaaatggccacgaccaaaaggtgacgcctagcagcgttcctcacggcggcgatgtaacgccgcgtcacaacacacgtgcgtccggcgacagcggccggccctcaacttcgcattccaccaattcaggataccctggtcccattggaccttaccgttag

SEQ ID NO: 7966 - protein, 217 aa, Muscodor strobelii
  misc_feature: SGI Peptide ID NO. 562431
  misc_feature (1)..(217): NCBI GI: 46123607 Blast Desc: FG06181.1 [Gibberella zeae PH-1]
  misc_feature (1)..(217): NCBI GI: 261352208 Blast Desc: KH domain-containing protein [Verticillium albo-atrum VaMs.102]
  misc_feature (1)..(217): NCBI GI: 85104540 Blast Desc: NCU05266 [Neurospora crassa OR74A] gi|28923325|gb|EAA32520.1| NCU05266 [Neurospora crassa OR74A]
  misc_feature (1)..(217): NCBI GI: 145613245 Blast Desc: MGG_01781 [Magnaporthe grisea 70-15] gi|145020364|gb|EDK04493.1| MGG_01781 [Magnaporthe grisea 70-15]
  misc_feature (1)..(217): NCBI GI: 156063592 Blast Desc: SS1G_01914 [Sclerotinia sclerotiorum 1980] gi|154697248|gb|EDN96986.1| SS1G_01914 [Sclerotinia sclerotiorum 1980]
  misc_feature (1)..(217): NCBI GI: 171688514 Blast Desc: protein product [Podospora anserina] gi|170944219|emb|CAP70329.1| protein product [Podospora anserina]
  misc_feature (1)..(217): NCBI GI: 154297015 Blast Desc: BC1G_12596 [Botryotinia fuckeliana B05.10] gi|150843123|gb|EDN18316.1| BC1G_12596 [Botryotinia fuckeliana B05.10]
  misc_feature (1)..(178): NCBI GI: 116196414 Blast Desc: CHGG_04805 [Chaetomium globosum CBS 148.51] gi|88180718|gb|EAQ88186.1| CHGG_04805 [Chaetomium globosum CBS 148.51]
  misc_feature (3)..(217): NCBI GI: 212530176 Blast Desc: KH domain protein [Penicillium marneffei ATCC 18224] gi|210074643|gb|EEA28730.1| KH domain protein [Penicillium marneffei ATCC 18224]
  misc_feature (3)..(217): NCBI GI: 242819405 Blast Desc: KH domain protein [Talaromyces stipitatus ATCC 10500] gi|218713777|gb|EED13201.1| KH domain protein [Talaromyces stipitatus ATCC 10500]
  misc_feature: Useful for introducing or modulating the production of volatile compounds
MTLLWKLTRNNAGGLRDAMDYLMQHLTAASVEMTIVKGALPRPKSDSFEDSLQYFDSKLLQHAPASVGTDSPTQPAFGDDMGQQRPATLFDKLRKPSQLLSSLDRRKNSSHSMNMFFKGSSNVSKSSLISIESTRSFHADRNPWNDSGVNLPDDDNSPWPTRHFGQNGHDQKVTPSSVPHGGDVTPRHNTRASGDSGRPSTSHSTNSGYPGPIGPYR

SEQ ID NO: 7967 - DNA, 4160 bp, Muscodor strobelii; identical to SEQ ID NO: 7964
  misc_feature: SGI EST ID NO. CUFF.19757.1
  misc_feature: Variant of the nucleotide sequence at SEQ ID NO 7965

SEQ ID NO: 7968 - DNA, 834 bp, Muscodor strobelii
  misc_feature: SGI cDNA ID NO. 562432
  misc_feature: Encodes the peptide sequence at SEQ ID NO 7969
atggccccgccgcctcctggtgaggatcgggagccgatcaacaaagacgcggaggagaacgaggatgccgtcgatgatacggaagacctggacgacgactttgtgcagctgcagcagactattagcaatgagcgccgcgccgcgcagaaccagcagggtcacggcatcggcgacttgctgccgttccccttctcgcctaatatccggcccctcaccatctcggacctcgagagctgcatcgcgctggagaatgccgcgtttaggaatccgcagcatcgatgttcgagcgagaagttcgagtaccgcctcacaacatgttcagagctaagcatgggcgtattctgcaccatagtgcccagcgccatcgcagacacgggtttcgacctctcaaccatccacactgcgcgccccgtcgagacatctcgcgacgatggcgcagtcagcgtcctcatggcgcacatcatcgccacgcgatctcacgactccgtagtgacagataaagccatggattacccgcgtgactacgcttctgacaagtccccctctgaactaggaaatcaggaggatggcagaacgctgtgcatccactctcttgccgttcatcctaagctgcagggtgtcggtctgggcaagttgatcatgaagagttatctacagcaggtcaagaattcggcgctgggtgagaaggttgcgcttatttgtcaggattatctagtgaactactacaagcgcttcggcttcacgcacgcaggaccgagcaaagctgccttcggcggcggcggatgggaggacatgacgctcgagtttggcggttcgtcgaccacggagcactag

SEQ ID NO: 7969 - protein, 277 aa, Muscodor strobelii
  misc_feature: SGI Peptide ID NO. 562432
  misc_feature (138)..(248): Pfam Id: PF00583 Pfam Desc: Acetyltransferase (GNAT) family
  misc_feature (4)..(271): NCBI GI: 171688548 Blast Desc: protein product [Podospora anserina] gi|170944236|emb|CAP70346.1| protein product [Podospora anserina]
  misc_feature (16)..(271): NCBI GI: 39971637 Blast Desc: MGG_07134 [Magnaporthe grisea 70-15] gi|145019607|gb|EDK03835.1| MGG_07134 [Magnaporthe grisea 70-15]
  misc_feature (64)..(269): NCBI GI: 154302081 Blast Desc: polyamine acetyltransferase [Botryotinia fuckeliana B05.10] gi|150855495|gb|EDN30687.1| polyamine acetyltransferase [Botryotinia fuckeliana B05.10]
  misc_feature (24)..(271): NCBI GI: 256727453 Blast Desc: NECHADRAFT_33840 [Nectria haematococca mpVI 77-13-4]
  misc_feature (15)..(271): NCBI GI: 46123571 Blast Desc: FG06163.1 [Gibberella zeae PH-1]
  misc_feature (68)..(272): NCBI GI: 189210503 Blast Desc: acetyltransferase [Pyrenophora tritici-repentis Pt-1C-BFP] gi|187977676|gb|EDU44302.1| acetyltransferase [Pyrenophora tritici-repentis Pt-1C-BFP]
  misc_feature (38)..(267): NCBI GI: 169620648 Blast Desc: SNOG_13527 [Phaeosphaeria nodorum SN15] gi|160704079|gb|EAT78974.2| SNOG_13527 [Phaeosphaeria nodorum SN15]
  misc_feature (1)..(266): NCBI GI: 121715662 Blast Desc: GNAT family acetyltransferase, [Aspergillus clavatus NRRL 1] gi|119403597|gb|EAW14014.1| GNAT family acetyltransferase, [Aspergillus clavatus NRRL 1]
  misc_feature (66)..(269): NCBI GI: 71001602 Blast Desc: acetyltransferase, GNAT family family [Aspergillus fumigatus Af293] gi|66853120|gb|EAL93444.1| acetyltransferase, GNAT family family [Aspergillus fumigatus Af293] GNAT family
  misc_feature (66)..(269): NCBI GI: 240104716 Blast Desc: GNAT family acetyltransferase, [Coccidioides posadasii C735 delta SOWgp]
  misc_feature (68)..(273): SWISSPROT Homolog: EC 2.3.1.87 Aralkylamine N-acetyltransferase
MAPPPPGEDREPINKDAEENEDAVDDTEDLDDDFVQLQQTISNERRAAQNQQGHGIGDLLPFPFSPNIRPLTISDLESCIALENAAFRNPQHRCSSEKFEYRLTTCSELSMGVFCTIVPSAIADTGFDLSTIHTARPVETSRDDGAVSVLMAHIIATRSHDSVVTDKAMDYPRDYASDKSPSELGNQEDGRTLCIHSLAVHPKLQGVGLGKLIMKSYLQQVKNSALGEKVALICQDYLVNYYKRFGFTHAGPSKAAFGGGGWEDMTLEFGGSSTTEH

SEQ ID NO: 7970 - DNA, 3871 bp, Muscodor strobelii
  misc_feature: SGI EST ID NO. CUFF.19657.0
  misc_feature: Variant of the nucleotide sequence at SEQ ID NO 7968
acaacatgttcagagctaagcatgggcgtattctgcaccatagtgcccagcgccatcgcagacacgggtttcgacctctcaaccatccacactgcgcgccccgtcgagacatctcgcgacgatggcgcagtcagcgtcctcatggcgcacatcatcgccacgcgatctcacgactccgtagtgacagataaagccatggattacccgcgtgactacgcttctgacaagtccccctctgaactaggaaatcaggaggatggcagaacgctgtgcatccactctcttgccgttcatcctaagctgcagggtgtcggtctgggcaagttgatcatgaagagttatctacagcaggtcaagaattcggcgctgggtgagaaggttgcgcttatttgtcaggattatctagtgaactactacaagcgcttcggcttcacgcacgcaggaccgagcaaagctgccttcggcggcggcggatgggaggacatgacgctcgagtttggcggttcgtcgaccacggagcactagtcggctcctcattgggaaggcccgctagacccgattcccgaggttgagtgacgaacgactgagaggatgagaacgatgggcgtgtgatgagaatacgatacgagtattgccgggaacgaaggagatgaagaacatgtctatcagatatagacagagagctgacctgacaggcttgccccttttctcaatcaagttgtcccgcatttgagattcggcgtcctagctctgcagaccgcttgtggtcaattacatgttctcgagcagaaaaggacgcaatcgtagccacagacgacctagatttggtcataaagagtggcacatcgttgttcttgcaggaaaatattcgtccatagcatgagtaaataaataccaggattgagtactatttggtgttctagcattgcaacgattcaatggacgtgtgatgatatagatagacatcttttgctatgtgaagatatctatctaactcatttttaccttgcagaactccgagtaaagcaaaaaagcaccattcccacgacgccagatgcacaactaaaagcagttatctcatgagtctcgatagtcattaatagctatcagagtgctatttctatctccctagctagagcatcagacacaagcatttgcattgtgttagctctgcttcttgtcattctcgtcatgaaagcatcggcactctctggtatcattatgaaggtgtcagttcgtctgcctagcacacagctcgcgtgatctcatataaacatataaacccatccacggatgcttccttaacggtgagaagctttgccgatagagcgctttccagtaaactaggagaaaaagaatgtcagtatgccgttatgtctttcatgaccgcgactttgacttttagaggtaacataccaaatgcttcggcaacatagcagtcgtgtgcctgtcagcctcaccctgccgggccatgcggttcatcttcctctggcttagcttggcttgcttctcgaccttggttctgacttcgtcctggacaccgtcaacacgacggttggtcgccggctggctgcgggctctgctctttgatcgaagtctctccttgggcgtcatgtccacatccatagcgtttgagtcttcggttcccagtcgactgcgagtcatcgaacgaccacgagtttgacgagtctgagcgcgaccccggagttgcaattcctccgtatcaactcccagtttgtcaagagaatcctcaagctgtgacagcgacttcttggccgcactgcgcggcaaagcggctctgttcttgatgcggcgcatccgagcctcgtttcggatgagtgcttgcttcgttctgatctgctctgctttcctccggatatcggcagcctccacgtcatccacctcctcatccgagtcgtagtaaccctcgccttctaatctctcctcctcttcctcaagggcttgcaatttggcctctatatcagggtcaacatagtcgtagacattcttgccgtcgaaaatctcgggaatcttatcgtgcttccactcgtcattctccaaaaggtaatcggccttcaagtccacattgaacacaccagcgccgccgttagcctcttccatgtcgcgcgcaagcaggcggcgttcaggatcgttcttgtcgaatttcttgagtcccttgacggcatcaggaataaagctctctcggacttggccgtccataggtgtagccacgtgtattctcgccatgacatcggcgagtcgactgcccacagcgccgctgctggacgtgccagcgttgaccttctcgctaactcgatgagcgagaagtctttctgagatgaggttcttggtttcctggactccttcagtggtgttgcatgacaactggacaagttccacattggaggacgagaccaagtcctgcagttctgcggctgtctcggcatcaagatcttcaggtcgcatgatgtcgatcttgttgacgacgaggaagattagcttgttcgagaataggggcttgaggttacggaagagggccatctgggccttgaagctatagccacactgctcgctcaaatcgcagaaatagaggatggcggctctcaaatgagccatggcggtgacagactgcatctcgatcgtgttcatctcctcgagcggatggtccagcacacccggggtatctatggcttgaaatctcaggtactgatagtcgtagtgaccaacgaaaagactcttggtggtgaaggcgtagggctgaacatcgacgtcggccctcgagatgctcttcaggaaggagctcttgccggtgttagggaagccgcatatcagcagagtcctggcggtggggtcgatgctggggagacggccgagatgttggcggacctggtccaggtacagcagggggtctttgaggcgcttggtcaaggtggccatgcgacccaaggcagcgcgcttcagctgcttgcactgatacagactctgtgcatacttgagtagtcgaacgtagtcgcggctgatgctctcgataagagacttggaggtggcgagctggccgagggcaatgcggaagtggtcggcatcgtagagcgtattcatcagatctttatggaacgggtggaggtcgttgaggcgtgggaagccatcctgcaacacacatgcaaattagcctatggatttacgagcgctgtaggagagggttctaaccaagatcaaggttaacttctccgagaaggtctcggctgtgaatttgactttgcgggtatagaaagcgcctaacagcaggcaggtcagttgacggttcccgagacatgaggatgggccatcatacggattcgcgagatcttaaagccactgtgatatgtcagaagcgcagcatagttgtgggttgaagagcaggacataccttcggatctgggtgggtaggcgccgttgagtcctcgacaagacaatctgcagccaacatgttagcaatcagtccatttatgtcccaaacacaacacagcgaagagttgctctagagtgttgcggatgttgttgcgagtgcatgcgtacatcaagaaactcttgtgaggtgggaaccggagcgatgtccttccatgtcgtcttcatcttggcaacaggttgcgcacgaagcgcagtcgtggtcgcagagagatagttactcgtatgagattatcgtcaatccgtcgagtcgagagcgtatgtcttgatgtcccaaaaggtgcgaggtgcacttagtcgccgtgtggtttgagatttagtacacaccactgttttgtcgccggacacaagaatccctgggataagagagaaatcaggcctttaccgctggggcaaaatcccatggacaagccagcggattgcaccc

SEQ ID NO: 7971 - DNA, 1968 bp, Muscodor strobelii
  misc_feature: SGI cDNA ID NO. 562433
  misc_feature: Reduced expression when VOC is produced
  misc_feature: Encodes the peptide sequence at SEQ ID NO 7972
atgaagacgacatggaaggacatcgctccggttcccacctcacaagagtttcttgatattgtcttgtcgaggactcaacggcgcctacccacccagatccgaagtggctttaagatctcgcgaatccgcgctttctatacccgcaaagtcaaattcacagccgagaccttctcggagaagttaaccttgatcttggatggcttcccacgcctcaacgacctccacccgttccataaagatctgatgaatacgctctacgatgccgaccacttccgcattgccctcggccagctcgccacctccaagtctcttatcgagagcatcagccgcgactacgttcgactactcaagtatgcacagagtctgtatcagtgcaagcagctgaagcgcgctgccttgggtcgcatggccaccttgaccaagcgcctcaaagaccccctgctgtacctggaccaggtccgccaacatctcggccgtctccccagcatcgaccccaccgccaggactctgctgatatgcggcttccctaacaccggcaagagctccttcctgaagagcatctcgagggccgacgtcgatgttcagccctacgccttcaccaccaagagtcttttcgttggtcactacgactatcagtacctgagatttcaagccatagataccccgggtgtgctggaccatccgctcgaggagatgaacacgatcgagatgcagtctgtcaccgccatggctcatttgagagccgccatcctctatttctgcgatttgagcgagcagtgtggctatagcttcaaggcccagatggccctcttccgtaacctcaagcccctattctcgaacaagctaatcttcctcgtcgtcaacaagatcgacatcatgcgacctgaagatcttgatgccgagacagccgcagaactgcaggacttggtctcgtcctccaatgtggaacttgtccagttgtcatgcaacaccactgaaggagtccaggaaaccaagaacctcatctcagaaagacttctcgctcatcgagttagcgagaaggtcaacgctggcacgtccagcagcggcgctgtgggcagtcgactcgccgatgtcatggcgagaatacacgtggctacacctatggacggccaagtccgagagagctttattcctgatgccgtcaagggactcaagaaattcgacaagaacgatcctgaacgccgcctgcttgcgcgcgacatggaagaggctaacggcggcgctggtgtgttcaatgtggacttgaaggccgattaccttttggagaatgacgagtggaagcacgataagattcccgagattttcgacggcaagaatgtctacgactatgttgaccctgatatagaggccaaattgcaagcccttgaggaagaggaggagagattagaaggcgagggttactacgactcggatgaggaggtggatgacgtggaggctgccgatatccggaggaaagcagagcagatcagaacgaagcaagcactcatccgaaacgaggctcggatgcgccgcatcaagaacagagccgctttgccgcgcagtgcggccaagaagtcgctgtcacagcttgaggattctcttgacaaactgggagttgatacggaggaattgcaactccggggtcgcgctcagactcgtcaaactcgtggtcgttcgatgactcgcagtcgactgggaaccgaagactcaaacgctatggatgtggacatgacgcccaaggagagacttcgatcaaagagcagagcccgcagccagccggcgaccaaccgtcgtgttgacggtgtccaggacgaagtcagaaccaaggtcgagaagcaagccaagctaagccagaggaagatgaaccgcatggcccggcagggtgaggctgacaggcacacgactgctatgttgccgaagcatttgtttactggaaagcgctctatcggcaaagcttctcaccgttaa

SEQ ID NO: 7972 - protein, 655 aa, Muscodor strobelii
  misc_feature: SGI Peptide ID NO. 562433
  misc_feature (168)..(291): Pfam Id: PF01926 Pfam Desc: GTPase of function
  misc_feature (234)..(291): Pfam Id: PF06858 Pfam Desc: Nucleolar GTP-binding protein 1 (NOG1)
  misc_feature (401)..(455): Pfam Id: PF08155 Pfam Desc: NOGCT (NUC087) domain
  misc_feature (168)..(224): Pfam Id: PF01926 Pfam Desc: GTPase of function
  misc_feature (1)..(655): NCBI GI: 39971641 Blast Desc: MGG_07136 [Magnaporthe grisea 70-15] gi|145019609|gb|EDK03837.1| MGG_07136 [Magnaporthe grisea 70-15]
  misc_feature (1)..(655): NCBI GI: 156062462 Blast Desc: SS1G_01347 [Sclerotinia sclerotiorum 1980] gi|154696683|gb|EDN96421.1| SS1G_01347 [Sclerotinia sclerotiorum 1980]
  misc_feature (1)..(655): NCBI GI: 115384488 Blast Desc: nucleolar GTP-binding protein 1 [Aspergillus terreus NIH2624] gi|114196483|gb|EAU38183.1| nucleolar GTP-binding protein 1 [Aspergillus terreus NIH2624]
  misc_feature (1)..(655): NCBI GI: 261204297 Blast Desc: nucleolar GTP-binding protein [Ajellomyces dermatitidis SLH14081] gi|239587147|gb|EEQ69790.1| nucleolar GTP-binding protein [Ajellomyces dermatitidis SLH14081]
  misc_feature (4)..(655): NCBI GI: 171688544 Blast Desc: protein product [Podospora anserina] gi|170944234|emb|CAP70344.1| protein product [Podospora anserina]
  misc_feature (1)..(655): NCBI GI: 238839746 Blast Desc: nucleolar GTP-binding protein 1 [Microsporum canis CBS 113480]
  misc_feature (1)..(655): NCBI GI: 169774937 Blast Desc: [Aspergillus oryzae RIB40] gi|83769799|dbj|BAE59934.1| protein product [Aspergillus oryzae]
  misc_feature (1)..(655): NCBI GI: 67539390 Blast Desc: AN5865.2 [Aspergillus nidulans FGSC A4] gi|40739184|gb|EAA58374.1| AN5865.2 [Aspergillus nidulans FGSC A4] gi|259479973|tpe|CBF70681.1| TPA: nucleolar GTP-binding FGSC
  misc_feature (1)..(655): NCBI GI: 121715664 Blast Desc: nucleolar GTP-binding protein [Aspergillus clavatus NRRL 1] gi|119403598|gb|EAW14015.1| nucleolar GTP-binding protein [Aspergillus clavatus NRRL 1]
  misc_feature (1)..(655): NCBI GI: 225559118 Blast Desc: nucleolar GTP-binding protein [Ajellomyces capsulatus G186AR]
  misc_feature: Useful for introducing or modulating the production of volatile compounds
MKTTWKDIAPVPTSQEFLDIVLSRTQRRLPTQIRSGFKISRIRAFYTRKVKFTAETFSEKLTLILDGFPRLNDLHPFHKDLMNTLYDADHFRIALGQLATSKSLIESISRDYVRLLKYAQSLYQCKQLKRAALGRMATLTKRLKDPLLYLDQVRQHLGRLPSIDPTARTLLICGFPNTGKSSFLKSISRADVDVQPYAFTTKSLFVGHYDYQYLRFQAIDTPGVLDHPLEEMNTIEMQSVTAMAHLRAAILYFCDLSEQCGYSFKAQMALFRNLKPLFSNKLIFLVVNKIDIMRPEDLDAETAAELQDLVSSSNVELVQLSCNTTEGVQETKNLISERLLAHRVSEKVNAGTSSSGAVGSRLADVMARIHVATPMDGQVRESFIPDAVKGLKKFDKNDPERRLLARDMEEANGGAGVFNVDLKADYLLENDEWKHDKIPEIFDGKNVYDYVDPDIEAKLQALEEEEERLEGEGYYDSDEEVDDVEAADIRRKAEQIRTKQALIRNEARMRRIKNRAALPRSAAKKSLSQLEDSLDKLGVDTEELQLRGRAQTRQTRGRSMTRSRLGTEDSNAMDVDMTPKERLRSKSRARSQPATNRRVDGVQDEVRTKVEKQAKLSQRKMNRMARQGEADRHTTAMLPKHLFTGKRSIGKASHR

SEQ ID NO: 7973 - DNA, 3124 bp, Muscodor strobelii
  misc_feature: SGI EST ID NO. CUFF.19658.2
  misc_feature: Variant of the nucleotide sequence at SEQ ID NO 7971
gggtgcaatccgctggcttgtccatgggattttgccccagcggtaaaggcctgatttctctcttatcccagggattcttgtgtccggcgacaaaacagtggtgtgtactaaatctcaaaccacacggcgactaagtgcacctcgcaccttttgggacatcaagacatacgctctcgactcgacggattgacgataatctcatacgagtaactatctctctgcgaccacgactgcgcttcgtgcgcaacctgttgccaagatgaagacgacatggaaggacatcgctccggttcccacctcacaagagtttcttgatattgtcttgtcgaggactcaacggcgcctacccacccagatccgaagtggctttaagatctcgcgaatccgcgctttctatacccgcaaagtcaaattcacagccgagaccttctcggagaagttaaccttgatcttggatggcttcccacgcctcaacgacctccacccgttccataaagatctgatgaatacgctctacgatgccgaccacttccgcattgccctcggccagctcgccacctccaagtctcttatcgagagcatcagccgcgactacgttcgactactcaagtatgcacagagtctgtatcagtgcaagcagctgaagcgcgctgccttgggtcgcatggccaccttgaccaagcgcctcaaagaccccctgctgtacctggaccaggtccgccaacatctcggccgtctccccagcatcgaccccaccgccaggactctgctgatatgcggcttccctaacaccggcaagagctccttcctgaagagcatctcgagggccgacgtcgatgttcagccctacgccttcaccaccaagagtcttttcgttggtcactacgactatcagtacctgagatttcaagccatagataccccgggtgtgctggaccatccgctcgaggagatgaacacgatcgagatgcagtctgtcaccgccatggctcatttgagagccgccatcctctatttctgcgatttgagcgagcagtgtggctatagcttcaaggcccagatggccctcttccgtaacctcaagcccctattctcgaacaagctaatcttcctcgtcgtcaacaagatcgacatcatgcgacctgaagatcttgatgccgagacagccgcagaactgcaggacttggtctcgtcctccaatgtggaacttgtccagttgtcatgcaacaccactgaaggagtccaggaaaccaagaacctcatctcagaaagacttctcgctcatcgagttagcgagaaggtcaacgctggcacgtccagcagcggcgctgtgggcagtcgactcgccgatgtcatggcgagaatacacgtggctacacctatggacggccaagtccgagagagctttattcctgatgccgtcaagggactcaagaaattcgacaagaacgatcctgaacgccgcctgcttgcgcgcgacatggaagaggctaacggcggcgctggtgtgttcaatgtggacttgaaggccgattaccttttggagaatgacgagtggaagcacgataagattcccgagattttcgacggcaagaatgtctacgactatgttgaccctgatatagaggccaaattgcaagcccttgaggaagaggaggagagattagaaggcgagggttactacgactcggatgaggaggtggatgacgtggaggctgccgatatccggaggaaagcagagcagatcagaacgaagcaagcactcatccgaaacgaggctcggatgcgccgcatcaagaacagagccgctttgccgcgcagtgcggccaagaagtcgctgtcacagcttgaggattctcttgacaaactgggagttgatacggaggaattgcaactccggggtcgcgctcagactcgtcaaactcgtggtcgttcgatgactcgcagtcgactgggaaccgaagactcaaacgctatggatgtggacatgacgcccaaggagagacttcgatcaaagagcagagcccgcagccagccggcgaccaaccgtcgtgttgacggtgtccaggacgaagtcagaaccaaggtcgagaagcaagccaagctaagccagaggaagatgaaccgcatggcccggcagggtgaggctgacaggcacacgactgctatgttgccgaagcatttgtttactggaaagcgctctatcggcaaagcttctcaccgttaaggaagcatccgtggatgggtttatatgtttatatgagatcacgcgagctgtgtgctaggcagacgaactgacaccttcataatgataccagagagtgccgatgctttcatgacgagaatgacaagaagcagagctaacacaatgcaaatgcttgtgtctgatgctctagctagggagatagaaatagcactctgatagctattaatgactatcgagactcatgagataactgcttttagttgtgcatctggcgtcgtgggaatggtgcttttttgctttactcggagttctgcaaggtaaaaatgagttagatagatatcttcacatagcaaaagatgtctatctatatcatcacacgtccattgaatcgttgcaatgctagaacaccaaatagtactcaatcctggtatttatttactcatgctatggacgaatattttcctgcaagaacaacgatgtgccactctttatgaccaaatctaggtcgtctgtggctacgattgcgtccttttctgctcgagaacatgtaattgaccacaagcggtctgcagagctaggacgccgaatctcaaatgcgggacaacttgattgagaaaaggggcaagcctgtcaggtcagctctctgtctatatctgatagacatgttcttcatctccttcgttcccggcaatactcgtatcgtattctcatcacacgcccatcgttctcatcctctcagtcgttcgtcactcaacctcgggaatcgggtctagcgggccttcccaatgaggagccgactagtgctccgtggtcgacgaaccgccaaactcgagcgtcatgtcctcccatccgccgccgccgaaggcagctttgctcggtcctgcgtgcgtgaagccgaagcgcttgtagtagttcact

SEQ ID NO: 7974 - DNA, 675 bp, Muscodor strobelii
  misc_feature: SGI cDNA ID NO. 562434
  misc_feature: Encodes the peptide sequence at SEQ ID NO 7975
atgtctcttccgcagtacaagcaagacttcctgcgcgccgccattgatggtggtgccctgcgcttcggctcctacgagttgaaatcaaaacgaatctcgccatacttcttcaactcgggcgatttcttcacgcttgagctgcacatgcctattgccgatgcctacgcccagagcatccacgccgaagcccccgagttcgacgtcatcttcggccccgcttataagggcatcccgctggctgctaccgtgctctatgccctcggccgcattgattttgccaagtaccgcagcgccgcttacagctatgaccgcaaggaggccaaggaccacggcgagggcggcaccatcgtcggctccccgcttaagggaaagcgcgtgctgattattgatgatgtcgtctctgctggtaccgcaaagcgccaggccatcgacatgatccgcgcccagggtggcacggttgtcggcatcatcgtcgccctcgaccgccaggaaaccctaccggacggtgacggcaagacaagtgctatcggtcagctacacaaagaatatcagttccccattctagccattataaaactcaacgacatcattgccgctggtgcaaatgtcatttctgacccaaaagtcattaaggacattgaagaataccgtgccaagtacggcgcaactgaataa

SEQ ID NO: 7975 - protein, 224 aa, Muscodor strobelii
  misc_feature: SGI Peptide ID NO. 562434
  misc_feature (41)..(172): Pfam Id: PF00156 Pfam Desc: Phosphoribosyl transferase domain
  misc_feature (51)..(172): Pfam Id: PF00156 Pfam Desc: Phosphoribosyl transferase domain
  misc_feature (2)..(224): NCBI GI: 156062464 Blast Desc: orotate phosphoribosyltransferase [Sclerotinia sclerotiorum 1980] gi|154696684|gb|EDN96422.1| orotate phosphoribosyltransferase [Sclerotinia sclerotiorum 1980]
  misc_feature (2)..(224): NCBI GI: 154302083 Blast Desc: BC1G_09722 [Botryotinia fuckeliana B05.10] gi|150855496|gb|EDN30688.1| BC1G_09722 [Botryotinia fuckeliana B05.10]
  misc_feature (2)..(224): NCBI GI: 116196430 Blast Desc: orotate phosphoribosyltransferase [Chaetomium globosum CBS 148.51] gi|88180726|gb|EAQ88194.1| orotate phosphoribosyltransferase [Chaetomium globosum CBS 148.51]
  misc_feature (3)..(224): NCBI GI: 548650 Blast Desc: PYRE_COLGR RecName: Full=Orotate phosphoribosyltransferase; Short=OPRTase; Short=OPRT gi|259367|gb|AAB24061.1| orotate phosphoribosyl transferase
  misc_feature (3)..(224): NCBI GI: 3334307 Blast Desc: PYRE_METAN RecName: Full=Orotate phosphoribosyltransferase; Short=OPRTase; Short=OPRT gi|2853621|gb|AAC02431.1| orotate phosphoribosyl transferase
  misc_feature (3)..(224): NCBI GI: 171688546 Blast Desc: protein product [Podospora anserina] gi|170944235|emb|CAP70345.1| protein product [Podospora anserina]
  misc_feature (2)..(224): NCBI GI: 85105917 Blast Desc: orotate phosphoribosyltransferase [Neurospora crassa OR74A] gi|74613392|sp|Q7RVF7.1|PYRE_NEUCR RecName: Full=Orotate phosphoribosyltransferase; Short=OPRTase; Short=OPRT orotate
  misc_feature (3)..(224): NCBI GI: 46123573 Blast Desc: PYRE_METAN Orotate phosphoribosyltransferase (OPRT) (OPRTase) [Gibberella zeae PH-1]
  misc_feature (2)..(224): NCBI GI: 39971639 Blast Desc: MGG_07135 [Magnaporthe grisea 70-15] gi|145019608|gb|EDK03836.1| MGG_07135 [Magnaporthe grisea 70-15]
  misc_feature (3)..(224): NCBI GI: 261355844 Blast Desc: orotate phosphoribosyltransferase [Verticillium albo-atrum VaMs.102]
  misc_feature (3)..(224): SWISSPROT Homolog: EC 2.4.2.10 Orotate phosphoribosyltransferase
MSLPQYKQDFLRAAIDGGALRFGSYELKSKRISPYFFNSGDFFTLELHMPIADAYAQSIHAEAPEFDVIFGPAYKGIPLAATVLYALGRIDFAKYRSAAYSYDRKEAKDHGEGGTIVGSPLKGKRVLIIDDVVSAGTAKRQAIDMIRAQGGTVVGIIVALDRQETLPDGDGKTSAIGQLHKEYQFPILAIIKLNDIIAAGANVISDPKVIKDIEEYRAKYGATE

SEQ ID NO: 7976 - DNA, 6565 bp, Muscodor strobelii
  misc_feature: SGI EST ID NO. CUFF.20734.0
  misc_feature: Variant of the nucleotide sequence at SEQ ID NO 7974
gcgtaactcagtcaacgaacaagacactttggactcggtaagtgtatcattgactatttaaaaactccttgtcgatctgattgcgtgtatatctgaaccggtactgctgctgaggctggccataaactcgagacaaatccttgcatgtgaccatgtctcttccgcagtacaagcaagacttcctgcgcgccgccattgatggtggtgccctgcgcttcggctcctacgagttgaaatcaaaacgaatctcgccatacttcttcaactcgggcgatttcttcacgcttgagctgcacatgcctattgccgatgcctacgcccagagcatccacgccgaagcccccgagttcgacgtcatcttcggccccgcttataagggcatcccgctggctgctaccgtgctctatgccctcggccgcattgattttgccaagtaccgcagcgccgcttacagctatgaccgcaaggaggccaaggaccacggcgagggcggcaccatcgtcggctccccgcttaagggaaagcgcgtgctgattattgatgatgtcgtctctgctggtaccgcaaagcgccaggccatcgacatgatccgcgcccagggtggcacggttgtcggcatcatcgtcgccctcgaccgccaggaaaccctaccggacggtgacggcaagacaagtgctatcggtcagctacacaaagaatatcagttccccattctagccattataaaactcaacgacatcattgccgctggtgcaaatgtcatttctgacccaaaagtcattaaggacattgaagaataccgtgccaagtacggcgcaactgaataagttgagcagtgtgcagactctttctgtcgcgggaataaaatggtgaaacaatcaatatgatacatcctgtaataaaatcatgtgatatttagcaaaagaaatcaagttcgtttcgtttgagatgtatcaattccgttccaccgtatcagaaccactttggggcggtcgttttgctgtggcgcacgcgtggcgtatctttgtcagttcagcaacgtccacttatcgagccgccacccatccgtccgatacgattctgctgtgaaaccatgaataagaggcaacaagagcgaaaataataaacccagagcagaggccgagaggacgaagtaccgatacaaataaccgtctcgagctacacacggcccgccgctcggtactcttcaccgctaattccttccacgaaagggtcataaattccagtccctgacacatcgcaaacccgccatccactgagccaagcaggggcgtagcaagatcaacctcaccagtcgcgttctgatcagcaaaaattcttctctatcgtgtcacgccattccacacgctcgtttactcggcttgtacagagcagacattgccaagtttgcctcgccttgctaatttgttttgctcttgcctccggcgtttgacgcaaccacgaactctcatctcgcgtcaagcaggagaaaggcgccggctttgcttttacgtccggtgcctcgcaaatattactcatcatatcggtcgtctgaggtcagctcacacccgataccaccccacattacctatgtcgcttctccggtcgttccgaaatctatcgtcccggacgcgcatcggtgtcggaatcgggttattagcatggggtgtcattggattgcaactatcggacagagctgaggagaagtatttcaaggccacggacgaagaccgcgccgcgctacaagaaatgacgccgcgcattacggccgtcgatcggcttgaccagtctcgcccacaaagctcgtgatcatgtcaaggtcttcaccctttttttgtgaaatacgtctcaccctactgtcactactgtaatatcaatgtgatgaataatagccatgtttactatggaccgtgtaaaactagatactagctagtcaatggagcgaactgtcgactaattatgtgtcgagcgaccagacatatgcattgcccatgtgaagtaggtacatcaggcattgctgaccacgcgggcaaatcttccatgtgaattcaccgtcgaattacgaaacgacacacgcaaccgtgtatggccagcatatgtacagcagacaaacaagtttttataattcattcgttaaaacatctaatgcatctgacagtgactggtactagtgtgtcgcccatcatcagtccacaccgaacatactcgagtcctcctttccattgaacgtatatctttgcaccatgcaataggcactcagagacggagaggcccgactcctcgtgcatgtctgcctaggatgcgagcgtgaaacataacacccacaagaaaaggacagaagaaccacctcataatctagtcatcgagtctaatgcgaggaagccatagccagtctaatgaaacgaagagaaccgaaccggaaaatgcaaacaaacagaccgcccccgatgcttgttcaatgctgcttgagtgaaaactttttctcagagagacatgctgaaatcaaaaacgccgtgaatgctcattgggtgctgtaccagtccactgttgtcagatctagataccagtcttgaccacagatgtcgtcgaagactgaataacggatggctgcggtttgaacaattgggagaggtctattgtgaggttggagaccacatgatcgtggccgatctcaccaacagagccaagttcctcgcctcgtgatgcgccgtcggtctcgacccacgttgtgacatgcttcaatagctgcagaacttgtacgaaccgttcatcgcggcccagctgtgcagtgttcagacgcgggttgcggaggaataattttgcgaggcagaagaagtgcgaaccgtctcgacagaaaccatggcgtcgcgggttggaaacagatggtggaaattgaattgccatgtccatatcccagtagcttttccatttatctagagcagcactaaaggcggcgtaatctcgaactgacatgggctgagatccaggtaccggagtacctcggccactgttgttggcactgctgtggcctgtggatgtaccagaacctcccatcacgacccagtcgttgtgacggagtggtgtcattgacccgttcagatctgcaaaatgtccttcgatctgtgtccgtcgaagctgggcaagaatcgcatgaatgaggatgaatttaccccacaggttagtgctgcctggctgtatttgaacagagccttgtagcatggcgcgaaggaccatgtcaagttcgggttgcttgcttcgctgagacccgtctggattgctcttcttcacggcatcaatgccgaacaagttgagagctcgggcacattcgtcactggtcaccgcctcccaggccgcatcgtcagcaggaaggggtacagtaatctcaaacgcatcgagaagtggatggaagttgaagaataggccgtgtgcaatatccatcaagtggatcatgtgcatcagccgtattcgcttttcttgttcgacccacgatgcccaatcaaaggcatgcggcccagttgtctgcagttcaagatggggttggtgcagaaagctgtgcagactcgagtcactgacgacggacaacaacccggaatttcgcgcaaccaaacacgcgacattgaagtgccgtcgcgcaatttctcgatgcatgggagtgccattccaagtcagcaagacaataagtagttgcaaagcttgcaacttctcgaggccgagactatctttaccgctctcgatcttgaaagggatctcgacagtggaattcagattacagtcacgctctaaagcaatgttaagcaaggtcatgacttcgcgaacgagcaatggatccacaagtgctgagtaacaagcaccgacgcaacacatggctgcagtgagccccgtgtatgctttcataatgtgaaaagtagggatatgaagaaaaggaaaatgaatatggaaatggatgaacgactcaagaaaggctctaatgctttcgggcatgaagaaatgatttatggcggcgttttcgggaggtgcaaaattgcaaggagagaggaagtttatgatgagggcagaaagctgctggcatccgtcctgcattgatgtctgcggttcccagttagagaagaggggtcgatcggtgccatcggtcgagggggcgcccggtatgccattgaatctctcgggagcgaggtcaggctcggttttgagtgcggtctgattctgatcaaaattaggagacgggaacgtagtggtgtaggtatgtgattggagcgcaccaggctgttggaacatctgagaccagtcaaggccagactgctgattcgagcccgaagctccgtacagaggcataccattttggttcggcggcatactaaagttggctaactgggggttgatgttggaggacatcgaggatgggacttcgccgttgtatccaccaggcatgtttctgcggtcccggttggcgttgtcgtccatccgactcatactactcgatctagagagctgattctggtcgttggccatgtttcccataccgtcttggatctggaccataccgaatggatggacaactccgtcaccgggcatattggtcatgccattcatgtgactcaagtcgccttctgccttttgggcattctgctgttgctttttaacgtgtgcctggggatgagacagatgactcgccccagtagggtttcctcgacgaatcgagcacttctggaagtgacgcttcaagatgtcacttcgcgaaaacgtatcgcgacacaacacacacatgtatgggcggtcgccggtatctgttcatctgtcagtgaaaccaggacgaatgctgtatgcgactaccaacttacggcgcaggagatggcgcttgagatgcttggcatgaaggtaagtcttggtacaatggggacaagggaactttccgtcagcatccttctggggaataacagtgttctttgaggcaccgctaccagtcggcgctgcaggccgacctggtgcgctagggagtatgccgcggcgaccttgagacccgacgacgtgggttggctgttccgcatcctgatagggcgatgggtgaggcatcatagaagctccgccatagggtgagttgagactaggctgaggaatgactccaccagcgggcatagggcggagaacgggaggacgcgctgcagctggggccggtgcaatcggttgtgggtgcgatgctgcgaccgatgcttgtggcatcatggacgtggtcgtcgggtagccctggggttggttctggtattgattaggcatcattccatacgaaccacgaccatggcctgcgttaggaggtggatagttgctcatattgtttggcggctggggcgtgccgttgttaggagtccctggcgttctaggagtatgagggtggctcccgtagatcgattgcatactattgctgtgctggagaggaggcagtgtatgctgagtaacagagccttgctgcagctgatgaggagcgatggctgatggtgaagggtatgtggaccccgatgtgcctagctgattagagtacggctggtgagagggatgatgggcgctgtccatgtccttgaaaataaggaaagttacggtattgcagtcaataccgagacgcgatcccaaggtctcaagcctacgtcctctcgatgtcgagaaagatcagtgtgcttggtagtgggtgtcgcgattagggctacgcctacgcgggatggtatttcctgccgctgagaaaatatcgacaatggcagactcgtcacccgaaagaccttatcctccacgtctaatacctaacggaaacaaggtagtgctgactccagtatcagtatggcggatctgatgctggcgacgattgagttgacgatgcggtcccgacaaaaaggaaccgaattgagaaaaaaaggtttgtgacaacggtgatgaggggcagtggaattggggtagacttgggggccacaatggagagctggtagacacaagtagcctcgtgaggtgcaatggacgagatgggactgatggggcccggcaggttgtggtgtttgtaaagtggagaaaggagacccgttttctcgagcgcggtgaggtgtgcgggcttcttatttcaatcactcgcaggcaggggtcaggactctcttccgtctgatggtgttcaggcgggtagaattttttcctttttcactggtgccgcggtgcttttctcttgacacttcggtcagtctgtgggtcctagtggtcagaaaaacgacgtcgacaatagactacgagagcgcggtgtggaaaagtggacaccgatgcaacgaaagggacggctggcagacaatgggacaacaaatggtggaaatagtggatgatggcatcgacctagcgacgggcggcgggcagagagctgctgacgatgacagactaggaggatgacgatagcgtgtcgagaggttgatgcatgcaaactgcaagtcaagctcggcgagtgggtgtggtgattgtggatagtgtgggtggatctcctaggccagtagtgcaaatggaagaagaggaaagagaaagaaagagtgggtgggtggagacacga

SEQ ID NO: 7977 - DNA, 219 bp, Muscodor strobelii
  misc_feature: SGI cDNA ID NO. 562435
  misc_feature: Reduced expression when VOC is produced
  misc_feature: Encodes the peptide sequence at SEQ ID NO 7978
atgtcgcttctccggtcgttccgaaatctatcgtcccggacgcgcatcggtgtcggaatcgggttattagcatggggtgtcattggattgcaactatcggacagagctgaggagaagtatttcaaggccacggacgaagaccgcgccgcgctacaagaaatgacgccgcgcattacggccgtcgatcggcttgaccagtctcgcccacaaagctcgtga

SEQ ID NO: 7978 - protein, 72 aa, Muscodor strobelii
  misc_feature: SGI Peptide ID NO. 562435
  misc_feature (1)..(72): NCBI GI: 171688536 Blast Desc: protein product [Podospora anserina] gi|170944230|emb|CAP70340.1| protein product [Podospora anserina]
  misc_feature (3)..(58): NCBI GI: 85105901 Blast Desc: NCU05286 [Neurospora crassa OR74A] gi|28923651|gb|EAA32821.1| [Neurospora crassa OR74A]
  misc_feature (3)..(61): NCBI GI: 46123583 Blast Desc: FG06169.1 [Gibberella zeae PH-1]
  misc_feature (1)..(63): NCBI GI: 145612457 Blast Desc: MGG_12354 [Magnaporthe grisea 70-15] gi|145019612|gb|EDK03840.1| MGG_12354 [Magnaporthe grisea 70-15]
  misc_feature (1)..(63): NCBI GI: 154294600 Blast Desc: [Botryotinia fuckeliana B05.10] gi|154294606|ref|XP_001547743.1| [Botryotinia fuckeliana B05.10] gi|150844649|gb|EDN19842.1| [Botryotinia fuckeliana B05.10]
  misc_feature (1)..(63): NCBI GI: 189210641 Blast Desc: PTRG_11321 [Pyrenophora tritici-repentis Pt-1C-BFP] gi|187977745|gb|EDU44371.1| PTRG_11321 [Pyrenophora tritici-repentis Pt-1C-BFP]
  misc_feature (1)..(63): NCBI GI: 156045169 Blast Desc: [Sclerotinia sclerotiorum 1980] gi|154694168|gb|EDN93906.1| [Sclerotinia sclerotiorum 1980]
  misc_feature (1)..(63): NCBI GI: 226283307 Blast Desc: conserved [Paracoccidioides brasiliensis Pb01]
  misc_feature: Useful for introducing or modulating the production of volatile compounds
MSLLRSFRNLSSRTRIGVGIGLLAWGVIGLQLSDRAEEKYFKATDEDRAALQEMTPRITAVDRLDQSRPQSS

SEQ ID NO: 7979 - DNA, 6565 bp, Muscodor strobelii; identical to SEQ ID NO: 7976
  misc_feature: SGI EST ID NO. CUFF.20734.0
  misc_feature: Variant of the nucleotide sequence at SEQ ID NO 7977

SEQ ID NO: 7980 - DNA, 2955 bp, Muscodor strobelii
  misc_feature: SGI cDNA ID NO. 562436
  misc_feature: Reduced expression when VOC is produced
  misc_feature: Encodes the peptide sequence at SEQ ID NO 7981
atggacagcgcccatcatccctctcaccagccgtactctaatcagctaggcacatcggggtccacatacccttcaccatcagccatcgctcctcatcagctgcagcaaggctctgttactcagcatacactgcctcctctccagcacagcaatagtatgcaatcgatctacgggagccaccctcatactcctagaacgccagggactcctaacaacggcacgccccagccgccaaacaatatgagcaactatccacctcctaacgcaggccatggtcgtggttcgtatggaatgatgcctaatcaataccagaaccaaccccagggctacccgacgaccacgtccatgatgccacaagcatcggtcgcagcatcgcacccacaaccgattgcaccggccccagctgcagcgcgtcctcccgttctccgccctatgcccgctggtggagtcattcctcagcctagtctcaactcaccctatggcggagcttctatgatgcctcacccatcgccctatcaggatgcggaacagccaacccacgtcgtcgggtctcaaggtcgccgcggcatactccctagcgcaccaggtcggcctgcagcgccgactggtagcggtgcctcaaagaacactgttattccccagaaggatgctgacggaaagttcccttgtccccattgtaccaagacttaccttcatgccaagcatctcaagcgccatctcctgcgccataccggcgaccgcccatacatgtgtgtgttgtgtcgcgatacgttttcgcgaagtgacatcttgaagcgtcacttccagaagtgctcgattcgtcgaggaaaccctactggggcgagtcatctgtctcatccccaggcacacgttaaaaagcaacagcagaatgcccaaaaggcagaaggcgacttgagtcacatgaatggcatgaccaatatgcccggtgacggagttgtccatccattcggtatggtccagatccaagacggtatgggaaacatggccaacgaccagaatcagctctctagatcgagtagtatgagtcggatggacgacaacgccaaccgggaccgcagaaacatgcctggtggatacaacggcgaagtcccatcctcgatgtcctccaacatcaacccccagttagccaactttagtatgccgccgaaccaaaatggtatgcctctgtacggagcttcgggctcgaatcagcagtctggccttgactggtctcagatgttccaacagcctggtgcgctccaatcacatacctacaccactacgttcccgtctcctaattttgatcagaatcagaccgcactcaaaaccgagcctgacctcgctcccgagagattcaatggcataccgggcgccccctcgaccgatggcaccgatcgacccctcttctctaactgggaaccgcagacatcaatgcaggacggatgccagcagctttctgccctcatcataaacttcctctctccttgcaattttgcacctcccgaaaacgccgccataaatcatttcttcatgcccgaaagcattagagcctttcttgagtcgttcatccatttccatattcattttccttttcttcatatccctacttttcacattatgaaagcatacacggggctcactgcagccatgtgttgcgtcggtgcttgttactcagcacttgtggatccattgctcgttcgcgaagtcatgaccttgcttaacattgctttagagcgtgactgtaatctgaattccactgtcgagatccctttcaagatcgagagcggtaaagatagtctcggcctcgagaagttgcaagctttgcaactacttattgtcttgctgacttggaatggcactcccatgcatcgagaaattgcgcgacggcacttcaatgtcgcgtgtttggttgcgcgaaattccgggttgttgtccgtcgtcagtgactcgagtctgcacagctttctgcaccaaccccatcttgaactgcagacaactgggccgcatgcctttgattgggcatcgtgggtcgaacaagaaaagcgaatacggctgatgcacatgatccacttgatggatattgcacacggcctattcttcaacttccatccacttctcgatgcgtttgagattactgtaccccttcctgctgacgatgcggcctgggaggcggtgaccagtgacgaatgtgcccgagctctcaacttgttcggcattgatgccgtgaagaagagcaatccagacgggtctcagcgaagcaagcaacccgaacttgacatggtccttcgcgccatgctacaaggctctgttcaaatacagccaggcagcactaacctgtggggtaaattcatcctcattcatgcgattcttgcccagcttcgacggacacagatcgaaggacattttgcagatctgaacgggtcaatgacaccactccgtcacaacgactgggtcgtgatgggaggttctggtacatccacaggccacagcagtgccaacaacagtggccgaggtactccggtacctggatctcagcccatgtcagttcgagattacgccgcctttagtgctgctctagataaatggaaaagctactgggatatggacatggcaattcaatttccaccatctgtttccaacccgcgacgccatggtttctgtcgagacggttcgcacttcttctgcctcgcaaaattattcctccgcaacccgcgtctgaacactgcacagctgggccgcgatgaacggttcgtacaagttctgcagctattgaagcatgtcacaacgtgggtcgagaccgacggcgcatcacgaggcgaggaacttggctctgttggtgagatcggccacgatcatgtggtctccaacctcacaatagacctctcccaattgttcaaaccgcagccatccgttattcagtcttcgacgacatctgtggtcaagactggtatctag

SEQ ID NO: 7981 - protein, 984 aa, Muscodor strobelii
  misc_feature: SGI Peptide ID NO. 562436
  misc_feature (221)..(243): Pfam Id: PF00096 Pfam Desc: Zinc finger, C2H2 type
  misc_feature (1)..(984): NCBI GI: 46123581 Blast Desc: FG06168.1 [Gibberella zeae PH-1]
  misc_feature (1)..(984): NCBI GI: 261355839 Blast Desc: RfeC [Verticillium albo-atrum VaMs.102]
  misc_feature (81)..(974): NCBI GI: 116196440 Blast Desc: CHGG_04818 [Chaetomium globosum CBS 148.51] gi|88180731|gb|EAQ88199.1| CHGG_04818 [Chaetomium globosum CBS 148.51]
  misc_feature (49)..(969): NCBI GI: 171688538 Blast Desc: protein product [Podospora anserina] gi|170944231|emb|CAP70341.1| protein product [Podospora anserina]
  misc_feature (176)..(979): NCBI GI: 156045153 Blast Desc: SS1G_09765 [Sclerotinia sclerotiorum 1980] gi|154694160|gb|EDN93898.1| SS1G_09765 [Sclerotinia sclerotiorum 1980]
  misc_feature (42)..(967): NCBI GI: 261191853 Blast Desc: C2H2 transcription factor [Ajellomyces dermatitidis SLH14081] gi|239589650|gb|EEQ72293.1| C2H2 transcription factor [Ajellomyces dermatitidis SLH14081]
  misc_feature (302)..(967): NCBI GI: 154294626 Blast Desc: BC1G_13783 [Botryotinia fuckeliana B05.10] gi|150844662|gb|EDN19855.1| BC1G_13783 [Botryotinia fuckeliana B05.10]
  misc_feature (18)..(451): NCBI GI: 39971649 Blast Desc: MGG_07140 [Magnaporthe grisea 70-15] gi|145019614|gb|EDK03842.1| MGG_07140 [Magnaporthe grisea 70-15]
  misc_feature (13)..(415): NCBI GI: 85105898 Blast Desc: NCU05285 [Neurospora crassa OR74A] gi|28923650|gb|EAA32820.1| conserved [Neurospora crassa OR74A]
  misc_feature (164)..(967): NCBI GI: 169619122 Blast Desc: SNOG_12754 [Phaeosphaeria nodorum SN15] gi|160703749|gb|EAT80052.2| SNOG_12754 [Phaeosphaeria nodorum SN15]
  misc_feature: Useful for introducing or modulating the production of volatile compounds
MDSAHHPSHQPYSNQLGTSGSTYPSPSAIAPHQLQQGSVTQHTLPPLQHSNSMQSIYGSHPHTPRTPGTPNNGTPQPPNNMSNYPPPNAGHGRGSYGMMPNQYQNQPQGYPTTTSMMPQASVAASHPQPIAPAPAAARPPVLRPMPAGGVIPQPSLNSPYGGASMMPHPSPYQDAEQPTHVVGSQGRRGILPSAPGRPAAPTGSGASKNTVIPQKDADGKFPCPHCTKTYLHAKHLKRHLLRHTGDRPYMCVLCRDTFSRSDILKRHFQKCSIRRGNPTGASHLSHPQAHVKKQQQNAQKAEGDLSHMNGMTNMPGDGVVHPFGMVQIQDGMGNMANDQNQLSRSSSMSRMDDNANRDRRNMPGGYNGEVPSSMSSNINPQLANFSMPPNQNGMPLYGASGSNQQSGLDWSQMFQQPGALQSHTYTTTFPSPNFDQNQTALKTEPDLAPERFNGIPGAPSTDGTDRPLFSNWEPQTSMQDGCQQLSALIINFLSPCNFAPPENAAINHFFMPESIRAFLESFIHFHIHFPFLHIPTFHIMKAYTGLTAAMCCVGACYSALVDPLLVREVMTLLNIALERDCNLNSTVEIPFKIESGKDSLGLEKLQALQLLIVLLTWNGTPMHREIARRHFNVACLVARNSGLLSVVSDSSLHSFLHQPHLELQTTGPHAFDWASWVEQEKRIRLMHMIHLMDIAHGLFFNFHPLLDAFEITVPLPADDAAWEAVTSDECARALNLFGIDAVKKSNPDGSQRSKQPELDMVLRAMLQGSVQIQPGSTNLWGKFILIHAILAQLRRTQIEGHFADLNGSMTPLRHNDWVVMGGSGTSTGHSSANNSGRGTPVPGSQPMSVRDYAAFSAALDKWKSYWDMDMAIQFPPSVSNPRRHGFCRDGSHFFCLAKLFLRNPRLNTAQLGRDERFVQVLQLLKHVTTWVETDGASRGEELGSVGEIGHDHVVSNLTIDLSQLFKPQPSVIQSSTTSVVKTGI

SEQ ID NO: 7982 - DNA, 6682 bp, Muscodor strobelii
  misc_feature: SGI EST ID NO. CUFF.20735.1
  misc_feature: Variant of the nucleotide sequence at SEQ ID NO 7980
tcgtgtctccacccacccactctttctttctctttcctcttcttccatttgcactactggcctaggagatccacccacactatccacaatcaccacacccactcgccgagcttgacttgcagtttgcatgcatcaacctctcgacacgctatcgtcatcctcctagtctgtcatcgtcagcagctctctgcccgccgcccgtcgctaggtcgatgccatcatccactatttccaccatttgttgtcccattgtctgccagccgtccctttcgttgcatcggtgtccacttttccacaccgcgctctcgtagtctattgtcgacgtcgtttttctgaccactaggacccacagactgaccgaagtgtcaagagaaaagcaccgcggcaccagtgaaaaaggaaaaaattctacccgcctgaacaccatcagacggaagagagtcctgacccctgcctgcgagtgattgaaataagaagcccgcacacctcaccgcgctcgagaaaacgggtctcctttctccactttacaaacaccacaacctgccgggccccatcagtcccatctcgtccattgcacctcacgaggctacttgtgtctaccagctctccattgtggcccccaagtctaccccaattccactgcccctcatcaccgttgtcacaaacctttttttctcaattcggttcctttttgtcgggaccgcatcgtcaactcaatcgtcgccagcatcagatccgccatactgatactggagtcagcactaccttgtttccgttaggtattagacgtggaggataaggtctttcgggtgacgagtctgccattgtcgatattttctcagcggcaggaaataccatcccgcgtaggcgtagccctaatcgcgacacccactaccaagcacactgatctttctcgacatcgagaggacgtaggcttgagaccttgggatcgcgtctcggtattgactgcaataccgtaactttccttattttcaaggacatggacagcgcccatcatccctctcaccagccgtactctaatcagctaggcacatcggggtccacatacccttcaccatcagccatcgctcctcatcagctgcagcaaggctctgttactcagcatacactgcctcctctccagcacagcaatagtatgcaatcgatctacgggagccaccctcatactcctagaacgccagggactcctaacaacggcacgccccagccgccaaacaatatgagcaactatccacctcctaacgcaggccatggtcgtggttcgtatggaatgatgcctaatcaataccagaaccaaccccagggctacccgacgaccacgtccatgatgccacaagcatcggtcgcagcatcgcacccacaaccgattgcaccggccccagctgcagcgcgtcctcccgttctccgccctatgcccgctggtggagtcattcctcagcctagtctcaactcaccctatggcggagcttctatgatgcctcacccatcgccctatcaggatgcggaacagccaacccacgtcgtcgggtctcaaggtcgccgcggcatactccctagcgcaccaggtcggcctgcagcgccgactggtagcggtgcctcaaagaacactgttattccccagaaggatgctgacggaaagttcccttgtccccattgtaccaagacttaccttcatgccaagcatctcaagcgccatctcctgcgccataccggcgaccgcccatacatgtgtgtgttgtgtcgcgatacgttttcgcgaagtgacatcttgaagcgtcacttccagaagtgctcgattcgtcgaggaaaccctactggggcgagtcatctgtctcatccccaggcacacgttaaaaagcaacagcagaatgcccaaaaggcagaaggcgacttgagtcacatgaatggcatgaccaatatgcccggtgacggagttgtccatccattcggtatggtccagatccaagacggtatgggaaacatggccaacgaccagaatcagctctctagatcgagtagtatgagtcggatggacgacaacgccaaccgggaccgcagaaacatgcctggtggatacaacggcgaagtcccatcctcgatgtcctccaacatcaacccccagttagccaactttagtatgccgccgaaccaaaatggtatgcctctgtacggagcttcgggctcgaatcagcagtctggccttgactggtctcagatgttccaacagcctgaccgcactcaaaaccgagcctgacctcgctcccgagagattcaatggcataccgggcgccccctcgaccgatggcaccgatcgacccctcttctctaactgggaaccgcagacatcaatgcaggacggatgccagcagctttctgccctcatcataaacttcctctctccttgcaattttgcacctcccgaaaacgccgccataaatcatttcttcatgcccgaaagcattagagcctttcttgagtcgttcatccatttccatattcattttccttttcttcatatccctacttttcacattatgaaagcatacacggggctcactgcagccatgtgttgcgtcggtgcttgttactcagcacttgtggatccattgctcgttcgcgaagtcatgaccttgcttaacattgctttagagcgtgactgtaatctgaattccactgtcgagatccctttcaagatcgagagcggtaaagatagtctcggcctcgagaagttgcaagctttgcaactacttattgtcttgctgacttggaatggcactcccatgcatcgagaaattgcgcgacggcacttcaatgtcgcgtgtttggttgcgcgaaattccgggttgttgtccgtcgtcagtgactcgagtctgcacagctttctgcaccaaccccatcttgaactgcagacaactgggccgcatgcctttgattgggcatcgtgggtcgaacaagaaaagcgaatacggctgatgcacatgatccacttgatggatattgcacacggcctattcttcaacttccatccacttctcgatgcgtttgagattactgtaccccttcctgctgacgatgcggcctgggaggcggtgaccagtgacgaatgtgcccgagctctcaacttgttcggcattgatgccgtgaagaagagcaatccagacgggtctcagcgaagcaagcaacccgaacttgacatggtccttcgcgccatgctacaaggctctgttcaaatacagccaggcagcactaacctgtggggtaaattcatcctcattcatgcgattcttgcccagcttcgacggacacagatcgaaggacattttgcagatctgaacgggtcaatgacaccactccgtcacaacgactgggtcgtgatgggaggttctggtacatccacaggccacagcagtgccaacaacagtggccgaggtactccggtacctggatctcagcccatgtcagttcgagattacgccgcctttagtgctgctctagataaatggaaaagctactgggatatggacatggcaattcaatttccaccatctgtttccaacccgcgacgccatggtttctgtcgagacggttcgcacttcttctgcctcgcaaaattattcctccgcaacccgcgtctgaacactgcacagctgggccgcgatgaacggttcgtacaagttctgcagctattgaagcatgtcacaacgtgggtcgagaccgacggcgcatcacgaggcgaggaacttggctctgttggtgagatcggccacgatcatgtggtctccaacctcacaatagacctctcccaattgttcaaaccgcagccatccgttattcagtcttcgacgacatctgtggtcaagactggtatctagatctgacaacagtggactggtacagcacccaatgagcattcacggcgtttttgatttcagcatgtctctctgagaaaaagttttcactcaagcagcattgaacaagcatcgggggcggtctgtttgtttgcattttccggttcggttctcttcgtttcattagactggctatggcttcctcgcattagactcgatgactagattatgaggtggttcttctgtccttttcttgtgggtgttatgtttcacgctcgcatcctaggcagacatgcacgaggagtcgggcctctccgtctctgagtgcctattgcatggtgcaaagatatacgttcaatggaaaggaggactcgagtatgttcggtgtggactgatgatgggcgacacactagtaccagtcactgtcagatgcattagatgttttaacgaatgaattataaaaacttgtttgtctgctgtacatatgctggccatacacggttgcgtgtgtcgtttcgtaattcgacggtgaattcacatggaagatttgcccgcgtggtcagcaatgcctgatgtacctacttcacatgggcaatgcatatgtctggtcgctcgacacataattagtcgacagttcgctccattgactagctagtatctagttttacacggtccatagtaaacatggctattattcatcacattgatattacagtagtgacagtagggtgagacgtatttcacaaaaaaagggtgaagaccttgacatgatcacgagctttgtgggcgagactggtcaagccgatcgacggccgtaatgcgcggcgtcatttcttgtagcgcggcgcggtcttcgtccgtggccttgaaatacttctcctcagctctgtccgatagttgcaatccaatgacaccccatgctaataacccgattccgacaccgatgcgcgtccgggacgatagatttcggaacgacctgtttcgagttagtatcgagcattcatggtacgatatgggtaatgttggtgagctgattagattaagcgagattgtatagaagcacggcgagaactgaagttcattggcaaacgatctagtcatatgagatcaaaaagaagcacgtgtcgactgcttggcttaccggagaagcgacataggtaatgtggggtggtatcgggtgtgagctgacctcagacgaccgatatgatgagtaatatttgcgaggcaccggacgtaaaagcaaagccggcgcctttctcctgcttgacgcgagatgagagttcgtggttgcgtcaaacgccggaggcaagagcaaaacaaattagcaaggcgaggcaaacttggcaatgtctgctctgtacaagccgagtaaacgagcgtgtggaatggcgtgacacgatagagaagaatttttgctgatcagaacgcgactggtgaggttgatcttgctacgcccctgcttggctcagtggatggcgggtttgcgatgtgtcagggactggaatttatgaccctttcgtggaaggaattagcggtgaagagtaccgagcggcgggccgtgtgtagctcgagacggttatttgtatcggtacttcgtcctctcggcctctgctctgggtttattattttcgctcttgttgcctcttattcatggtttcacagcagaatcgtatcggacggatgggtggcggctcgataagtggacgttgctgaactgacaaagatacgccacgcgtgcgccacagcaaaacgaccgccccaaagtggttctgatacggtggaacggaattgatacatctcaaacgaaacgaacttgatttcttttgctaaatatcacatgattttattacaggatgtatcatattgattgtttcaccattttattcccgcgacagaaagagtctgcacactgctcaacttattcagttgcgccgtacttggcacggtattcttcaatgtccttaatgacttttgggtcagaaatgacatttgcaccagcggcaatgatgtcgttgagttttataatggctagaatggggaactgatattctttgtgtagctgaccgatagcacttgtcttgccgtcaccgtccggtagggtttcctggcggtcgagggcgacgatgatgccgacaaccgtgccaccctgggcgcggatcatgtcgatggcctggcgctttgcggtaccagcagagacgacatcatcaataatcagcacgcgctttcccttaagcggggagccgacgatggtgccgccctcgccgtggtccttggcctccttgcggtcatagctgtaagcggcgctgcggtacttggcaaaatcaatgcggccgagggcatagagcacggtagcagccagcgggatgcccttataagcggggccgaagatgacgtcgaactcgggggcttcggcgtggatgctctgggcgtaggcatcggcaataggcatgtgcagctcaagcgtgaagaaatcgcccgagttgaagaagtatggcgagattcgttttgatttcaactcgtaggagccgaagcgcagggcaccaccatcaatggcggcgcgcaggaagtcttgcttgtactgcggaagagacatggtcacatgcaaggatttgtctcgagtttatggccagcctagagatgatgtttgtgtgagtattcaagtttttatgtaaacttctatatgagacataagagacctgagatgagtatcatcctggcgcaaccacaatactcattggttgcagaagcctcaccaactgcctgcaaggggacagaagtgatacaagacatgagaggggagattaatacagaga

SEQ ID NO: 7983 - DNA, 828 bp, Muscodor strobelii
  misc_feature: SGI cDNA ID NO. 562437
  misc_feature: Reduced expression when VOC is produced
  misc_feature: Encodes the peptide sequence at SEQ ID NO 7984
atggcagcatctgcttctctccggccgtccataagccgggccatcaaatccacgacaagcttctcggtctctagcgccgtagcctgtggaactggctcgcaagtatgtgccttctcatcaacgcccaaaaatgacaatcgacggccccggcgcgataacaaccgccttcgtggcctgtcaaccatctaccgctctggcacgcgattccggatgaacatcgacaagtcgcagatccccaagcccgtcgccgactacaaacccgaggtcacggttgaccctaaccacggactctgggattttttctacgccaaggacaaaaccatgttgacgccaacggaagaattgcagtatggccgcgcatggactgtcgaggagctacggcacaagagctgggaagatctacacaagctatggtgggtatgtgtgaaggaacagaatcgaatcgccacggcgcggaaggagaaatctcggctcaaggccacagaaggaattcaagagggcgaagcacgtttacgagaggttcgcaagacgatgaaggcaatcaagcatgctctgacggagcgatggtatgtgtgggaggacgcaaggacccttgccgagacggacccagaggttgacctgggtaacgtacaaagtccctacataccaagtagtcagcaccttgagcaccccgaatctgggctcgctgtcgaaaacgagagcgaggtcaatccggagaccccacagctgtccagcgatagcaaacgaccatctggtgaggtcccgctatcccatgtagagggccaaccaactccaaccgaaggccagcaaccggctgcacggccgtga

SEQ ID NO: 7984 - protein, 275 aa, Muscodor strobelii
  misc_feature: SGI Peptide ID NO. 562437
  misc_feature (97)..(188): Pfam Id: PF06984 Pfam Desc: Mitochondrial 39-S ribosomal protein L47 (MRP-L47)
  misc_feature (1)..(218): NCBI GI: 164429249 Blast Desc: NCU05287 [Neurospora crassa OR74A] gi|229891769|sp|Q7S910.2|RM04_NEUCR RecName: Full=54S ribosomal protein L4, mitochondrial; Flags: Precursor conserved [Neurospora
  misc_feature (1)..(254): NCBI GI: 39971645 Blast Desc: MGG_07138 [Magnaporthe grisea 70-15] gi|229891538|sp|A4RHR8.1|RM04_MAGGR RecName: Full=54S ribosomal protein L4, mitochondrial; Flags: Precursor MGG_07138 grisea
  misc_feature (3)..(218): NCBI GI: 116196436 Blast Desc: CHGG_04816 [Chaetomium globosum CBS 148.51] gi|121782987|sp|Q2H080.1|RM04_CHAGB RecName: Full=54S ribosomal protein L4, mitochondrial; Flags: Precursor CHGG_04816 globosum
  misc_feature (1)..(271): NCBI GI: 261355840 Blast Desc: 50S ribosomal protein L4 [Verticillium albo-atrum VaMs.102]
  misc_feature (7)..(216): NCBI GI: 171688534 Blast Desc: protein product [Podospora anserina] gi|170944229|emb|CAP70339.1| protein product [Podospora anserina]
  misc_feature (51)..(245): NCBI GI: 154294616 Blast Desc: BC1G_13778 [Botryotinia fuckeliana B05.10] gi|229891536|sp|A6SLT9.1|RM04_BOTFB RecName: Full=54S ribosomal protein L4, mitochondrial; Flags: Precursor BC1G_13778 fuckeliana
  misc_feature (6)..(198): NCBI GI: 145231959 Blast Desc: An02g03110 [Aspergillus niger] gi|229891535|sp|A2QCC7.1|RM04_ASPNC RecName: Full=54S ribosomal protein L4, mitochondrial; Flags: Precursor protein product
  misc_feature (34)..(201): NCBI GI: 226279730 Blast Desc: 50S ribosomal protein L4 [Paracoccidioides brasiliensis Pb01]
  misc_feature (34)..(201): NCBI GI: 240279087 Blast Desc: 50S ribosomal protein L4 [Ajellomyces capsulatus H143]
  misc_feature (34)..(201): NCBI GI: 226289608 Blast Desc: 50S ribosomal protein L4 [Paracoccidioides brasiliensis Pb18]
  misc_feature: Useful for introducing or modulating the production of volatile compounds
MAASASLRPSISRAIKSTTSFSVSSAVACGTGSQVCAFSSTPKNDNRRPRRDNNRLRGLSTIYRSGTRFRMNIDKSQIPKPVADYKPEVTVDPNHGLWDFFYAKDKTMLTPTEELQYGRAWTVEELRHKSWEDLHKLWWVCVKEQNRIATARKEKSRLKATEGIQEGEARLREVRKTMKAIKHALTERWYVWEDARTLAETDPEVDLGNVQSPYIPSSQHLEHPESGLAVENESEVNPETPQLSSDSKRPSGEVPLSHVEGQPTPTEGQQPAARP

SEQ ID NO: 7985 - DNA, 1345 bp, Muscodor strobelii
  misc_feature: SGI EST ID NO. CUFF.19834.0
  misc_feature: Variant of the nucleotide sequence at SEQ ID NO 7983
aaaatgaagaatactgacgttgcggcgcgggaacgtgctcgcgcacccagctcaatagtggaccataagaatccctgcagcaattctacttcgtgatttgacctgaaaattcgggacttgtattcgaggttaacagcattggcctcgtgaccatcggcaagagtagtcgagcatttcgcgtcgagcccctcggacgccgacgaaacggctagatcgcgaaaatggcagcatctgcttctctccggccgtccataagccgggccatcaaatccacgacaagcttctcggtctctagcgccgtagcctgtggaactggctcgcaagtatgtgccttctcatcaacgcccaaaaatgacaatcgacggccccggcgcgataacaaccgccttcgtggcctgtcaaccatctaccgctctggcacgcgattccggatgaacatcgacaagtcgcagatccccaagcccgtcgccgactacaaacccgaggtcacggttgaccctaaccacggactctgggattttttctacgccaaggacaaaaccatgttgacgccaacggaagaattgcagtatggccgcgcatggactgtcgaggagctacggcacaagagctgggaagatctacacaagctatggtgggtatgtgtgaaggaacagaatcgaatcgccacggcgcggaaggagaaatctcggctcaaggccacagaaggaattcaagagggcgaagcacgtttacgagaggttcgcaagacgatgaaggcaatcaagcatgctctgacggagcgatggtatgtgtgggaggacgcaaggacccttgccgagacggacccagaggttgacctgggtaacgtacaaagtccctacataccaagtagtcagcaccttgagcaccccgaatctgggctcgctgtcgaaaacgagagcgaggtcaatccggagaccccacagctgtccagcgatagcaaacgaccatctggtgaggtcccgctatcccatgtagagggccaaccaactccaaccgaaggccagcaaccggctgcacggccgtgacgtcggggcctcggttctttctgatgaaggttgtaggatgaaattgcggtcaacactgaccgttgtacacatgatattgttcacataaagtgtagctagaagaaagctcgcaatttgagagctgtgtaaatatggaatgtatagtactgggtgtcaatgatataatcatcgtatcactctgcctcgagcccaaacaccccttgctatatgagagatccaaggcaaggtcagggtgtttttttcaaccggtagagttccagatttgactctctttgtgcacgccacgcctagtcgtg

SEQ ID NO: 7986 - DNA, 1401 bp, Muscodor strobelii
  misc_feature: SGI cDNA ID NO. 562438
  misc_feature: Encodes the peptide sequence at SEQ ID NO 7987
atggaggagatcgccaaagagtacgatgtcattgtgctgggcaccggcttgaccgagtgcattctttccggcgtcctcagtgtaaaaggcaagaaagtgctgcacatcgatcgcaatgatcactatggaggagaggctgcctccgtaaatctcgagacgctattcaagaagtatggcaactacgcagagggcgacgagccgtggaagaagtacggccgtgcgaacgactggaatattgacttggtgcccaagctgctgatgtcttcgggcgagctgaccaacatccttgtgtccaccgatgtcacccgctacctcgagttcaagcaagtggccggtagctatgttcagcagggcgcaggaaccaaggccaccgtcgcaaaggtgccgtccgatgcgggcgaggctctcaagtcccctctgatgggcatcttcgagaagcgtcgcatgaagagcttcattgaatgggtcggcactttcgaccccaaagatcctggaacccacaagggccttgacatgagcaaggtgaccatgaaggaggtgtacgacaaattcggcctcgagacgggtacccgcgatttcattggccatgctatggcgctgtacctcgacgacagctatatttccacggcaggcaaggcacctgaggccattgagcgcataagactgtacggcaactcggtggcgagatatggcaagtcgccgtacatttaccccttgtacggactgggcgagctgcctcagggctttgctcgcctttcggccatctacggcggcacatacatgctcaacacatcggtggacgagattatctatgacggaggcaaggctgccggtatcaaggccaccatgggcgcccccgacagcgccgaccagatgaaattcgaaacaaaagcaggcatgatcctaggtgatccgtcttacttctcgagcaaggtcaaggtggttggacacgtgctcaaggccatttgtgtattgaagcatcctctggccggaacgaacgacagcgattcctgccagctcatcattccccagtcgcaagttggtcgcaagaacgatatctacatcgcttgcgtatcctcggcgcacaacgtttgccccaagggctactatatcgccattgtctccacgattgccgagtctacatccaaccatcaccttgagttgcagcctggtctagaccggctcggtaagatcgaggagcagtttatgggaccacccatcccgctgtacgagcctgttgatagcggcaaggcagacaacatcttcatctccaagagctacgaccccacgtctcactttgagacaaccacggacgacgtgaaggacatatatctgcgcgctactggggaagagttgaaagtcgaaggcttgagggaaggactccaggtggctgacgagtga

SEQ ID NO: 7987 - protein, 466 aa, Muscodor strobelii
  misc_feature: SGI Peptide ID NO. 562438
  misc_feature (1)..(461): Pfam Id: PF00996 Pfam Desc: GDP dissociation inhibitor
  misc_feature (1)..(466): NCBI GI: 240104800 Blast Desc: Secretory pathway GDP dissociation inhibitor, [Coccidioides posadasii C735 delta SOWgp]
  misc_feature (1)..(466): NCBI GI: 261191991 Blast Desc: rab GDP-dissociation inhibitor [Ajellomyces dermatitidis SLH14081] gi|239589719|gb|EEQ72362.1| rab GDP-dissociation inhibitor [Ajellomyces dermatitidis SLH14081]
  misc_feature (1)..(466): NCBI GI: 225682236 Blast Desc: rab GDP-dissociation inhibitor [Paracoccidioides brasiliensis Pb03] gi|226289609|gb|EEH45093.1| rab GDP-dissociation inhibitor [Paracoccidioides brasiliensis Pb18]
  misc_feature (1)..(466): NCBI GI: 226279731 Blast Desc: rab GDP-dissociation inhibitor [Paracoccidioides brasiliensis Pb01]
  misc_feature (1)..(466): NCBI GI: 225555767 Blast Desc: secretory pathway gdp dissociation inhibitor [Ajellomyces capsulatus G186AR]
  misc_feature (1)..(466): NCBI GI: 154273338 Blast Desc: rab GDP-dissociation inhibitor [Ajellomyces capsulatus NAm1] gi|150416033|gb|EDN11377.1| rab GDP-dissociation inhibitor [Ajellomyces capsulatus NAm1]
  misc_feature (1)..(460): NCBI GI: 238839659 Blast Desc: rab GDP-dissociation inhibitor [Microsporum canis CBS 113480]
  misc_feature (1)..(466): NCBI GI: 46123577 Blast Desc: FG06166.1 [Gibberella zeae PH-1]
  misc_feature (1)..(466): NCBI GI: 256726882 Blast Desc: [Nectria haematococca mpVI 77-13-4]
  misc_feature (2)..(466): NCBI GI: 85105909 Blast Desc: rab GDP-dissociation inhibitor [Neurospora crassa OR74A] gi|28923653|gb|EAA32823.1| rab GDP-dissociation inhibitor [Neurospora crassa OR74A]
MEEIAKEYDVIVLGTGLTECILSGVLSVKGKKVLHIDRNDHYGGEAASVNLETLFKKYGNYAEGDEPWKKYGRANDWNIDLVPKLLMSSGELTNILVSTDVTRYLEFKQVAGSYVQQGAGTKATVAKVPSDAGEALKSPLMGIFEKRRMKSFIEWVGTFDPKDPGTHKGLDMSKVTMKEVYDKFGLETGTRDFIGHAMALYLDDSYISTAGKAPEAIERIRLYGNSVARYGKSPYIYPLYGLGELPQGFARLSAIYGGTYMLNTSVDEIIYDGGKAAGIKATMGAPDSADQMKFETKAGMILGDPSYFSSKVKVVGHVLKAICVLKHPLAGTNDSDSCQLIIPQSQVGRKNDIYIACVSSAHNVCPKGYYIAIVSTIAESTSNHHLELQPGLDRLGKIEEQFMGPPIPLYEPVDSGKADNIFISKSYDPTSHFETTTDDVKDIYLRATGEELKVEGLREGLQVADE

SEQ ID NO: 7988 - DNA, 2189 bp, Muscodor strobelii
  misc_feature: SGI EST ID NO. CUFF.20077.0
  misc_feature: Variant of the nucleotide sequence at SEQ ID NO 7986
aaggcttgtaaatattgcgagactcatactaaggggcagagtggagtgacttggaggtggaggcgtggaggagaggaccgtccacgcatagaactcaaggaattggcatttcatttcattggccacagctatcctattcccaagcttagctgtgtctcggacgggctgtcaatgatgcctgtcgtgggatagattgtagccccgagtacctgtcaagccgtgggatatcccagacagatgaaggtaggctgtacctgaggcgcgcccgcgaaagtgggattagtgcaagagctgcagcccaccagcgttgctaccacatcccctcgcctccaccattgattcaaacaacaactccagtctccagactctagactcctcctcactcaccgatacttttcgacccgacgagacgacagctttgcatcttgacctggcgtcgagcagagcaaaactagcatccttcgacacattctataacctacacagcacagaacgatcctcatacattgccggccatggaggagatcgccaaagagtacgatgtcattgtgctgggcaccggcttgaccgagtgcattctttccggcgtcctcagtgtaaaaggcaagaaagtgctgcacatcgatcgcaatgatcactatggaggagaggctgcctccgtaaatctcgagacgctattcaagaagtatggcaactacgcagagggcgacgagccgtggaagaagtacggccgtgcgaacgactggaatattgacttggtgcccaagctgctgatgtcttcgggcgagctgaccaacatccttgtgtccaccgatgtcacccgctacctcgagttcaagcaagtggccggtagctatgttcagcagggcgcaggaaccaaggccaccgtcgcaaaggtgccgtccgatgcgggcgaggctctcaagtcccctctgatgggcatcttcgagaagcgtcgcatgaagagcttcattgaatgggtcggcactttcgaccccaaagatcctggaacccacaagggccttgacatgagcaaggtgaccatgaaggaggtgtacgacaaattcggcctcgagacgggtacccgcgatttcattggccatgctatggcgctgtacctcgacgacagctatatttccacggcaggcaaggcacctgaggccattgagcgcataagactgtacggcaactcggtggcgagatatggcaagtcgccgtacatttaccccttgtacggactgggcgagctgcctcagggctttgctcgcctttcggccatctacggcggcacatacatgctcaacacatcggtggacgagattatctatgacggaggcaaggctgccggtatcaaggccaccatgggcgcccccgacagcgccgaccagatgaaattcgaaacaaaagcaggcatgatcctaggtgatccgtcttacttctcgagcaaggtcaaggtggttggacacgtgctcaaggccatttgtgtattgaagcatcctctggccggaacgaacgacagcgattcctgccagctcatcattccccagtcgcaagttggtcgcaagaacgatatctacatcgcttgcgtatcctcggcgcacaacgtttgccccaagggctactatatcgccattgtctccacgattgccgagtctacatccaaccatcaccttgagttgcagcctggtctagaccggctcggtaagatcgaggagcagtttatgggaccacccatcccgctgtacgagcctgttgatagcggcaaggcagacaacatcttcatctccaagagctacgaccccacgtctcactttgagacaaccacggacgacgtgaaggacatatatctgcgcgctactggggaagagttgaaagtcgaaggcttgagggaaggactccaggtggctgacgagtgaagtagagagcaacaacactagcctcaagttaccatgacgcgacgtcgtgcagcatcagacaagtgaaataggcatgttagtcgaggcaaatgttgggaaaaaggcaaactttatagctgacggaacgagcataataagtcttagccttagggcgatacgatcaacatcacaggctagtacatcatgctgcttcaacgagtttcaactttaaccatccctgctgttgtgtttatggtatgggcgatgcaaagaagacttatgagaagatattat

SEQ ID NO: 7989 - DNA, 1095 bp, Muscodor strobelii
  misc_feature: SGI cDNA ID NO. 562439
  misc_feature: Encodes the peptide sequence at SEQ ID NO 7990
atggcgaccgacgaggacgcggcgtcgacgacgacgtatccgcaccagctgcctctacgcagcaatccagagatcgatgccttcaacatcgtcgaggcataccacagactcctagacgacgatcctgatctgaccatgcccgtcgccgccatcgaggcccttatcgaggccctgggtgcttcgtcggccaagaccgtcttcgagactatgaatctcgtcgagacgcagtccacacgcctgcgccagagccccaccgtctccaaccccatggccgtccgccacggcaccgacctgttcacccagaccctcatgaaagcgcttaagcagggcccatctggtgctgccgggaacaccggtgccgagagtagcgattccgagttcgaggtcatccgcaagcacctcgtcagcaacggccggctcttcgccgagagggccaaggacgcaagagagaagattgccctgcaaggacgccatctgttgacggagcactgcactgtgctgacacacggtggctcccgagccgtgggcgtcttcttgggacgcgctgctgaggctgtcgcaaaccgccaggcaccgcccttcaaagtggtctatgccatgagcgagaacagccgcgagaagagcaatagggtcgtggctgagctgcgcgccaagaacatccgcgtcgccaccatctccgagggcgctgtggcacacatcatggagaaggtcagctttgtgctggtcggtgcccaagccgtgactgcacagggcggcatcctgagcatactcggcacttaccagatcgcgaagctggccaaggactttggcaaaagtggcaagcccttctatgttgcagccgagcagcataagatcggacggacacgtcccacatgtcagaccaagcttagcggtactgccgacttcaaacagaacattcttgattttcacaaaaacgtcgacgacactgcgcccaatggcatttcaagttctcatgctgccgctaaccctctcgattttacgcctcccgacttgattacgagcttcatctgtgatcacggcgtcaagaccaccacggctattgcccacgaggtcatcgagacatacttcaactaa

SEQ ID NO: 7990 - protein, 364 aa, Muscodor strobelii
  misc_feature: SGI Peptide ID NO. 562439
  misc_feature (39)..(351): Pfam Id: PF01008 Pfam Desc: Initiation factor 2 subunit family
  misc_feature (229)..(285): Pfam Id: PF01008 Pfam Desc: Initiation factor 2 subunit family
  misc_feature (122)..(175): Pfam Id: PF01008 Pfam Desc: Initiation factor 2 subunit family
  misc_feature (28)..(363): NCBI GI: 156049275 Blast Desc: SS1G_08344 [Sclerotinia sclerotiorum 1980] gi|154692743|gb|EDN92481.1| SS1G_08344 [Sclerotinia sclerotiorum 1980]
  misc_feature (28)..(363): NCBI GI: 169621600 Blast Desc: SNOG_14011 [Phaeosphaeria nodorum SN15] gi|160704292|gb|EAT78636.2| SNOG_14011 [Phaeosphaeria nodorum SN15]
  misc_feature (31)..(339): NCBI GI: 154317425 Blast Desc: BC1G_03064 [Botryotinia fuckeliana B05.10] gi|150844238|gb|EDN19431.1| BC1G_03064 [Botryotinia fuckeliana B05.10]
  misc_feature (28)..(363): NCBI GI: 189206365 Blast Desc: translation initiation factor eIF-2B subunit alpha [Pyrenophora tritici-repentis Pt-1C-BFP] gi|187975610|gb|EDU42236.1| translation initiation factor eIF-2B
  misc_feature (28)..(363): NCBI GI: 121713640 Blast Desc: translation initiation factor eIF-2B alpha subunit, [Aspergillus clavatus NRRL 1] gi|119402584|gb|EAW13005.1| translation initiation factor eIF-2B alpha subunit, [Aspergillus
  misc_feature (28)..(362): NCBI GI: 46122541 Blast Desc: FG05648.1 [Gibberella zeae PH-1]
  misc_feature (18)..(363): NCBI GI: 146324165 Blast Desc: translation initiation factor eIF-2B alpha subunit [Aspergillus fumigatus Af293] gi|129558036|gb|EAL91477.2| translation initiation factor eIF-2B alpha subunit, [Aspergillus
  misc_feature (28)..(363): NCBI GI: 115401522 Blast Desc: ATEG_07728 [Aspergillus terreus NIH2624] gi|114190290|gb|EAU31990.1| ATEG_07728 [Aspergillus terreus NIH2624]
  misc_feature (28)..(363): NCBI GI: 119479063 Blast Desc: translation initiation factor eIF-2B alpha subunit, [Neosartorya fischeri NRRL 181] gi|119407714|gb|EAW17663.1| translation initiation factor eIF-2B alpha subunit, [Neosartorya
  misc_feature (28)..(363): NCBI GI: 169775301 Blast Desc: [Aspergillus oryzae RIB40] gi|83769981|dbj|BAE60116.1| protein product [Aspergillus oryzae]
  misc_feature (131)..(348): SWISSPROT Homolog: EC 5.3.1.23 S-methyl-5-thioribose-1-phosphate isomerase
MATDEDAASTTTYPHQLPLRSNPEIDAFNIVEAYHRLLDDDPDLTMPVAAIEALIEALGASSAKTVFETMNLVETQSTRLRQSPTVSNPMAVRHGTDLFTQTLMKALKQGPSGAAGNTGAESSDSEFEVIRKHLVSNGRLFAERAKDAREKIALQGRHLLTEHCTVLTHGGSRAVGVFLGRAAEAVANRQAPPFKVVYAMSENSREKSNRVVAELRAKNIRVATISEGAVAHIMEKVSFVLVGAQAVTAQGGILSILGTYQIAKLAKDFGKSGKPFYVAAEQHKIGRTRPTCQTKLSGTADFKQNILDFHKNVDDTAPNGISSSHAAANPLDFTPPDLITSFICDHGVKTTTAIAHEVIETYFN

SEQ ID NO: 7991 - DNA, 2922 bp, Muscodor strobelii
  misc_feature: SGI EST ID NO. CUFF.20315.6
  misc_feature: Variant of the nucleotide sequence at SEQ ID NO 7989
ttcagaagccgagctctgccccgcgattgagtcaccatgtgcatgcaagttaattattagaaaggcactgggcccagctgtactacatgtacgctagccctggctccagtacatcttaaattcaggtatgcaaagttcacacaccttataatataccagattctatccgagcagatcaggtagagatacgctggccaagagacccaagtcgctgcatttactcaaccttcagcgcgtgtagcacaagcattccccgcgttgagacgatggcgaccgacgaggacgcggcgtcgacgacgacgtatccgcaccagctgcctctacgcagcaatccagagatcgatgccttcaacatcgtcgaggcataccacagactcctagacgacgatcctgatctgaccatgcccgtcgccgccatcgaggcccttatcgaggccctgggtgcttcgtcggccaagaccgtcttcgagactatgaatctcgtcgagacgcagtccacacgcctgcgccagagccccaccgtctccaaccccatggccgtccgccacggcaccgacctgttcacccagaccctcatgaaagcgcttaagcagggcccatctggtgctgccgggaacaccggtgccgagagtagcgattccgagttcgaggtcatccgcaagcacctcgtcagcaacggccggctcttcgccgagagggccaaggacgcaagagagaagattgccctgcaaggacgccatctgttgacggagcactgcactgtgctgacacacggtggctcccgagccgtgggcgtcttcttgggacgcgctgctgaggctgtcgcaaaccgccaggcaccgcccttcaaagtggtctatgccatgagcgagaacagccgcgagaagagcaatagggtcgtggctgagctgcgcgccaagaacatccgcgtcgccaccatctccgagggcgctgtggcacacatcatggagaaggtcagctttgtgctggtcggtgcccaagccgtgactgcacagggcggcatcctgagcatactcggcacttaccagatcgcgaagctggccaaggactttggcaaaagtggcaagcccttctatgttgcagccgagcagcataagatcggacggacacgtcccacatgtcagaccaagcttagcggtactgccgacttcaaacagaacattcttgattttcacaaaaacgtcgacgacactgcgcccaatggcatttcaagttctcatgctgccgctaaccctctcgattttacgcctcccgacttgattacgagcttcatctgtgatcacggcgtcaagaccaccacggctattgcccacgaggtcatcgagacatacttcaactaagctagtcacgatgactttcaacaatatcgatttaatcaagagctcccctttcagtcgagacatcttgtgcaaagcacatgcgcccaagaaacctccctgattttcaattttcgagaccagcttttgccaaccgcactgcaaccacccagtaaacacgtggtgtcaaacattggtaagctgagcatcgctgcttttggagccatcaagtgcgaagccgaaacaacccgcccgagcttttgctacagtacagtagacataccaaatgatccaacaaccgcgagtattgttaaggaaagacgaacaaagaacagagtggagagcttttggtcgcgcagtctgcatcatattttgttaccatatccaggggcagaatgaggtggacgtaaacaattcgtaggccaatgcaagtaaaataaatagccagtgcaataacgtagtgggattagtcttcctccaatagtcgtcgttagctatctttgaccagccgtgccccaacccaggcgtatgggtaattgcgctggtaccaattgacgctaatttcacgcgaagcgtaagtagatgtaatggacgttttgataagtggaagtagatcatggtggtatgaggacagtcaactcacaaagatctcctccccgcaatacgagggtgtgtggcccaagaaccacctaggacaatgttgtgtttctcatcgaagaagtccgctgttcatgcatggtcagtagctgctgattcgttacggttcaggggctctgaccagtgtaaagggggtagagggccatgggctcaaaaccttcgtgctttcgaagcggcgagctcgtccactcccacacgccacccatttcgccttggccggccagcctatggccgtgcccggtcacggcggttgggtgccaatgacgaaacccgacattggcacccattaagtcaatgaagatgtcgttcttggcgtaaggagaagccgagatatcgtcttcatcgacaagagtcagagtagccggagatggcgggggagtctcctcgacaccgtcattgacaagatgcctgttagtttgagctttagttgttttcattctcatttccatgtgtgagatcggattagtcatatcataacgtacccgttcactgccggtaccgtggctcccagttgattttcggcttgcttcctcctcatgagatcgacgtgcgtatagatgctacgcgcttcctcaaatgtgggaattcgtccacccatccatgcagcacacccagctaactcatcgtaagagccaaacaccggccagtcaagagcatactccaggggcaccaggccatagaccgtacggacagccttgccctgtagataggaggcaggcaaccctgcatgagttccacttccgtttacttcagtcgtatggtcttgggtttcctcaatagtccatgacgctggcagcttctccagattgttgtgaaacaaatactccgcatacttctgtaattagtatgcatgatatgcagagaactatcgatgatctttactcacttcctcgttcgtgatgggtctccccttagctttgaaaccatg

SEQ ID NO: 7992 - DNA, 2592 bp, Muscodor strobelii
  misc_feature: SGI cDNA ID NO. 562440
  misc_feature: Reduced expression when VOC is produced
  misc_feature: Encodes the peptide sequence at SEQ ID NO 7993
atgccttctatcatcccgtctcctatcgagactcagttgtcctcagtagccgcaaagaaggctcctcaactaaaaggaaacgcagcatctgttgacattattgatattcgtcagacaaatgctgagatcaatctcaaggaagagatccatcaacttcttttcccgcagcaagggcccagaaaattacccaccctactgctatatgatgaagcaggcctcaagctttttgaaaagatcacgtatctggaggagtattatcctaccaatgccgaaattcaagttctcgagcgttcagctgcagaaatcgccgagaatatcccctctgggtccttagtggtcgaactgggcagtggtaacctgagaaagatcaacctccttctccaggcgttcgagaataccggaaagaagatcgattattatgccctcgatctatctgaaccggaactctctagaacattgcagctactccccactttcaaacacgttcgatgccacggcctcctaggcacttatgacgatggccgagaatggctcaaatcatcagctgtctcggcaaaacgcaagtgtgtcgtgcatatgggctcaagcatcggaaacttctcccgatctgaggcagcctgcttcctacgaggcttcatggatgtactgcagtcacaagatagcttcttaattggagtggactcgtgcgacaacccttccaaagtatatcacgcatacaatgacgaacagggcgtcacgcatgactttattttgaacgggcttcaacacgccaacagagccttgagacagacggttttcaagccgggagactggaaagtcattggcgaatatgtttatgatgacgacggagggcgccatcgggcatttgtgtcgccactgcgtgataccgtggtcttgggagaaaccatcagggcccacgaacgagtccagatcgaggagagcgtcaagttctcgaaagacgactgcgccagactgtggggcgcggcaggcgcgtcagaagcgagcaagtggatgacagatgatgaaggctatggtctgcatctgctgatcaaagaggacctgttgtccttcagcctaaatccgacagtatatgctcgcgaaagcactcctctagtgagtgactgggagggcctatggggtatctggacgaacgttacgcagcagatgttgcccaccgatgagctgcttgacaaacctatcaaacttcgtaacgcgtgcatcttctatctaggtcatataccggccttcttggacatccagttaacgaaggtgaccaagagcagcccaacctcgcctagctactatcactcgatctttgaaagaggcatagacccggatgtcgacaatcctgagcattgtcacgcacactcagagattcccgacgaatggcctccagtaaatgagatattgaactatcaggatcgagtgaagcagagattgctaggtttatatgctgacggagttgagagtattcgtcgagatgttgcccgagccatatggctcgcattcgagcatgaggtcatgcatacggagacgttactttatatgatgttacaaagcgacaaaactttgccacctactcacagatcaacccccaatttcaaggccttggcagagaatgcaaaacagtcgagagtggaaaaccaatggtttgatatccctaaacaggatattatcattgggctcgatgacccagaagatgacctggaatttgacggtcattttggatgggacaatgagaagccggctcgtcgcgttcaagttcatggtttcaaagctaaggggagacccatcacgaacgaggaatatgcggagtatttgtttcacaacaatctggagaagctgccagcgtcatggactattgaggaaacccaagaccatacgactgaagtaaacggaagtggaactcatgcagggttgcctgcctcctatctacagggcaaggctgtccgtacggtctatggcctggtgcccctggagtatgctcttgactggccggtgtttggctcttacgatgagttagctgggtgtgctgcatggatgggtggacgaattcccacatttgaggaagcgcgtagcatctatacgcacgtcgatctcatgaggaggaagcaagccgaaaatcaactgggagccacggtaccggcagtgaacgggcatcttgtcaatgacggtgtcgaggagactcccccgccatctccggctactctgactcttgtcgatgaagacgatatctcggcttctccttacgccaagaacgacatcttcattgacttaatgggtgccaatgtcgggtttcgtcattggcacccaaccgccgtgaccgggcacggccataggctggccggccaaggcgaaatgggtggcgtgtgggagtggacgagctcgccgcttcgaaagcacgaaggttttgagcccatggccctctaccccctttacactgcggacttcttcgatgagaaacacaacattgtcctaggtggttcttgggccacacaccctcgtattgcggggaggagatctttcgtcaattggtaccagcgcaattacccatacgcctgggttggggcacggctggtcaaagatagctaa

SEQ ID NO: 7993 - protein, 863 aa, Muscodor strobelii
  misc_feature: SGI Peptide ID NO. 562440
  misc_feature (788)..(861): Pfam Id: PF03781 Pfam Desc: Domain of function (DUF323)
  misc_feature (11)..(862): NCBI GI: 46122539 Blast Desc: FG05647.1 [Gibberella zeae PH-1]
  misc_feature (3)..(862): NCBI GI: 164429492 Blast Desc: NCU04343 [Neurospora crassa OR74A] gi|157073498|gb|EAA27088.2| NCU04343 [Neurospora crassa OR74A]
  misc_feature (32)..(862): NCBI GI: 145603400 Blast Desc: MGG_13219 [Magnaporthe grisea 70-15] gi|145011639|gb|EDJ96295.1| MGG_13219 [Magnaporthe grisea 70-15]
  misc_feature (30)..(862): NCBI GI: 189206405 Blast Desc: PTRG_09205 [Pyrenophora tritici-repentis Pt-1C-BFP] gi|187975630|gb|EDU42256.1| PTRG_09205 [Pyrenophora tritici-repentis Pt-1C-BFP]
  misc_feature (29)..(862): NCBI GI: 258573315 Blast Desc: conserved [Uncinocarpus reesii 1704] gi|237901105|gb|EEP75506.1| conserved [Uncinocarpus reesii 1704]
  misc_feature (21)..(862): NCBI GI: 212530460 Blast Desc: N-methyltransferase, [Penicillium marneffei ATCC 18224] gi|210074785|gb|EEA28872.1| N-methyltransferase, [Penicillium marneffei ATCC 18224]
  misc_feature (21)..(862): NCBI GI: 242818647 Blast Desc: N-methyltransferase, [Talaromyces stipitatus ATCC 10500] gi|218713624|gb|EED13048.1| N-methyltransferase, [Talaromyces stipitatus ATCC 10500]
  misc_feature (31)..(862): NCBI GI: 119191798 Blast Desc: CIMG_00276 [Coccidioides immitis RS]
  misc_feature (31)..(862): NCBI GI: 240106343 Blast Desc: CPC735_059060 [Coccidioides posadasii C735 delta SOWgp]
  misc_feature (30)..(862): NCBI GI: 169762818 Blast Desc: [Aspergillus oryzae RIB40] gi|83770337|dbj|BAE60470.1| protein product [Aspergillus oryzae]
  misc_feature: Useful for introducing or modulating the production of volatile compounds
MPSIIPSPIETQLSSVAAKKAPQLKGNAASVDIIDIRQTNAEINLKEEIHQLLFPQQGPRKLPTLLLYDEAGLKLFEKITYLEEYYPTNAEIQVLERSAAEIAENIPSGSLVVELGSGNLRKINLLLQAFENTGKKIDYYALDLSEPELSRTLQLLPTFKHVRCHGLLGTYDDGREWLKSSAVSAKRKCVVHMGSSIGNFSRSEAACFLRGFMDVLQSQDSFLIGVDSCDNPSKVYHAYNDEQGVTHDFILNGLQHANRALRQTVFKPGDWKVIGEYVYDDDGGRHRAFVSPLRDTVVLGETIRAHERVQIEESVKFSKDDCARLWGAAGASEASKWMTDDEGYGLHLLIKEDLLSFSLNPTVYARESTPLVSDWEGLWGIWTNVTQQMLPTDELLDKPIKLRNACIFYLGHIPAFLDIQLTKVTKSSPTSPSYYHSIFERGIDPDVDNPEHCHAHSEIPDEWPPVNEILNYQDRVKQRLLGLYADGVESIRRDVARAIWLAFEHEVMHTETLLYMMLQSDKTLPPTHRSTPNFKALAENAKQSRVENQWFDIPKQDIIIGLDDPEDDLEFDGHFGWDNEKPARRVQVHGFKAKGRPITNEEYAEYLFHNNLEKLPASWTIEETQDHTTEVNGSGTHAGLPASYLQGKAVRTVYGLVPLEYALDWPVFGSYDELAGCAAWMGGRIPTFEEARSIYTHVDLMRRKQAENQLGATVPAVNGHLVNDGVEETPPPSPATLTLVDEDDISASPYAKNDIFIDLMGANVGFRHWHPTAVTGHGHRLAGQGEMGGVWEWTSSPLRKHEGFEPMALYPLYTADFFDEKHNIVLGGSWATHPRIAGRRSFVNWYQRNYPYAWVGARLVKDS

SEQ ID NO: 7994 - DNA, 4808 bp, Muscodor strobelii
  misc_feature: SGI EST ID NO. CUFF.20316.1
  misc_feature: Variant of the nucleotide sequence at SEQ ID NO 7992
ctcccacttgctcactcacgattttgcattttatataaacctcctattccttcccagctatcttggttgtgtttctcaggtttagaggcttgtcttcgatttttggccacaactgtcaaccgtgccaaagcgtacgcgttgctcgcagtcatgccttctatcatcccgtctcctatcgagactcagttgtcctcagtagccgcaaagaaggctcctcaactaaaaggaaacgcagcatctgttgacattattgatattcgtcagacaaatgctgagatcaatctcaaggaagagatccatcaacttcttttcccgcagcaagggcccagaaaattacccaccctactgctatatgatgaagcaggcctcaagctttttgaaaagatcacgtatctggaggagtattatcctaccaatgccgaaattcaagttctcgagcgttcagctgcagaaatcgccgagaatatcccctctgggtccttagtggtcgaactgggcagtgggtaggatattttgatttagaaagcaatattccagtgaaagaactaatgcataccctagtaacctgagaaagatcaacctccttctccaggcgttcgagaataccggaaagaagatcgattattatgccctcgatctatctgaaccggaactctctagaacattgcagctactccccactttcaaacacgttcgatgccacggcctcctaggcacttatgacgatggccgagaatggctcaaatcatcagctgtctcggcaaaacgcaagtgtgtcgtgcatatgggctcaagcatcggaaacttctcccgatctgaggcagcctgcttcctacgaggcttcatggatgtactgcagtcacaagatagcttcttaattggagtggactcgtgcgacaacccttccaaagtatatcacgcatacaatgacgaacagggcgtcacgcatgactttattttgaacgggcttcaacacgccaacagagccttgagacagacggttttcaagccgggagactggaaagtcattggcgaatatgtttatgatgacgacggagggcgccatcgggcatttgtgtcgccactgcgtgataccgtggtcttgggagaaaccatcagggcccacgaacgagtccagatcgaggagagcgtcaagttctcgaaagacgactgcgccagactgtggggcgcggcaggcgcgtcagaagcgagcaagtggatgacagatgatgaaggctatggtctgcatctgctgatcaaagaggacctgttgtccttcagcctaaatccgacagtatatgctcgcgaaagcactcctctagtgagtgactgggagggcctatggggtatctggacgaacgttacgcagcagatgttgcccaccgatgagctgcttgacaaacctatcaaacttcgtaacgcgtgcatcttctatctaggtcatataccggccttcttggacatccagttaacgaaggtgaccaagagcagcccaacctcgcctagctactatcactcgatctttgaaagaggcatagacccggatgtcgacaatcctgagcattgtcacgcacactcagagattcccgacgaatggcctccagtaaatgagatattgaactatcaggatcgagtgaagcagagattgctaggtttatatgctgacggagttgagagtattcgtcgagatgttgcccgagccatatggctcgcattcgagcatgaggtcatgcatacggagacgttactttatatgatgttacaaagcgacaaaactttgccacctactcacagatcaacccccaatttcaaggccttggcagagaatgcaaaacagtcgagagtggaaaaccaatggtttgatatccctaaacaggatattatcattgggctcgatgacccagaagatgacctggaatttgacggtcattttggatgggacaatgagaagccggctcgtcgcgttcaagttcatggtttcaaagctaaggggagacccatcacgaacgaggaatatgcggagtatttgtttcacaacaatctggagaagctgccagcgtcatggactattgaggaaacccaagaccatacgactgaagtaaacggaagtggaactcatgcagggttgcctgcctcctatctacagggcaaggctgtccgtacggtctatggcctggtgcccctggagtatgctcttgactggccggtgtttggctcttacgatgagttagctgggtgtgctgcatggatgggtggacgaattcccacatttgaggaagcgcgtagcatctatacgcacgtcgatctcatgaggaggaagcaagccgaaaatcaactgggagccacggtaccggcagtgaacgggcatcttgtcaatgacggtgtcgaggagactcccccgccatctccggctactctgactcttgtcgatgaagacgatatctcggcttctccttacgccaagaacgacatcttcattgacttaatgggtgccaatgtcgggtttcgtcattggcacccaaccgccgtgaccgggcacggccataggctggccggccaaggcgaaatgggtggcgtgtgggagtggacgagctcgccgcttcgaaagcacgaaggttttgagcccatggccctctaccccctttacactgcggacttcttcgatgagaaacacaacattgtcctaggtggttcttgggccacacaccctcgtattgcggggaggagatctttcgtcaattggtaccagcgcaattacccatacgcctgggttggggcacggctggtcaaagatagctaacgacgactattggaggaagactaatcccactacgttattgcactggctatttattttacttgcattggcctacgaattgtttacgtccacctcattctgcccctggatatggtaacaaaatatgatgcagactgcgcgaccaaaagctctccactctgttctttgttcgtctttccttaacaatactcgcggttgttggatcatttggtatgtctactgtactgtagcaaaagctcgggcgggttgtttcggcttcgcacttgatggctccaaaagcagcgatgctcagcttaccaatgtttgacaccacgtgtttactgggtggttgcagtgcggttggcaaaagctggtctcgaaaattgaaaatcagggaggtcttttgtgttattagtaacgataatatgagatcgaatcgtaagtgcagttgttatgcgtcatgactacctacttcttgggcgcatgtgctttgcacaagatgtctcgactgaaaggggagctcttgattaaatcgatattgttgaaagtcatcgtgactagcttagttgaagtatgtctcgatgacctcgtgggcaatagccgtggtggtcttgacgccgtgatcacagatgaagctcgtaatcaagtcgggaggcgtaaaatcgagagggttagcggcagcatgagaacttgaaatgccattgggcgcagtgtcgtcgacgtttttgtgaaaatcaagaatgttctgtttgaagtcggcagtaccgctaagcttggtctgacatgtgggacgtgtccgtccgatcttatgctgctcggctgcaacatagaagggcttgccacttttgccaaagtccttggccagcttcgcgatctggtaagtgccgagtatgctcaggatgccgccctgtgcagtcacggcttgggcaccgaccagcacaaagctgaccttctccatgatgtgtgccacagcgccctcggagatggtggcgacgcggatgttcttggcgcgcagctcagccacgaccctattgctcttctcgcggctgttctcgctcatggcatagaccactttgaagggcggtgcctggcggtttgcgacagcctcagcagcgcgtcccaagaagacgcccacggctcgggagccaccgtgtgtcagcacagtgcagtgctccgtcaacagatggctagtgaggtgaatgatcatcagccagtctgcaccatcctcatagtggtggtagtcttaccgtccttgcagggcaatcttctctcttgcgtccttggccctctcggcgaagagccggccgttgctgacgaggtgcttgcggatgacctcgaactcggaatcgctactctcggcaccggtgttcccggcagcaccagatgggccctgcttaagcgctttcatgagggtctgggtgaacaggtcggtgccgtggcggacggccatggggttggagacggtggggctctggcgcaggcgtgtggactgcgtctcgacgagattcatagtctcgaagacggtcttggccgacgaagcacccagggcctcgataagggcctcgatggcggcgacgggcatggtcagatcaggatcgtcgtctaggagtctgtggtatgcctcgacgatgctgtggcggtcagtcatggcgcggggacggcgtacttgagagtgcttacttgaaggcatcgatctctggattgctgcgtagaggcagctggtgcggatacgtcgtcgtcgacgccgcgtcctcgtcggtcgccatcgtctcaacgcggggaatgcttgtgctacacgcgctgaaggttgagtaaatgcagcgacttgggtctcttggccagcgtatctctacctgatctgctcggatagaatctggtatattataaggtgtgtgaactttgcatacctgaatttaagatgtactggagccagggctagcgtacatgtagtacagctgggcccagtgcctttctaataattaacttgcatgcacatggtgactcaatcgcggggcagagctcggcttctgaa

SEQ ID NO: 7995 - DNA, 2595 bp, Muscodor strobelii
  misc_feature: SGI cDNA ID NO. 562441
  misc_feature: Encodes the peptide sequence at SEQ ID NO 7996
atgccttctatcatcccgtctcctatcgagactcagttgtcctcagtagccgcaaagaaggctcctcaactaaaaggaaacgcagcatctgttgacattattgatattcgtcagacaaatgctgagatcaatctcaaggaagagatccatcaacttcttttcccgcagcaagggcccagaaaattacccaccctactgctatatgatgaagcaggcctcaagctttttgaaaagatcacgtatctggaggagtattatcctaccaatgccgaaattcaagttctcgagcgttcagctgcagaaatcgccgagaatatcccctctgggtccttagtggtcgaactgggcagtggtaacctgagaaagatcaacctccttctccaggcgttcgagaataccggaaagaagatcgattattatgccctcgatctatctgaaccggaactctctagaacattgcagctactccccactttcaaacacgttcgatgccacggcctcctaggcacttatgacgatggccgagaatggctcaaatcatcagctgtctcggcaaaacgcaagtgtgtcgtgcatatgggctcaagcatcggaaacttctcccgatctgaggcagcctgcttcctacgaggcttcatggatgtactgcagtcacaagatagcttcttaattggagtggactcgtgcgacaacccttccaaagtatatcacgcatacaatgacgaacagggcgtcacgcatgactttattttgaacgggcttcaacacgccaacagagccttgagacagacggttttcaagccgggagactggaaagtcattggcgaatatgtttatgatgacgacggagggcgccatcgggcatttgtgtcgccactgcgtgataccgtggtcttgggagaaaccatcagggcccacgaacgagtccagatcgaggagagcgtcaagttctcgaaagacgactgcgccagactgtggggcgcggcaggcgcgtcagaagcgagcaagtggatgacagatgatgaaggctatggtctgcatctgctgatcaaagaggacctgttgtccttcagcctaaatccgacagtatatgctcgcgaaagcactcctctagtgagtgactgggagggcctatggggtatctggacgaacgttacgcagcagatgttgcccaccgatgagctgcttgacaaacctatcaaacttcgtaacgcgtgcatcttctatctaggtcatataccggccttcttggacatccagttaacgaaggtgaccaagagcagcccaacctcgcctagctactatcactcgatctttgaaagaggcatagacccggatgtcgacaatcctgagcattgtcacgcacactcagagattcccgacgaatggcctccagtaaatgagatattgaactatcaggatcgagtgaagcagagattgctaggtttatatgctgacggagttgagagtattcgtcgagatgttgcccgagccatatggctcgcattcgagcatgaggtcatgcatacggagacgttactttatatgatgttacaaagcgacaaaactttgccacctactcacagatcaacccccaatttcaaggccttggcagagaatgcaaaacagtcgagagtggaaaaccaatggtttgatatccctaaacaggatattatcattgggctcgatgacccagaagatgacctggaatttgacggtcattttggatgggacaatgagaagccggctcgtcgcgttcaagttcatggtttcaaagctaaggggagacccatcacgaacgaggaaaagtatgcggagtatttgtttcacaacaatctggagaagctgccagcgtcatggactattgaggaaacccaagaccatacgactgaagtaaacggaagtggaactcatgcagggttgcctgcctcctatctacagggcaaggctgtccgtacggtctatggcctggtgcccctggagtatgctcttgactggccggtgtttggctcttacgatgagttagctgggtgtgctgcatggatgggtggacgaattcccacatttgaggaagcgcgtagcatctatacgcacgtcgatctcatgaggaggaagcaagccgaaaatcaactgggagccacggtaccggcagtgaacgggcatcttgtcaatgacggtgtcgaggagactcccccgccatctccggctactctgactcttgtcgatgaagacgatatctcggcttctccttacgccaagaacgacatcttcattgacttaatgggtgccaatgtcgggtttcgtcattggcacccaaccgccgtgaccgggcacggccataggctggccggccaaggcgaaatgggtggcgtgtgggagtggacgagctcgccgcttcgaaagcacgaaggttttgagcccatggccctctaccccctttacactgcggacttcttcgatgagaaacacaacattgtcctaggtggttcttgggccacacaccctcgtattgcggggaggagatctttcgtcaattggtaccagcgcaattacccatacgcctgggttggggcacggctggtcaaagatagctaa

SEQ ID NO: 7996 - protein, 864 aa, Muscodor strobelii
  misc_feature: SGI Peptide ID NO. 562441
  misc_feature (789)..(862): Pfam Id: PF03781 Pfam Desc: Domain of function (DUF323)
  misc_feature (11)..(863): NCBI GI: 46122539 Blast Desc: FG05647.1 [Gibberella zeae PH-1]
  misc_feature (3)..(863): NCBI GI: 164429492 Blast Desc: NCU04343 [Neurospora crassa OR74A] gi|157073498|gb|EAA27088.2| NCU04343 [Neurospora crassa OR74A]
  misc_feature (32)..(863): NCBI GI: 145603400 Blast Desc: MGG_13219 [Magnaporthe grisea 70-15] gi|145011639|gb|EDJ96295.1| MGG_13219 [Magnaporthe grisea 70-15]
  misc_feature (30)..(863): NCBI GI: 189206405 Blast Desc: PTRG_09205 [Pyrenophora tritici-repentis Pt-1C-BFP] gi|187975630|gb|EDU42256.1| PTRG_09205 [Pyrenophora tritici-repentis Pt-1C-BFP]
  misc_feature (29)..(863): NCBI GI: 258573315 Blast Desc: conserved [Uncinocarpus reesii 1704] gi|237901105|gb|EEP75506.1| conserved [Uncinocarpus reesii 1704]
  misc_feature (21)..(863): NCBI GI: 212530460 Blast Desc: N-methyltransferase, [Penicillium marneffei ATCC 18224] gi|210074785|gb|EEA28872.1| N-methyltransferase, [Penicillium marneffei ATCC 18224]
  misc_feature (21)..(863): NCBI GI: 242818647 Blast Desc: N-methyltransferase, [Talaromyces stipitatus ATCC 10500] gi|218713624|gb|EED13048.1| N-methyltransferase, [Talaromyces stipitatus ATCC 10500]
  misc_feature (31)..(863): NCBI GI: 119191798 Blast Desc: CIMG_00276 [Coccidioides immitis RS]
  misc_feature (31)..(863): NCBI GI: 240106343 Blast Desc: CPC735_059060 [Coccidioides posadasii C735 delta SOWgp]
  misc_feature (30)..(863): NCBI GI: 169762818 Blast Desc: [Aspergillus oryzae RIB40] gi|83770337|dbj|BAE60470.1| protein product [Aspergillus oryzae]
MPSIIPSPIETQLSSVAAKKAPQLKGNAASVDIIDIRQTNAEINLKEEIHQLLFPQQGPRKLPTLLLYDEAGLKLFEKITYLEEYYPTNAEIQVLERSAAEIAENIPSGSLVVELGSGNLRKINLLLQAFENTGKKIDYYALDLSEPELSRTLQLLPTFKHVRCHGLLGTYDDGREWLKSSAVSAKRKCVVHMGSSIGNFSRSEAACFLRGFMDVLQSQDSFLIGVDSCDNPSKVYHAYNDEQGVTHDFILNGLQHANRALRQTVFKPGDWKVIGEYVYDDDGGRHRAFVSPLRDTVVLGETIRAHERVQIEESVKFSKDDCARLWGAAGASEASKWMTDDEGYGLHLLIKEDLLSFSLNPTVYARESTPLVSDWEGLWGIWTNVTQQMLPTDELLDKPIKLRNACIFYLGHIPAFLDIQLTKVTKSSPTSPSYYHSIFERGIDPDVDNPEHCHAHSEIPDEWPPVNEILNYQDRVKQRLLGLYADGVESIRRDVARAIWLAFEHEVMHTETLLYMMLQSDKTLPPTHRSTPNFKALAENAKQSRVENQWFDIPKQDIIIGLDDPEDDLEFDGHFGWDNEKPARRVQVHGFKAKGRPITNEEKYAEYLFHNNLEKLPASWTIEETQDHTTEVNGSGTHAGLPASYLQGKAVRTVYGLVPLEYALDWPVFGSYDELAGCAAWMGGRIPTFEEARSIYTHVDLMRRKQAENQLGATVPAVNGHLVNDGVEETPPPSPATLTLVDEDDISASPYAKNDIFIDLMGANVGFRHWHPTAVTGHGHRLAGQGEMGGVWEWTSSPLRKHEGFEPMALYPLYTADFFDEKHNIVLGGSWATHPRIAGRRSFVNWYQRNYPYAWVGARLVKDS

SEQ ID NO: 7997 - DNA, 4808 bp, Muscodor strobelii; identical to SEQ ID NO: 7994
  misc_feature: SGI EST ID NO. CUFF.20316.1
  misc_feature: Variant of the nucleotide sequence at SEQ ID NO 7995

SEQ ID NO: 7998 - DNA, 3117 bp, Muscodor strobelii
  misc_feature: SGI cDNA ID NO. 562442
  misc_feature: Reduced expression when VOC is produced
  misc_feature: Encodes the peptide sequence at SEQ ID NO 7999
atgttcgccgtccctggctgggctgtctcgaaagacagtcttgtgacagagactatctcgactccagatcaaggctctcacaactcagatccgtcaaaaaagcgcaagagacagaacgaaaatgtcaaggtcacttcttctaacgtttcggacctatgggaaaaggtcatcgaaggcagagataacaagaaaccaagaactgatcagcccagcgcggagggtcgcatcagcaaaaagggcaccatgccagatggcgcaccacggctgacactcaagcagaagaagaagctcaaggcacaaagggaccgtgaagccaatcaggatacaatcaaagatggtagtcagcatatctcagagtctcaaaacaaaactcgggaagacgatattgcaccccgggcagacgcacaagaaaagaactctgtgaccccaaaggcaccaaagcttacgcctatgcagaccgcgatgagggaaaagctcgtttctgccagatttcgtcatctcaacgagacattgtacaccaaaccatctgctgaggcttttctgctattccaggattcaccggaaatgtttcaagagtaccatgaaggattccgaagacaagtcaacgtgtggcctgaaaatcccgtcgatggctttctcgaagatatcaagctccgaggccgacagaagcctccacatcgctccaagcctggtcaagctgcctctatttctacgtcggggccacttccgctcgtgcgaagcaatggtgtttgcactattgcagacctaggctgtggtgacgccaaactcgccacggctttgcaggcagacaaaaagaaactgaatctcaagatccttagctacgacttacaaagtccgtctccgttcgtcacaaaggcagatatcgccaatcttcctctcgaagccggtagcgtcaatgtggttatcttctgcctggcgctcatgggcaccaactggctcgacttcatcgaggaagcctaccgcattctgcactggaaaggcgagctttggatcgcagagatcaagagtcgtctcggtcaagtcagcaataagaataaaaaagcgcccgtgaaacacagtgtaggcaatcgcaagaagaatgctacgctgaaatccaaaagcaaagacacagagcaagaggagaatcatgatctggatctcgccatcgacgtggacgggaacgaagacaagcgacaggaaacggacgtcacagcgtttgtggaggctttgcgtcgaagaggcttcgcgttacaaggtagcggcaatgacgcagttgacctacggaacaaaatgttcgtcaagatgcatttcatcaaagccgcccagccagttgttggaaagggagtcatcgagacacaagacatggaacggcgaggtgggaagaagctgagtgccaagttcatcgatgcggaggagcgagagccgattgacgagagcaaaattctaaagccttcgctctatagaatcagggacggaagcaacgacggcagtggcggcgatcagccgaaatgtagtatcagcagtggaaaattggagagcggattcaagataccatctggagaagcaccgagcagaaccgacgctttccttggggcatcccacctcgacctcctcgaccgcccaccacatcccccacgccgatctccctcgcgtgcatccacgacccctacatccgcgactacatcaagagaaccccgtctgctcactatcagcgtcgcaggcgcccgcgctctgcctctgcccgcctacaaaatgcgcatcacactcagcgtgaacaacccggaagtcgaggagcaggatctgcggctcgtcaccctcgatgtctaccccgagatgacgctcgaggccctccggagctcgatcgaggccgagggcatacccgcgcccgcacagcacctctaccacaacggccagctcatcaccgacgacgccaagacgctgcaagacctccagatcaccgacggcgacatgctggcactgcacgtccgtgacatgaggggcaccaatgtcaccgccagccaccgagatcccggcgcccagaggagaccgcctaccggtccgggaggccctggtgcttcccaaccacaggaccccgagctcatccgcttgcaggtgctcggtgacccagccctgcgcgcacagctcgaacgtctcaacccaacccttgccgccaccatcgaagaccccgcccgcttcgctcagatattccagcagagcaccaaccagcaggaggaggcgcggcaagcacgcatgcgagagattgccgcgttgaacgccgacgagttcaaccctgaagcccaggccaagatcgaagacatgatccgccaacaaggtgtcatggagaacctccagaacgccatggagcacaaccctgagtcatttggacgtgtacacttgttgtacattgacgtcaaggtcaacggcatcaaggtgaaggcattggttgattccggcgcccaggccaccatcatgtcgccctcgtgtgccgaagcatgtaacatcatgcgcctcgtcgacagacgcttcgccggtgttgctagaggtgtcggcactgccaacatcatcggtcgtgtacattccacaatactacaggtaggtagcaaacatctacacgccgccttcactgtcatggaaggcaaggctgttgacctgctgcttggcctggacatcctgaagggtcaccaagccaccatcgatctgtcgcggaacaagcttatcatacagggcgaggaggtcgagttcctcggcgaatccgatattccaaaggagaccgaggaggcggtcaacgaggagcccacagtgcccggtcctgggggaacaactatcggcgcccgctctggagctgtcatcgctccttcttcgtctacctcagcctcgaggccctctggctcatccgtgtctgcaccagcgccggcaatggtctccagctcccgacctgcaggggcgtcagcaccagcttccgccccctcggttccttcgctgcctccacggcagacgttccctgaaaacgacatcaaaacgctcactgatctcggcttcggccgtcagcaagctatcgaagctttagaagcaactggtggcaacgtcgaatacgctgctggtcttctgttccagtaa

SEQ ID NO: 7999 - protein, 1038 aa, Muscodor strobelii
  misc_feature: SGI Peptide ID NO. 562442
  misc_feature (1000)..(1036): Pfam Id: PF00627 Pfam Desc: UBA/TS-N domain
  misc_feature (776)..(899): Pfam Id: PF09668 Pfam Desc: Aspartyl protease
  misc_feature (254)..(338): Pfam Id: PF08241 Pfam Desc: Methyltransferase domain
  misc_feature (150)..(367): Pfam Id: PF05148 Pfam Desc: methyltransferase
  misc_feature (595)..(663): Pfam Id: PF00240 Pfam Desc: Ubiquitin family
  misc_feature (253)..(344): Pfam Id: PF05148 Pfam Desc: methyltransferase
  misc_feature (151)..(219): Pfam Id: PF05148 Pfam Desc: methyltransferase
  misc_feature (585)..(1038): NCBI GI: 116196426 Blast Desc: CHGG_04811 [Chaetomium globosum CBS 148.51] gi|88180724|gb|EAQ88192.1| CHGG_04811 [Chaetomium globosum CBS 148.51]
  misc_feature (585)..(1038): NCBI GI: 146286110 Blast Desc: CHGG_04811 [Chaetomium globosum CBS 148.51] gi|88180724|gb|EAQ88192.1| CHGG_04811 [Chaetomium globosum CBS 148.51]
  misc_feature (585)..(1038): NCBI GI: 171688550 Blast Desc: protein product [Podospora anserina] gi|170944237|emb|CAP70347.1| protein product [Podospora anserina]
  misc_feature (1)..(490): NCBI GI: 46123567 Blast Desc: FG06161.1 [Gibberella zeae PH-1]
  misc_feature (575)..(1038): NCBI GI: 164429256 Blast Desc: NCU05292 [Neurospora crassa OR74A] gi|157073002|gb|EAA32827.2| conserved [Neurospora crassa OR74A]
  misc_feature (585)..(1038): NCBI GI: 146286114 Blast Desc: NCU05292 [Neurospora crassa OR74A] gi|157073002|gb|EAA32827.2| conserved [Neurospora crassa OR74A]
  misc_feature (1)..(490): NCBI GI: 256727454 Blast Desc: NECHADRAFT_34271 [Nectria haematococca mpVI 77-13-4]
  misc_feature (586)..(1037): NCBI GI: 46123569 Blast Desc: FG06162.1 [Gibberella zeae PH-1]
  misc_feature (586)..(1038): NCBI GI: 156062468 Blast Desc: SS1G_01350 [Sclerotinia sclerotiorum 1980] gi|154696686|gb|EDN96424.1| SS1G_01350 [Sclerotinia sclerotiorum 1980]
  misc_feature (1)..(490): NCBI GI: 156062470 Blast Desc: SS1G_01351 [Sclerotinia sclerotiorum 1980] gi|154696687|gb|EDN96425.1| SS1G_01351 [Sclerotinia sclerotiorum 1980]
  misc_feature: Useful for introducing or modulating the production of volatile compounds
MFAVPGWAVSKDSLVTETISTPDQGSHNSDPSKKRKRQNENVKVTSSNVSDLWEKVIEGRDNKKPRTDQPSAEGRISKKGTMPDGAPRLTLKQKKKLKAQRDREANQDTIKDGSQHISESQNKTREDDIAPRADAQEKNSVTPKAPKLTPMQTAMREKLVSARFRHLNETLYTKPSAEAFLLFQDSPEMFQEYHEGFRRQVNVWPENPVDGFLEDIKLRGRQKPPHRSKPGQAASISTSGPLPLVRSNGVCTIADLGCGDAKLATALQADKKKLNLKILSYDLQSPSPFVTKADIANLPLEAGSVNVVIFCLALMGTNWLDFIEEAYRILHWKGELWIAEIKSRLGQVSNKNKKAPVKHSVGNRKKNATLKSKSKDTEQEENHDLDLAIDVDGNEDKRQETDVTAFVEALRRRGFALQGSGNDAVDLRNKMFVKMHFIKAAQPVVGKGVIETQDMERRGGKKLSAKFIDAEEREPIDESKILKPSLYRIRDGSNDGSGGDQPKCSISSGKLESGFKIPSGEAPSRTDAFLGASHLDLLDRPPHPPRRSPSRASTTPTSATTSREPRLLTISVAGARALPLPAYKMRITLSVNNPEVEEQDLRLVTLDVYPEMTLEALRSSIEAEGIPAPAQHLYHNGQLITDDAKTLQDLQITDGDMLALHVRDMRGTNVTASHRDPGAQRRPPTGPGGPGASQPQDPELIRLQVLGDPALRAQLERLNPTLAATIEDPARFAQIFQQSTNQQEEARQARMREIAALNADEFNPEAQAKIEDMIRQQGVMENLQNAMEHNPESFGRVHLLYIDVKVNGIKVKALVDSGAQATIMSPSCAEACNIMRLVDRRFAGVARGVGTANIIGRVHSTILQVGSKHLHAAFTVMEGKAVDLLLGLDILKGHQATIDLSRNKLIIQGEEVEFLGESDIPKETEEAVNEEPTVPGPGGTTIGARSGAVIAPSSSTSASRPSGSSVSAPAPAMVSSSRPAGASAPASAPSVPSLPPRQTFPENDIKTLTDLGFGRQQAIEALEATGGNVEYAAGLLFQ

SEQ ID NO: 8000 - DNA, 2760 bp, Muscodor strobelii
  misc_feature: SGI EST ID NO. CUFF.19936.2
  misc_feature: Variant of the nucleotide sequence at SEQ ID NO 7998
gcaaaacggaagctcgcgcgtgggcggtggtggggtcgagaagatgatgtcgtggttgcaattctggttggatcgatggtggtgatgcagccagagccgggcgagatccttgttggtggctcgtggtgcttacaatgcattgtttcatccgagtgccttgcctgggcggcgagaagagagaaagaactagaaggacttttttgcttcgcagttgtagacactcgggccctcgaccaccgagcaggcatcgactgcatgccgtaatactcaatggccaactcggtgctgttgtcatagcttaggtacatgtagccgaaggctaatagcatggcatcggctcgtctcgtctgacttcctgacatccaactcctactccttctctttctctgaccacatcttcccaccacgcaccacgcaacacgcacaacgcacatctcaccacgtaaaaccaacgaccagtcctctcctcgtgaagccaccacacaggcccggcacgccagctacctacataagtcactacatacagtatttcgtaacgctgcatccatcacgaattccagccgagcagaaccgacgctttccttggggcatcccacctcgacctcctcgaccgcccaccacatcccccacgccgatctccctcgcgtgcatccacgacccctacatccgcgactacatcaagagaaccccgtctgctcactatcagcgtcgcaggcgcccgcgctctgcctctgcccgcctacaaaatgtaagctgcctcgcccggtgcctgcctttctttcctcctcttcctccttcttcttcttctccttctctttcctctgcccgccctttgtgctgacacatactgcgaaaaggcgcatcacactcagcgtgaacaacccggaagtcgaggagcaggatctgcggctcgtcaccctcgatgtctaccccgagatgacgctcgaggccctccggagctcgatcgaggccgagggcatacccgcgcccgcacagcacctctaccacaacggccagctcatcaccgacgacgccaagacgctgcaagacctccagatcaccgacggcgacatgctggcactgcacgtccgtgacatgaggggcaccaatgtcaccgccagccaccgagatcccggcgcccagaggagaccgcctaccggtccgggaggccctggtgcttcccaaccacaggaccccgagctcatccgcttgcaggtgctcggtgacccagccctgcgcgcacagctcgaacgtctcaacccaacccttgccgccaccatcgaagaccccgcccgcttcgctcagatattccagcagagcaccaaccagcaggaggaggcgcggcaagcacgcatgcgagagattgccgcgttgaacgccgacgagttcaaccctgaagcccaggccaagatcgaagacatgatccgccaacaaggtgtcatggagaacctccagaacgccatggagcacaaccctgagtcatttggacgtgtacacttgttgtacattgacgtcaaggtcaacggcatcaaggtgaaggcattggttgattccggcgcccaggccaccatcatgtcgccctcgtgtgccgaagcatgtaacatcatgcgcctcgtcgacagacgcttcgccggtgttgctagaggtgtcggcactgccaacatcatcggtcgtgtacattccacaatactacaggtaggtagcaaacatctacacgccgccttcactgtcatggaaggcaaggctgttgacctgctgcttggcctggacatcctgaagggtcaccaagccaccatcgatctgtcgcggaacaagcttatcatacagggcgaggaggtcgagttcctcggcgaatccgatattccaaaggagaccgaggaggcggtcaacgaggagcccacagtgcccggtcctgggggaacaactatcggcgcccgctctggagctgtcatcgctccttcttcgtctacctcagcctcgaggccctctggctcatccgtgtctgcaccagcgccggcaatggtctccagctcccgacctgcaggggcgtcagcaccagcttccgccccctcggttccttcgctgcctccacggcagacgttccctgaaaacgacatcaaaacgctcactgatctcggcttcggccgtcagcaagctatcgaagctttagaagcaactggtggcaacgtcgaatacgctgctggtcttctgttccagtaactcaaagaccagatctcccagcccggttgcggatgacaagtgagaaagggacaggcaatatggagaagtccaaatccattcgcagagtgcaattcggagcaactactcctttgctagcttaccgtcaccgcgtcggctagatcgcccaggcatgctcgtctcagtaccgaccaacccacactgccttaaacgtgcagcgggcagtaagctttgcctagaaacatgcgctgacgataagtctcggattgcccacacgattatcggtagttcctttgagcatagcggtgcaaaatcatacatctgtatatggcgtgcattcagatagaagtacctcgcatacccccgaattgcctgtaactagaacaattacgtattcgagtccttgcaaattgacgctatctgaagaaacataagaggagtgaaagtttcaaatgtaaacacaagacttctagatcaatttgaggtccgtctagaatgtgataatcaaacagctcaacaaagagcatgcactaatcattactgcaaatcagtacaatgcgg

SEQ ID NO: 8001 - DNA, 2925 bp, Muscodor strobelii
  misc_feature: SGI cDNA ID NO. 562443
  misc_feature: Encodes the peptide sequence at SEQ ID NO 8002
atggatacttcagccccaggagcgagtgttctcagtgctaattcacagccgcagcggtcgtcgtcacctgatggaaacgaagaagaggacgcagcgcaaaagaagtcgcaagtgcggaaacgaacgaagactggctgcctcacatgccgaaaacgtcgcatcaaatgtgacgaaggcaaaccaacgtgtaacaattgcgtgcgttctaagcgacagtgtgatggatacaatcagcgagtgattttcaaagaccctctgggcactttcgccggttctgcatacgggccaatccattacccagcgtcttcaccacaagctttaatcagagaacagcagttgtcagtcgctcaacagagatcatcgtcccagtctctacagataattgcacccaaaccaccggttgttggacaccatcaacttgttacacatcaattcagccatttttaccctggccagactgggccagtgccgccaccaacagcttcagactctaatcgcggccctccacagccgcagccatcgaaatttacattcttccctccaaccacggccgatgcctttgcccaaggtctatggaagcaggacgggtctgggagcgccaatcaacatatccatcgtcttgctcaagatggcaaccacaaggagtctacagggccaccaccacgacagggtgtcacgcctggagctgtaccattcgtccaaggtgagcttgagcaccaggttgaagaagaacaactgggcgactgggaatatgactatttcgatgatgacgaatccatggccgagtccgacgaggagttctcgttagcacgacgggactcgcaattcagcctcaacgagttaggtgttgtcacttcacagaaattcgaccaccaatatcatatgctgggtacacataccaggacgttctcgacccatggagcagaaactgtcctcgcaacatacgacccttcgccaggaaattcgcctctcacggataaacacattgcagccgtattttggcatttcattaatgttactgggcctagtatgtcgctatatgaaagatacccgcttgatacttccaatatattccagggccatggcaccagatctaagcaacacatgtggacttatgcatttcctatcatgtcctttagtcaccctgctctcttacaggccatgcttgctctgggtagcttacaaattgccaagctccagaaagttcctccgactgcatctttaaagcattaccatttagctttaaggcgaattgctaaaaacgttagccgacccgcgaggcgaactcagaccgcgaatttggcagcaacacttcttcttggattttacgaggtttggaattctgaccatgataaatggtgcagacatcttctcggggcgcgttggatcatcaaagagataccactgtccgagatgacgagagcaatcatgtcgatcaaaatgcagaaacggcaaagtgatctggaacagtctcaatacggaaattgggaagactatcctgcaactgaagacccgaactttttgtataaagattgggacctgatggacgtttcgctcttgagcacattgcttggttacgaagtgtcatacgacgaattaggaatgcttccggaagctctcagttcgcggcctaagcctaaaaatatctataccaacaaagacatggaaagatacgagcaactgagtgacctcttttggtggtatggcaagatggatgtctatcagagcatcctcggtggaacccgtcctttcttggaagtcgataagtggctacaatgcccgccaagagcccctattgggaggctagacgctatctatggtacctatgattatctaatcttgcttttggcccgcttgaccaactttgtgtcccgggatcttgcgcggaaaagggaagctcttgcccaaagaggatctggtagtgtgtggccacccccaggcatgttcacgggcatgatgcccgcatcagagaaagtgacaccacccatgggctttagccctccacgcgacgactcgtcgaatgacgacgaccctgccgacatcgatcttgacactagaactgtcgaggcatgccaggaatgggagcgtattcagcaagccttcgatgagatcaggaaacattttggcccggattttgagccattgggggctgacgtttaccctactcaagggactccgttcggcctcgctgcacattatcgtacatattcaattgcgggctgctggatgaactactatatgggtctgattgtgcttcatcgcgctcaccctaccatgccaccagtggcgatgctcgctgctggtatgtctgctaagaccaccatgccatgggcttatgagattggtcggatcgctgccgggctcgaagagaacatcacgcatttgaaggttgtcagtacactgatgggagctgctcttatcgaatctacgttttcgcttttcgtagctgctgtgcagtttcaaggtgatgcgcagcgtcactgggttatccagcgcctacgcgatattggacgactcactagctggcagtcagcacaccagattgccgatgggtgccagtcagcttggtcgaaagccgcaaggctggggcgcggaccaccgtacacgcctcaacccgagcccgacgacgccaatgtccaagaagtccgaagcaaacacgaccaacggcggcaattcccacggcctccggacgttgcaccgcctggcctatcttgggtttggggtaacccgcggcgccttgaccgacgcattgaagaagaagacgccagtgctgtgccggaggccggaatgtcagccgaagacggcggcaagaagaagattgtccttgcgaagggcgagaaagccttttacgctatgggcttgctcaccgttgagcaggatctggagaagttagatttagatgctgacgataaagacagaaaatga

SEQ ID NO: 8002 - protein, 974 aa, Muscodor strobelii
  misc_feature: SGI Peptide ID NO. 562443
  misc_feature (44)..(83): Pfam Id: PF00172 Pfam Desc: Fungal Zn(2)-Cys(6) binuclear cluster domain
  misc_feature (44)..(79): Pfam Id: PF00172 Pfam Desc: Fungal Zn(2)-Cys(6) binuclear cluster domain
  misc_feature (28)..(969): NCBI GI: 256726884 Blast Desc: NECHADRAFT_103398 [Nectria haematococca mpVI 77-13-4]
  misc_feature (3)..(970): NCBI GI: 145612451 Blast Desc: MGG_07131 [Magnaporthe grisea 70-15] gi|145019603|gb|EDK03831.1| MGG_07131 [Magnaporthe grisea 70-15]
  misc_feature (255)..(966): NCBI GI: 85105933 Blast Desc: NCU05294 [Neurospora crassa OR74A] gi|28923659|gb|EAA32829.1| [Neurospora crassa OR74A]
  misc_feature (1)..(970): NCBI GI: 46123565 Blast Desc: FG06160.1 [Gibberella zeae PH-1]
  misc_feature (254)..(967): NCBI GI: 154302071 Blast Desc: BC1G_09716 [Botryotinia fuckeliana B05.10] gi|150855490|gb|EDN30682.1| BC1G_09716 [Botryotinia fuckeliana B05.10]
  misc_feature (254)..(967): NCBI GI: 156062474 Blast Desc: SS1G_01353 [Sclerotinia sclerotiorum 1980] gi|154696689|gb|EDN96427.1| SS1G_01353 [Sclerotinia sclerotiorum 1980]
  misc_feature (39)..(971): NCBI GI: 145232025 Blast Desc: An02g03420 [Aspergillus niger] gi|134056388|emb|CAK47622.1| protein product [Aspergillus niger]
  misc_feature (23)..(868): NCBI GI: 261204305 Blast Desc: C6 finger domain-containing protein [Ajellomyces dermatitidis SLH14081] gi|239587151|gb|EEQ69794.1| C6 finger domain-containing protein [Ajellomyces dermatitidis SLH14081]
  misc_feature (39)..(868): NCBI GI: 239614309 Blast Desc: C6 finger domain-containing protein [Ajellomyces dermatitidis ER-3]
  misc_feature (24)..(971): NCBI GI: 121715652 Blast Desc: C6 finger domain protein, [Aspergillus clavatus NRRL 1] gi|119403592|gb|EAW14009.1| C6 finger domain protein, [Aspergillus clavatus NRRL 1]
MDTSAPGASVLSANSQPQRSSSPDGNEEEDAAQKKSQVRKRTKTGCLTCRKRRIKCDEGKPTCNNCVRSKRQCDGYNQRVIFKDPLGTFAGSAYGPIHYPASSPQALIREQQLSVAQQRSSSQSLQIIAPKPPVVGHHQLVTHQFSHFYPGQTGPVPPPTASDSNRGPPQPQPSKFTFFPPTTADAFAQGLWKQDGSGSANQHIHRLAQDGNHKESTGPPPRQGVTPGAVPFVQGELEHQVEEEQLGDWEYDYFDDDESMAESDEEFSLARRDSQFSLNELGVVTSQKFDHQYHMLGTHTRTFSTHGAETVLATYDPSPGNSPLTDKHIAAVFWHFINVTGPSMSLYERYPLDTSNIFQGHGTRSKQHMWTYAFPIMSFSHPALLQAMLALGSLQIAKLQKVPPTASLKHYHLALRRIAKNVSRPARRTQTANLAATLLLGFYEVWNSDHDKWCRHLLGARWIIKEIPLSEMTRAIMSIKMQKRQSDLEQSQYGNWEDYPATEDPNFLYKDWDLMDVSLLSTLLGYEVSYDELGMLPEALSSRPKPKNIYTNKDMERYEQLSDLFWWYGKMDVYQSILGGTRPFLEVDKWLQCPPRAPIGRLDAIYGTYDYLILLLARLTNFVSRDLARKREALAQRGSGSVWPPPGMFTGMMPASEKVTPPMGFSPPRDDSSNDDDPADIDLDTRTVEACQEWERIQQAFDEIRKHFGPDFEPLGADVYPTQGTPFGLAAHYRTYSIAGCWMNYYMGLIVLHRAHPTMPPVAMLAAGMSAKTTMPWAYEIGRIAAGLEENITHLKVVSTLMGAALIESTFSLFVAAVQFQGDAQRHWVIQRLRDIGRLTSWQSAHQIADGCQSAWSKAARLGRGPPYTPQPEPDDANVQEVRSKHDQRRQFPRPPDVAPPGLSWVWGNPRRLDRRIEEEDASAVPEAGMSAEDGGKKKIVLAKGEKAFYAMGLLTVEQDLEKLDLDADDKDRK

SEQ ID NO: 8003 - DNA, 4604 bp, Muscodor strobelii
  misc_feature: SGI EST ID NO. CUFF.19711.0
  misc_feature: Variant of the nucleotide sequence at SEQ ID NO 8001
ctcctcgtcttaccatcgtagaaaatcaagagtctagctgcccgcttgtccgcggacaggcatacctcgtcttaagtttgtcataccatttcagcttccagggctcgtgaaatttaatatacaagcacgagcctcgtccaggtctcacttcttagtggtgccttttctcaacaccaataggcaaagctcggagctcttggaattgtcggaactgtcctggtgctgaacatagctctactcctagggttatcatacgtccagattgcagacatcaatctatgccaataattggagaaactccgatcgcattttaaattccagcttaagggcaaattaagcttcatcaactgccggactggaatgcgttgaaccaatagtgatatcagctagcgaactaaaatgaaccattgagccgcaatccaccacagatgacgactagctcttcataacgttggaatagagcattccgcgaggatggatacttcagccccaggagcgagtgttctcagtgctaattcacagccgcagcggtcgtcgtcacctgatggaaacgaagaagaggacgcagcgcaaaagaagtcgcaagtgcggaaacgaacgaagactggctgcctcacatgccgaaaacgtcgcatcaaatgtgacgaaggcaaaccaacgtgtaacaattgcgtgcgttctaagcgacagtgtgatggatacaatcagcgagtgattttcaaagaccctctgggcactttcgccggttctgcatacgggccaatccattacccagcgtcttcaccacaagctttaatcagagaacagcagttgtcagtcgctcaacagagatcatcgtcccagtctctacagataattgcacccaaaccaccggttgttggacaccatcaacttgttacacatcaattcagccatttttaccctggccagactgggccagtgccgccaccaacagcttcagactctaatcgcggccctccacagccgcagccatcgaaatttacattcttccctccaaccacggccgatgcctttgcccaaggtctatggaagcaggacgggtctgggagcgccaatcaacatatccatcgtcttgctcaagatggcaaccacaaggagtctacagggccaccaccacgacagggtgtcacgcctggagctgtaccattcgtccaaggtgagcttgagcaccaggttgaagaagaacaactgggcgactgggaatatgactatttcgatgatgacgaatccatggccgagtccgacgaggagttctcgttagcacgacgggactcgcaattcagcctcaacgagttaggtgttgtcacttcacagaaattcgaccaccaatatcatatgctgggtacacataccaggacgttctcgacccatggagcagaaactgtcctcgcaacatacgacccttcgccaggaaattcgcctctcacggataaacacattgcagccgtattttggcatttcattaatgttactgggcctagtatgtcgctatatgaaagatacccgcttgatacttccaatatattccagggccatggcaccagatctaagcaacacatgtggacttatgcatttcctatcatgtcctttagtcaccctgctctcttacaggccatgcttgctctgggtagcttacaaattgccaagctccagaaagttcctccgactgcatctttaaagcattaccatttagctttaaggcgaattgctaaaaacgttagccgacccgcgaggcgaactcagaccgcgaatttggcagcaacacttcttcttggattttacgaggtttggaattctgaccatgataaatggtgcagacatcttctcggggcgcgttggatcatcaaagagataccactgtccgagatgacgagagcaatcatgtcgatcaaaatgcagaaacggcaaagtgatctggaacagtctcaatacggaaattgggaagactatcctgcaactgaagacccgaactttttgtataaagattgggacctgatggacgtttcgctcttgagcacattgcttggttacgaagtgtcatacgacgaattaggaatgcttccggaagctctcagttcgcggcctaagcctaaaaatatctataccaacaaagacatggaaagatacgagcaactgagtgacctcttttggtggtatggcaagatggatgtctatcagagcatcctcggtggaacccgtcctttcttggaagtcgataagtggctacaatgcccgccaagagcccctattgggaggctagacgctatctatggtacctatgattatctaatcttgcttttggcccgcttgaccaactttgtgtcccgggatcttgcgcggaaaagggaagctcttgcccaaagaggatctggtagtgtgtggccacccccaggcatgttcacgggcatgatgcccgcatcagagaaagtgacaccacccatgggctttagccctccacgcgacgactcgtcgaatgacgacgaccctgccgacatcgatcttgacactagaactgtcgaggcatgccaggaatgggagcgtattcagcaagccttcgatgagatcaggaaacattttggcccggattttgagccattgggggctgacgtttaccctactcaagggactccgttcggcctcgctgcacattatcgtacatattcaattgcgggctgctggatgaactactatatgggtctgattgtgcttcatcgcgctcaccctaccatgccaccagtggcgatgctcgctgctggtatgtctgctaagaccaccatgccatgggcttatgagattggtcggatcgctgccgggctcgaagagaacatcacgcatttgaaggttgtcagtacactgatgggagctgctcttatcgaatctacgttttcgcttttcgtagctgctgtgcagtttcaaggtgatgcgcagcgtcactgggttatccagcgcctacgcgatattggacgactcactagctggcagtcagcacaccagattgccgatgggtgccagtcagcttggtcgaaagccgcaaggctggggcgcggaccaccgtacacgcctcaacccgagcccgacgacgccaatgtccaagaagtccgaagcaaacacgaccaacggcggcaattcccacggcctccggacgttgcaccgcctggcctatcttgggtttggggtaacccgcggcgccttgaccgacgcattgaagaagaagacgccagtgctgtgccggaggccggaatgtcagccgaagacggcggcaagaagaagattgtccttgcgaagggcgagaaagccttttacgctatgggcttgctcaccgttgagcaggatctggagaagttagatttagatgctgacgataaagacagaaaatgatgggatttatctgggtgagagtttgtagctgccttgtgtttgcggatacgactcaggatggagtatagaagatgaccaatattctatgtagtcatgcaatatcacttatgggcaggttggttcaggtatcaaaacgggctcgggcacttgagcatattctcatcatcactctagatgctagtaatacacgaagcttgtgaaaagcttatgggtcgggaatttgcttctaatttcgctgatccgggctgactgcgaaacgatatgctcacaaaggcgagatgagcaagacgtcagcttgcttctccaactcatgtctattggcctggcccactccggtccttccttacccattacgtgactgcgtcttgtgtttggccttgggccatcttagtttgcaggcagtctctcgactatgctagccatctcctcgtcggtgtatatcctgaagcccttctctttggtgacactggccaattgaacattcttggcatctaacttctcctccatgacttgctttagagtcttcaacacgagcagctcggcgtcggcaattgtgagagactacggccatactattaggtcacgaagggacaatgtagagatcatagagatttgggcggactgcttaccttgtggtattcattctggagctcagcctgtgctccctcgcttccggaaccgatggccttggcgtcgtagcggtaaaaggtgccgctaggctcggcgtggtacagcgaggggccgtcctcgtcgtagccggcaatgagaagggcgacaccgaagggccggctcatgatgctctcctcgccatcagcgctctcgccgaagcgcagggccaggtcgcagatagcctgggtgcagctctcgacacgcagattctcgttgtagttgaaggcgtgggactggcactcgacacgggcgtgctcgaccatgctgcgtgcatcggcctgcagaccagacatggcgcatccgatgtggcggtcgatctcgacgatcttctcaaccgaggatgtctcgagcagggtcgaggtgactcgcttctctacgccgaggacaacgccctcggatgtggctacgccgatggcggtggagccgagcttgatggcttctagggagtattcgacctggaacagacgaccctcgggcgagaaggtgctgcgaggggaggcatggtcagctggaggggtgtttgagcgtgggttcgg

SEQ ID NO: 8004 - DNA, 747 bp, Muscodor strobelii
  misc_feature: SGI cDNA ID NO. 562444
  misc_feature: Encodes the peptide sequence at SEQ ID NO 8005
atgtttatggcaagatctgaatatgctgaccatgcctcccctcgcagcaccttctcgcccgagggtcgtctgttccaggtcgaatactccctagaagccatcaagctcggctccaccgccatcggcgtagccacatccgagggcgttgtcctcggcgtagagaagcgagtcacctcgaccctgctcgagacatcctcggttgagaagatcgtcgagatcgaccgccacatcggatgcgccatgtctggtctgcaggccgatgcacgcagcatggtcgagcacgcccgtgtcgagtgccagtcccacgccttcaactacaacgagaatctgcgtgtcgagagctgcacccaggctatctgcgacctggccctgcgcttcggcgagagcgctgatggcgaggagagcatcatgagccggcccttcggtgtcgcccttctcattgccggctacgacgaggacggcccctcgctgtaccacgccgagcctagcggcaccttttaccgctacgacgccaaggccatcggttccggaagcgagggagcacaggctgagctccagaatgaataccacaagtctctcacaattgccgacgccgagctgctcgtgttgaagactctaaagcaagtcatggaggagaagttagatgccaagaatgttcaattggccagtgtcaccaaagagaagggcttcaggatatacaccgacgaggagatggctagcatagtcgagagactgcctgcaaactaa

SEQ ID NO: 8005 - protein, 248 aa, Muscodor strobelii
  misc_feature: SGI Peptide ID NO. 562444
  misc_feature (34)..(224): Pfam Id: PF00227 Pfam Desc: Proteasome A-type and B-type
  misc_feature (1)..(248): NCBI GI: 116196418 Blast Desc: conserved [Chaetomium globosum CBS 148.51] gi|88180720|gb|EAQ88188.1| conserved [Chaetomium globosum CBS 148.51]
  misc_feature (1)..(248): NCBI GI: 171688558 Blast Desc: protein product [Podospora anserina] gi|170944241|emb|CAP70351.1| protein product [Podospora anserina]
  misc_feature (1)..(248): NCBI GI: 85105938 Blast Desc: proteasome component PUP2 [Neurospora crassa OR74A] gi|28923660|gb|EAA32830.1| proteasome component PUP2 [Neurospora crassa OR74A]
  misc_feature (1)..(248): NCBI GI: 256727455 Blast Desc: [Nectria haematococca mpVI 77-13-4]
  misc_feature (9)..(248): NCBI GI: 46123563 Blast Desc: FG06159.1 [Gibberella zeae PH-1]
  misc_feature (1)..(248): NCBI GI: 156045147 Blast Desc: conserved [Sclerotinia sclerotiorum 1980] gi|154694157|gb|EDN93895.1| conserved [Sclerotinia sclerotiorum 1980]
  misc_feature (1)..(248): NCBI GI: 154294634 Blast Desc: 20S proteasome alpha subunit E [Botryotinia fuckeliana B05.10] gi|150844666|gb|EDN19859.1| 20S proteasome alpha subunit E [Botryotinia fuckeliana B05.10]
  misc_feature (3)..(248): NCBI GI: 261355850 Blast Desc: proteasome component PUP2 [Verticillium albo-atrum VaMs.102]
  misc_feature (1)..(248): NCBI GI: 258577477 Blast Desc: proteasome component PUP2 [Uncinocarpus reesii 1704] gi|237903186|gb|EEP77587.1| proteasome component PUP2 [Uncinocarpus reesii 1704]
  misc_feature (1)..(248): NCBI GI: 189196042 Blast Desc: proteasome subunit alpha type-5 [Pyrenophora tritici-repentis Pt-1C-BFP] gi|187980238|gb|EDU46864.1| proteasome subunit alpha type-5 [Pyrenophora tritici-repentis
  misc_feature (1)..(245): SWISSPROT Homolog: EC 3.4.25.1 Proteasome endopeptidase complex
MFMARSEYADHASPRSTFSPEGRLFQVEYSLEAIKLGSTAIGVATSEGVVLGVEKRVTSTLLETSSVEKIVEIDRHIGCAMSGLQADARSMVEHARVECQSHAFNYNENLRVESCTQAICDLALRFGESADGEESIMSRPFGVALLIAGYDEDGPSLYHAEPSGTFYRYDAKAIGSGSEGAQAELQNEYHKSLTIADAELLVLKTLKQVMEEKLDAKNVQLASVTKEKGFRIYTDEEMASIVERLPAN

SEQ ID NO: 8006 - DNA, 3497 bp, Muscodor strobelii
  misc_feature: SGI EST ID NO. CUFF.19712.1
  misc_feature: Variant of the nucleotide sequence at SEQ ID NO 8004
gcgggcaggtgggatctcacgtttaggtagtagccaaggtagctaaggtacctgagaggcgggctctaggtgagcttcgtcaacgccatagcagccttgagcttcccatcgtcatacgccagctctcaaaccaccaagactaccgattttacgacttcgtgctcgactatttcctccccattctgaactcgcgcctcttccttctgcccgccttttttcgtcacataccacctcgattctccacggccccagctggtcgcattatcaaccgtctaccacccggcgtcccccaaacaccgccaacatgtttatggcaagatctgaatatgatcggggcatcaagtaacatacccccgaacccacgctcaaacacccctccagctgaccatgcctcccctcgcagcaccttctcgcccgagggtcgtctgttccaggtcgaatactccctagaagccatcaagctcggctccaccgccatcggcgtagccacatccgagggcgttgtcctcggcgtagagaagcgagtcacctcgaccctgctcgagacatcctcggttgagaagatcgtcgagatcgaccgccacatcggatgcgccatgtctggtctgcaggccgatgcacgcagcatggtcgagcacgcccgtgtcgagtgccagtcccacgccttcaactacaacgagaatctgcgtgtcgagagctgcacccaggctatctgcgacctggccctgcgcttcggcgagagcgctgatggcgaggagagcatcatgagccggcccttcggtgtcgcccttctcattgccggctacgacgaggacggcccctcgctgtaccacgccgagcctagcggcaccttttaccgctacgacgccaaggccatcggttccggaagcgagggagcacaggctgagctccagaatgaataccacaagtctctcacaattgccgacgccgagctgctcgtgttgaagactctaaagcaagtcatggaggagaagttagatgccaagaatgttcaattggccagtgtcaccaaagagaagggcttcaggatatacaccgacgaggagatggctagcatagtcgagagactgcctgcaaactaagatggcccaaggccaaacacaagacgcagtcacgtaatgggtaaggaaggaccggagtgggccaggccaatagacatgagttggagaagcaagctgacgtcttgctcatctcgcctttgtgagcatatcgtttcgcagtcagcccggatcagcgaaattagaagcaaattcccgacccataagcttttcacaagcttcgtgtattactagcatctagagtgatgatgagaatatgctcaagtgcccgagcccgttttgatacctgaaccaacctgcccataagtgatattgcatgactacatagaatattggtcatcttctatactccatcctgagtcgtatccgcaaacacaaggcagctacaaactctcacccagataaatcccatcattttctgtctttatcgtcagcatctaaatctaacttctccagatcctgctcaacggtgagcaagcccatagcgtaaaaggctttctcgcccttcgcaaggacaatcttcttcttgccgccgtcttcggctgacattccggcctccggcacagcactggcgtcttcttcttcaatgcgtcggtcaaggcgccgcgggttaccccaaacccaagataggccaggcggtgcaacgtccggaggccgtgggaattgccgccgttggtcgtgtttgcttcggacttcttggacattggcgtcgtcgggctcgggttgaggcgtgtacggtggtccgcgccccagccttgcggctttcgaccaagctgactggcacccatcggcaatctggtgtgctgactgccagctagtgagtcgtccaatatcgcgtaggcgctggataacccagtgacgctgcgcatcaccttgaaactgtgtgcgattttgcagtcagcaagacggggctttccatggacgcatggagaaaagtccgtgtctggtacgtgtttgttttttggttaaagaggggagagtcgctcacctgcacagcagctacgaaaagcgaaaacgtagattcgataagagcagctcccatcagtgtactgacaaccttcaaatgcgtgatgttctcttcgagcccggcagcgatccgaccaatctcataagcccatggcatggtggtcttagcagacataccagcagcgagcatcgccactggtggcatggtagggtgagcgcgatgaagcacaatcagacccatatagtagttcatccagcagcccgcaattgaatatgtacgataatgtgcagcgaggccgaacggagtcccttgagtagggtaaacgtcagcccccaatggctcaaaatccgggccaaaatgtttcctgatctcatcgaaggcttgctgaatacgctcccattcctggcatgcctcgacagttctagtgtcaagatcgatgtcggcagggtcgtcgtcattcgacgagtcgtcgcgtggagggctaaagcccatgggtggtgtcactttctctgatgcgggcatcatgcccgtgaacatgcctgggggtggccacacactaccagatcctctttgggcaagagcttcccttttccgcgcaagatcccgggacacaaagttggtcaagcgggccaaaagcaagattagataatcataggtaccatagctacatgctgtcagctaaaaccattcagtgcgataagcgtcccgtagacgtacatagcgtctagcctcccaataggggctcttggcgggcattgtagccacttatcgacttccaagctatgaatgtcgaggtcagcgtaagtccatgaagccttgagttatatacgaacaaaggacgggttccaccgaggatgctctgatagacatccatcttgccataccaccaaaagaggtcactcagttgctcgtatctttccatgtctttgttggtatagatatttttaggcttaggccgcgaactgagagcttccggaagcattcctaattcgtcgtatgacacttcgtaaccaagcaatgtgctcaagagcgaaacgtccatcaggtcccaatctttatacaaaaagttcgggtcttcagttgcaggatagtcttcccaatttccgtattgagactgttccagatcactttgccgtttctgcattttgatcgacatgattgctctcgtcatctcggacagtggtatctctttgatgatccaacgcgccccgagaagatgtctgcaccatttatcatggtcagaattccaaacctcgtaaaatccaagaagaagtgttgctgccaaattcgcggtctgagttcgcctcgcgggtcggctaacgtttttagcaattcgccttaaagctaaatggtaatgctttaaagatgcagtcggaggaactttctggagcttggcaatttgtaagctacccagagcaagcatggcctgtaagagagcagggtgactaaag

SEQ ID NO: 8007 - DNA, 2760 bp, Muscodor strobelii
  misc_feature: SGI cDNA ID NO. 562445
  misc_feature: Encodes the peptide sequence at SEQ ID NO 8008
atgtcttcgcgactatccaactacgcggaccggcgctccaacggcgttgacggcggtgctccgagaccccgcgcccacgctgcctcgagaacatcgcagcccgcgcacccctcgcaacctgacgcccgtatcggccggtcgccgcaacccagctctaccaaccccccgcacaagcgatcggcttcgggaaaccccaggcccgcgagtcgcacagtcgaagaaagaatcacagaccgccgcaccatcaccacgcgcgagaagctcgtcacccggacgaggagccccgagcggcgccctaaagatgcaccaccgccagagaggtaccggtccaaggacatatccagatcacggcccgattcctccaagctcaaagagccaaggcccgagtccaacttgtcctcggccacctgggatcctgtcgccactctcatacctcatacctctgctcctctcgccatccgcgtttccgtgcctcccttggccgcagccgctccgtcgtctcaccagcctcagcctctccatgagctgtctctggaggcgcaggaggccgccatgatcgaagaccttctcttcgttttcatgggttacgagggctcatacatacgctatgcctactcatataagcccgccgacgagagggatcgtctacaagggcctaccttcaagatcctgcctggactggatcccagcttgcaggacttaacactgtccgtgctgcagatggctactcactattcagccctcgagatgttcattaacgtgcaaagccgggaagagtttggcatcgtcaaccatgccctttgcgctgctataagaaagttcttacacgattacctagtcatgatcgctcagctagagactcaattcttaaccaatgaaacattcactttgcacttgcttcatgttcatacacttcctacgagccagatgatgtctcagctgtatgcattggcctcggaccttctgaaacgaaatgcactgttggatgatgaaagcgaagaggactcggactcggaagactatgacaaggtcatcgaaaacctaaaacggggcggcggtctggtgccaggaaatatggctgtgaagaaagtatgcaagggcggtgctgtcattgatttggttaccaagaggctcgaaaccatgagtggagatcctgatgcgcgggcgctactcacatcactgcttcgggatgcgagtcggccgtacatggccatgctcaatgaatggcttcaccatggtgagatcaaggatccgcactccgagttcctaatcaaagaacagaagagtattcgtcgcgatatgctagagcaggattacactgatgactactgggagaggagatacatgattcaaaagcagaacattcctccccagctccagagcgtgaaagacaaggtgcttctggccggaaaatatctaaatgttgtgagagaatgcggcggtgtcgatatcagcaaggtggtcgaagatgtaccgacatcatttgacgatccccggtttctcgacaatgtgaacaacgcttacgcatatgcgaacgagtccctaatgaagttacttctcaccacacacgcactcccggctcggctacgctcgctcaaacattatttcttcctcgacccatccgactacttcacctacttcctggagcttagtgcctctgaactacgaaagtcggtcgacaaagtaaacaccatcaaattacaatctcttctcgatctcgtcctccgccaacctgggagcatcgtctccctagatcccttcaaagaggatgtccatgtcgaaatgaacaaagtcgggcttataaagatgctgcaaagagttgtaaatataaccggcattgaacaaggggactcactacaacctctcagtggtcaagcggtcgagaatgatgaaaatgcatcgggcttcacatctttacaactagattaccacgtacctttccctgtttcccttgttattagccgcaaaaccgtctggcgctaccaagccttgtttcgctatttattgtctttgcgatatctcgagtcacagctgtctacgacctggcatacacacaataatggcattgtatggaatcacaaatcgtccatcaagaagctcgagatctggaaaaggcgggtgtggacgctgagagcgcgcatggtggtatttgtccaacagcttctctatttctgcacgttggaagtcatcgagcccaattggcagtctttactttctagattaaaggcaaaagacggcagcctggacggctcgggcaaaccagaccggactgttgacgagctcatgcaagatcatgtcgatttcttggatacttgcctcaagggttgcatgctaactaatggcaagctgataagaatccattcgaaactcatgcaaacttgtacggtcttcgccgcttatacaaattggctgtctcgtgagcttgagaaggccgacccagatctcatcggtgccatcaaaccaccaaacatgtcggagaagcaatggaagcgattccaggctaccaaaacacagaagtcaggggacagcgtatccaatagccagcttcacgacgaagacggcttggttgagaagctatttgagatcattaagaagtgggaaacaaatttcagtcgccacctgcagatcttgctagatgcccttaaccattacgccgcgacggaaacggtggttttgttgagtttgtgcgctaggctggccacggcgaatcaagggactgaatacgccggactgagaacggaagaggatatggctacttaa

SEQ ID NO: 8008 - protein, 919 aa, Muscodor strobelii
  misc_feature: SGI Peptide ID NO. 562445
  misc_feature (185)..(738): Pfam Id: PF04130 Pfam Desc: Spc97 / Spc98 family
  misc_feature (2)..(916): NCBI GI: 116196416 Blast Desc: conserved [Chaetomium globosum CBS 148.51] gi|88180719|gb|EAQ88187.1| conserved [Chaetomium globosum CBS 148.51]
  misc_feature (9)..(918): NCBI GI: 256726885 Blast Desc: [Nectria haematococca mpVI 77-13-4]
  misc_feature (12)..(916): NCBI GI: 46123561 Blast Desc: FG06158.1 [Gibberella zeae PH-1]
  misc_feature (1)..(918): NCBI GI: 261355851 Blast Desc: spindle pole body component alp4 [Verticillium albo-atrum VaMs.102]
  misc_feature (3)..(918): NCBI GI: 154294632 Blast Desc: BC1G_13786 [Botryotinia fuckeliana B05.10] gi|150844665|gb|EDN19858.1| BC1G_13786 [Botryotinia fuckeliana B05.10]
  misc_feature (142)..(910): NCBI GI: 171688560 Blast Desc: protein product [Podospora anserina] gi|170944242|emb|CAP70352.1| protein product [Podospora anserina]
  misc_feature (61)..(916): NCBI GI: 85105942 Blast Desc: NCU05296 [Neurospora crassa OR74A] gi|28923661|gb|EAA32831.1| NCU05296 [Neurospora crassa OR74A]
  misc_feature (22)..(919): NCBI GI: 145612447 Blast Desc: MGG_07129 [Magnaporthe grisea 70-15] gi|145019601|gb|EDK03829.1| MGG_07129 [Magnaporthe grisea 70-15]
  misc_feature (15)..(900): NCBI GI: 119178762 Blast Desc: CIMG_08183 [Coccidioides immitis RS]
  misc_feature (15)..(900): NCBI GI: 240104708 Blast Desc: Spc97 / Spc98 family protein [Coccidioides posadasii C735 delta SOWgp]
MSSRLSNYADRRSNGVDGGAPRPRAHAASRTSQPAHPSQPDARIGRSPQPSSTNPPHKRSASGNPRPASRTVEERITDRRTITTREKLVTRTRSPERRPKDAPPPERYRSKDISRSRPDSSKLKEPRPESNLSSATWDPVATLIPHTSAPLAIRVSVPPLAAAAPSSHQPQPLHELSLEAQEAAMIEDLLFVFMGYEGSYIRYAYSYKPADERDRLQGPTFKILPGLDPSLQDLTLSVLQMATHYSALEMFINVQSREEFGIVNHALCAAIRKFLHDYLVMIAQLETQFLTNETFTLHLLHVHTLPTSQMMSQLYALASDLLKRNALLDDESEEDSDSEDYDKVIENLKRGGGLVPGNMAVKKVCKGGAVIDLVTKRLETMSGDPDARALLTSLLRDASRPYMAMLNEWLHHGEIKDPHSEFLIKEQKSIRRDMLEQDYTDDYWERRYMIQKQNIPPQLQSVKDKVLLAGKYLNVVRECGGVDISKVVEDVPTSFDDPRFLDNVNNAYAYANESLMKLLLTTHALPARLRSLKHYFFLDPSDYFTYFLELSASELRKSVDKVNTIKLQSLLDLVLRQPGSIVSLDPFKEDVHVEMNKVGLIKMLQRVVNITGIEQGDSLQPLSGQAVENDENASGFTSLQLDYHVPFPVSLVISRKTVWRYQALFRYLLSLRYLESQLSTTWHTHNNGIVWNHKSSIKKLEIWKRRVWTLRARMVVFVQQLLYFCTLEVIEPNWQSLLSRLKAKDGSLDGSGKPDRTVDELMQDHVDFLDTCLKGCMLTNGKLIRIHSKLMQTCTVFAAYTNWLSRELEKADPDLIGAIKPPNMSEKQWKRFQATKTQKSGDSVSNSQLHDEDGLVEKLFEIIKKWETNFSRHLQILLDALNHYAATETVVLLSLCARLATANQGTEYAGLRTEEDMAT

SEQ ID NO: 8009 - DNA, 3221 bp, Muscodor strobelii
  misc_feature: SGI EST ID NO. CUFF.19680.0
  misc_feature: Variant of the nucleotide sequence at SEQ ID NO 8007
tacctacctaagctttccgatgtgcgcgacgcgacgcgacatggggtttatgaggtgtcattctacgagtaggtactgcacgttatcggccaattgcctagcccagatcgtagtaaatccaaggtagattgagctaagtgtaaacccacgtcacatgtattgtcagactcattgagcggatgcttgctttattgcgagtgccgtacctggtgctgtgatatacgccacaacttttccttgttctacacttcgaaggccaagctgtcccagatgtggtcgccgcgtcgggatcatgtcttcgcgactatccaactacgcggaccggcgctccaacggcgttgacggcggtgctccgagaccccgcgcccacgctgcctcgagaacatcgcagcccgcgcacccctcgcaacctgacgcccgtatcggccggtcgccgcaacccagctctaccaaccccccgcacaagcgatcggcttcgggaaaccccaggcccgcgagtcgcacagtcgaagaaagaatcacagaccgccgcaccatcaccacgcgcgagaagctcgtcacccggacgaggagccccgagcggcgccctaaagatgcaccaccgccagagaggtaccggtccaaggacatatccagatcacggcccgattcctccaagctcaaagagccaaggcccgagtccaacttgtcctcggccacctgggatcctgtcgccactctcatacctcatacctctgctcctctcgccatccgcgtttccgtgcctcccttggccgcagccgctccgtcgtctcaccagcctcagcctctccatgagctgtctctggaggcgcaggaggccgccatgatcgaagaccttctcttcgttttcatgggttacgagggctcatacatacgctatgcctactcatataagcccgccgacgagagggatcgtctacaagggcctaccttcaagatcctgcctggactggatcccagcttgcaggacttaacactgtccgtgctgcagatggctactcactattcagccctcgagatgttcattaacgtgcaaagccgggaagagtttggcatcgtcaaccatgccctttgcgctgctataagaaagttcttacacgattacctagtcatgatcgctcagctagagactcaattcttaaccaatgaaacattcactttgcacttgcttcatgttcatacacttcctacgagccagatgatgtctcagctgtatgcattggcctcggaccttctgaaacgaaatgcactgttggatgatgaaagcgaagaggactcggactcggaagactatgacaaggtcatcgaaaacctaaaacggggcggcggtctggtgccaggaaatatggctgtgaagaaagtatgcaagggcggtgctgtcattgatttggttaccaagaggctcgaaaccatgagtggagatcctgatgcgcgggcgctactcacatcactgcttcgggatgcgagtcggccgtacatggccatgctcaatgaatggcttcaccatggtgagatcaaggatccgcactccgagttcctaatcaaagaacagaagagtattcgtcgcgatatgctagagcaggattacactgatgactactgggagaggagatacatgattcaaaagcagaacattcctccccagctccagagcgtgaaagacaaggtgcttctggccggaaaatatctaaatgttgtgagagaatgcggcggtgtcgatatcagcaaggtggtcgaagatgtaccgacatcatttgacgatccccggtttctcgacaatgtgaacaacgcttacgcatatgcgaacgagtccctaatgaagttacttctcaccacacacgcactcccggctcggctacgctcgctcaaacattatttcttcctcgacccatccgactacttcacctacttcctggagcttagtgcctctgaactacgaaagtcggtcgacaaagtaaacaccatcaaattacaatctcttctcgatctcgtcctccgccaacctgggagcatcgtctccctagatcccttcaaagaggatgtccatgtcgaaatgaacaaagtcgggcttataaagatgctgcaaagagttgtaaatataaccggcattgaacaaggggactcactacaacctctcagtggtcaagcggtcgagaatgatgaaaatgcatcgggcttcacatctttacaactagattaccacgtacctttccctgtttcccttgttattagccgcaaaaccgtctggcgctaccaagccttgtttcgctatttattgtctttgcgatatctcgagtcacagctgtctacgacctggcatacacacaataatggcattgtatggaatcacaaatcgtccatcaagaagctcgagatctggaaaaggcgggtgtggacgctgagagcgcgcatggtggtatttgtccaacagcttctctatttctgcacgttggaagtcatcgagcccaattggcagtctttactttctagattaaaggcaaaagacggcagcctggacggctcgggcaaaccagaccggactgttgacgagctcatgcaagatcatgtcgatttcttggatacttgcctcaagggttgcatgctaactaatggcaagctgataagaatccattcgaaactcatgcaaacttgtacggtcttcgccgcttatacaaattggctgtctcgtgagcttgagaaggccgacccagatctcatcggtgccatcaaaccaccaaacatgtcggagaagcaatggaagcgattccaggctaccaaaacacagaagtcaggggacagcgtatccaatagccagcttcacgacgaagacggcttggttgagaagctatttgagatcattaagaagtgggaaacaaatttcagtcgccacctgcagatcttgctagatgcccttaaccattacgccgcgacggaaacggtggttttgttgagtttgtgcgctaggctggccacggcgaatcaagggactgaatacgccggactgagaacggaagaggatatggctacttaagggcaagttttatgtatgatacgagagcatgatgcgtggactacgcgatacgtcggctggtatatagaaatatccaatagtgagctctatattgactacctctgtcttgagtaatgtgttcatatcgtccatgagttcccataggtgattcgtcggctgtagggtcccg

SEQ ID NO: 8010 - DNA, 564 bp, Muscodor strobelii
  misc_feature: SGI cDNA ID NO. 562446
  misc_feature: Reduced expression when VOC is produced
  misc_feature: Encodes the peptide sequence at SEQ ID NO 8011
atgctcttcagaaccgccgcgacgcgcctggccccggccgtccgccatcccaacgcctgcatcgctatcgccctccgtccgtacagcgatgccacggccccagcacctcccctactccagaagctcaaggcggacctcaagacggccatgcgcgccaaagacgccgcccgcctctccgtgctgcgcgcagctctcgcctccaccctcaacgcctccaagaccgcatccccgatatccacggacgccgccctcgtcgcccttctccggaaacaagcccgcgcctgctccgacgcacgcgctgagttcgccgctgccggtcgcgacgacctcgcccagaaggaagacgcgcaggtcactatcctggacgagtatgtcgccggcagtggcgtcgaggagctcgaacccgagaagctgcgtgccattgtgcaggaagcagtcacaagccaggctggcgctaggatgggcgaggttatgaagactcttctcgcgcctggcggaccgctggacggcaagaatgtggagaaggccgagctggcacgccttgttaaggagctcacatcataa

SEQ ID NO: 8011 - protein, 187 aa, Muscodor strobelii
  misc_feature: SGI Peptide ID NO. 562446
  misc_feature (39)..(181): Pfam Id: PF09424 Pfam Desc: Yqey-like protein
  misc_feature (39)..(124): Pfam Id: PF09424 Pfam Desc: Yqey-like protein
  misc_feature (15)..(184): NCBI GI: 39971677 Blast Desc: MGG_07154 [Magnaporthe grisea 70-15] gi|145019629|gb|EDK03857.1| MGG_07154 [Magnaporthe grisea 70-15]
  misc_feature (24)..(185): NCBI GI: 85105648 Blast Desc: NCU05248 [Neurospora crassa OR74A] gi|28923603|gb|EAA32776.1| conserved [Neurospora crassa OR74A]
  misc_feature (3)..(187): NCBI GI: 256727432 Blast Desc: NECHADRAFT_33425 [Nectria haematococca mpVI 77-13-4]
  misc_feature (26)..(185): NCBI GI: 156062446 Blast Desc: SS1G_01339 [Sclerotinia sclerotiorum 1980] gi|154696675|gb|EDN96413.1| SS1G_01339 [Sclerotinia sclerotiorum 1980]
  misc_feature (12)..(185): NCBI GI: 154302105 Blast Desc: BC1G_09733 [Botryotinia fuckeliana B05.10] gi|150855507|gb|EDN30699.1| BC1G_09733 [Botryotinia fuckeliana B05.10]
  misc_feature (13)..(187): NCBI GI: 212543911 Blast Desc: conserved [Penicillium marneffei ATCC 18224] gi|210067017|gb|EEA21110.1| conserved [Penicillium marneffei ATCC 18224]
  misc_feature (28)..(187): NCBI GI: 242788011 Blast Desc: conserved [Talaromyces stipitatus ATCC 10500] gi|218721282|gb|EED20701.1| conserved [Talaromyces stipitatus ATCC 10500]
  misc_feature (25)..(184): NCBI GI: 70986843 Blast Desc: conserved [Aspergillus fumigatus Af293] gi|66846539|gb|EAL86871.1| conserved [Aspergillus fumigatus Af293] gi|159123322|gb|EDP48442.1| conserved [Aspergillus A1163]
  misc_feature (30)..(184): NCBI GI: 255943845 Blast Desc: Pc20g01310 [Penicillium chrysogenum Wisconsin 54-1255] gi|211587425|emb|CAP85460.1| Pc20g01310 [Penicillium chrysogenum Wisconsin 54-1255]
  misc_feature (2)..(161): NCBI GI: 46123645 Blast Desc: FG06200.1 [Gibberella zeae PH-1]
  misc_feature: Useful for introducing or modulating the production of volatile compounds
MLFRTAATRLAPAVRHPNACIAIALRPYSDATAPAPPLLQKLKADLKTAMRAKDAARLSVLRAALASTLNASKTASPISTDAALVALLRKQARACSDARAEFAAAGRDDLAQKEDAQVTILDEYVAGSGVEELEPEKLRAIVQEAVTSQAGARMGEVMKTLLAPGGPLDGKNVEKAELARLVKELTS

SEQ ID NO: 8012 - DNA, 1638 bp, Muscodor strobelii
  misc_feature: SGI EST ID NO. CUFF.19683.0
  misc_feature: Variant of the nucleotide sequence at SEQ ID NO 8010
cacagatggaccctgaaataagctcaacaaggccaattgatgtgacgggaactaccgatgccacagcgccgcgtaaacggccccggcatgccgccccaccagaggaacggttctgggccagctagatttggctcggatttggcccccaaactggctgaaccagtatcaaaacttcgaatgcatcttctaaagcttccatggctgttctatgtttccgattggccaattgaccttgacttgccaaatctccatccggccatcaaatacccgatcttttgctcgttgaaaaggtacctctcgccgttctagcgtcgcccctgacaccaaaatgctcttcagaaccgccgcgacgcgcctggccccggccgtccgccatcccaacgcctgcatcgctatcgccctccgtccgtacagcgatgccacggccccagcacctcccctactccagaagctcaaggcggacctcaagacggccatgcgcgccaaagacgccgcccgcctctccgtgctgcgcgcagctctcgcctccaccctcaacgcctccaagaccgcatccccgatatccacggacgccgccctcgtcgcccttctccggaaacaagcccgcgcctgctccgacgcacgcgctgagttcgccgctgccggtcgcgacgacctcgcccagaaggaagacgcgcaggtcactatcctggacgagtatgtcgccggcagtggcgtcgaggagctcgaacccgagaagctgcgtgccattgtgcaggaagcagtcacaagccaggctggcgctaggatgggcgaggttatgaagactcttctcgcgcctggcggaccgctggacggcaagaatgtggagaaggccgagctggcacgccttgttaaggagctcacatcataattgagaagcgtatacgataatggagagagtgggcaagatcaagacggaagaaattcttgacgccgggcgtgtggattagagagttgtacgatttgcagcgatcagaatttgtacaaaaggtggtgtataaaaatacttataattttcaagcatgccgagcaatggctggatagaaatgggctacatcatatggaagatggacgttgagcttcagtgatcaggcacctacgagggcttattcagacaacctatcgcagtagtcaaccaacttgagctgtatcgaggtgtatctagcaaatatctgccgcacgcctaggaaaggctggtacgtcgtgaatacagtcgcggaaggcgctatcagcattgaatgcttatcatgtgacccaaaccatcgattcgctcagcattgaagtacataaagtcgattaactcaagaagctagcaccattggacacaaaggccagtgccatggtagctcagtgggaatgacctctgatgcttaatgtaaaggtcgactgttcgagcccggtgctaagagtggaaaaaaattaatttgtcaaaaaaaaaaaaaagaaaagaaaaacaaagtgggcagcacgcaacaaatagacgaacagcgaccgccctcaccaagggtcgaaagaagccatataagaaactcgccataagacaagctcaactctaggataattggaggggggactacggtcctcgggtcagaggagggcctccaaactacttttttc

SEQ ID NO: 8013 - DNA, 915 bp, Muscodor strobelii
  misc_feature: SGI cDNA ID NO. 562447
  misc_feature: Encodes the peptide sequence at SEQ ID NO 8014
atgcggataccgaagaactcagcgaggaggtccaagagactttcctcttacacaatcgaactttccaacgatatgctgttagcaacaacatatatttcgcgcctgttgacgaagacgaaaccattcgactgcgtattcaacatctggttctgtctatgctttttgaccaaaggaccatatttccgcccatcactgcgccaagacgagtgctggactgtggcttcggaacaggagagtgggcccttcaagttgcctggcaacatcctaggtgcgaggtacgtgcgaggcatagatataacaccccaccaccacaatcccgaagagagcctggaaaatttgtacctcgatatcgacgacctcaacatgcctttccagtttccatccaatcatttcgacctcgttaatagcagattagtagcaggtgggctgaatagtgatcgatggacaggatattttcgagatatattcaaatgccttagacctggtggttgggtgcaaatggtcgagatcgatcttaacgcacagtcagataatggagctctggccgataactctgccctccggcagtggtcacaaacgtatctctatgccatggaacagtgcaaaaaccctagggctccacggcgacttggtaattggcttcggagtgccggctttacagacgtggatgagaggatgataccactacccatgtgcgggtggtcggaaaaccagagagaatatgacataggcagctcgaaccaggagaacgttcgaatgctgctctcgtctctggcgctgtatcctttcaccaactacctcgatatgacgataacggagtttcatgttcttgtcgcacaagcaagggccgaggctgccaatccggcactgaaggtaagttgcatccttctccgtacaattctccgactcggctaa

SEQ ID NO: 8014 - protein, 304 aa, Muscodor strobelii
  misc_feature: SGI Peptide ID NO. 562447
  misc_feature (94)..(293): NCBI GI: 256727433 Blast Desc: NECHADRAFT_32990 [Nectria haematococca mpVI 77-13-4]
  misc_feature (94)..(292): NCBI GI: 171688594 Blast Desc: protein product [Podospora anserina] gi|170944259|emb|CAP70369.1| protein product [Podospora anserina]
  misc_feature (94)..(292): NCBI GI: 212543803 Blast Desc: conserved [Penicillium marneffei ATCC 18224] gi|210066963|gb|EEA21056.1| conserved [Penicillium marneffei ATCC 18224]
  misc_feature (94)..(291): NCBI GI: 242787813 Blast Desc: conserved [Talaromyces stipitatus ATCC 10500] gi|218721239|gb|EED20658.1| conserved [Talaromyces stipitatus ATCC 10500]
  misc_feature (94)..(300): NCBI GI: 225559136 Blast Desc: conserved [Ajellomyces capsulatus G186AR]
  misc_feature (105)..(292): NCBI GI: 238496405 Blast Desc: UMTA methyltransferase family protein [Aspergillus flavus NRRL3357] gi|220694318|gb|EED50662.1| UMTA methyltransferase family protein [Aspergillus flavus NRRL3357]
  misc_feature (94)..(302): NCBI GI: 119178766 Blast Desc: CIMG_08185 [Coccidioides immitis RS]
  misc_feature (106)..(291): NCBI GI: 226291670 Blast Desc: conserved [Paracoccidioides brasiliensis Pb18]
  misc_feature (106)..(292): NCBI GI: 226286204 Blast Desc: conserved [Paracoccidioides brasiliensis Pb01]
  misc_feature (94)..(291): NCBI GI: 238839754 Blast Desc: conserved [Microsporum canis CBS 113480]
MRIPKNSARRSKRLSSYTIELSNDMLLATTYISRLLTKTKPFDCVFNIWFCLCFLTKGPYFRPSLRQDECWTVASEQESGPFKLPGNILGARYVRGIDITPHHHNPEESLENLYLDIDDLNMPFQFPSNHFDLVNSRLVAGGLNSDRWTGYFRDIFKCLRPGGWVQMVEIDLNAQSDNGALADNSALRQWSQTYLYAMEQCKNPRAPRRLGNWLRSAGFTDVDERMIPLPMCGWSENQREYDIGSSNQENVRMLLSSLALYPFTNYLDMTITEFHVLVAQARAEAANPALKVSCILLRTILRLG

SEQ ID NO: 8015 - DNA, 4580 bp, Muscodor strobelii
  misc_feature: SGI EST ID NO. CUFF.19690.2
  misc_feature: Variant of the nucleotide sequence at SEQ ID NO 8013
aataagtagatttggtaccttggatgaagacaagacttcggccgtggcgcgtggattggctcgaaacgagggatctcgtccagtccatagtggcatttcaaatggtggacataataagcctttcctagcctggtccaaacacgatcacttatttcggtgcttatctaaatacgtgcaaaacgcgtgcattcagagctcctctcacatacagtttccttttaatacagtagtggtggcagtaggtggtaatacagtactggtccaaacacgatccaacgtgcaatgttttatcttcgcaactctagtcaatttcggtcagaggactggcgtgcatagatctacgagtacacgtgtacttctagattggcaccccctgtggctgttggtgcgttctggtgccttgggatatccatgacatcgaccgccttaaattcgaaccgcatgcacaatcgcatgtctcgcctgtctatccgacagcccatctccacaatggcggcccgcttgatcacgagcttcctttagctgggacttttgcggactaaccatgacaaaaactctttagttctttagcacccatagagctctggccgaattctcgaattctccatgtcggaaacgatacaccatctatgtaaatacccgtatgcttcctacagggatcatgcttagggccgttgacgcgaaattgtgcgttcttgggaattggggcacccattgttagaacagcatgcacaagctcgccagcctgttgcacacgacaataccatgcccgagacggtgtagcggtgaactgaggtgttgatgacctggcagcccactaatgagaaaataaggggcacgaggatcgcgacatctcaccatgagtccagcagctcaacatcttggtggactcaagggtctatcggcctgatcggactgctccgttcatgcatgaatgactatcctacactgggcaaaacgcaagggtggctcaatatacccaatattgtttgggctcccattatgagcctctcgatatatagcacggttagtattgtcggtttgggatagtctcacttgtctcgatctgtcatcattgcggtcttcaagtaggtctcacaataggccgccgcctggcctcgtgacaagctggaaagtagtaacttcttcgtggacattatgcaatacctccaacatgtctgttccatcactggctcgtgcgcaccttctcggccgggtcgtcgcaccgaatcgttcttggggaggtttcgattgctgtaggaaggaaattcagcggagacccgaggaaatgggcccggcattgttagttccacgtccctgggtgtggaacagataatatgtagtgtcaatcgtaccaaattccctctgtacatactaaaggcgttagttgcgactcggcagtaccattggcttgggttctccagtactgctgttgtgcgccactcgggacattttgttggcgggagccatcagcccacagtgtcgagttcgtgcctcccttgtcctccgtccatgggttgacgccaggctgttccatgtttctccgctcttgtgtcgctgggtcatgggtgctcatcagcccgttgaatgctacctgcagtgtggtatgggtgggtagacagcgagcgatacagagggagcagcctagtcctacagtttcccgcgtcataaacgttcctctagccgttacgggtggtctcttgaccgtatcggccgcataacgaggccataaattactacccaatcgcggcagggtttatgtgcagtgttgaaaccagtcttagtattttgaacagctaagtgtgtattccatgcggagaaatgtaacgagacgtggtacctctagaccgtggcggtttcttctagagccagcagaacgattgtggcgggtgggatatattctgcacctaggccatcgtggtatctccaatatgtgatgcagtagcccgcagtgattatgacgatggaaagtggttccctttcgtcctggatttttccctggatttttaaccgggcaagcaatgtcgatgacgggtggagcaggacgagtgttttcgataagcatatttgtgcgtaaatgtagtacccgatcgactgcgtaccaccagtatcgtgaatgcgaggtttgcggatggatgctagataaccaatttggtggtggtttgcttcaaagtcaatatacctcagctccacatagtcagtgactgtaggcagtaccaccttggtcatgttaacggtcagggacagagcgatatcgtatttaatttcggaaatcaccctggtggctcccaatctaagatgagtaaggtccccagggtcttaaagctgttagacaattgaacgacagcatgaagcacacgagtgctcggtttctatactcgggagaagcagttactcttgctcacaactgatcggaaccaacagattactttgaccccgttgataaataacaggcttacccagaacccgttttcgaaggccgaagtgacctcggacaatggccgagtatatgtccttagcttcagaagacaagttactgccctgctaatccaccattagccatgcggataccgaagaactcagcgaggaggtccaagagactttcctcttacacaatcgaactttccaacgatatgctgttagcaacaacatatatttcgcgcctgttgacgaagtacgctatgtctgatagtctttgacagctcgcaagttagaagcgccgtactgacttgcaggaacctatcaggacgaaaccattcgactgcgtattcaacatctggttctgtctatgctttttgaccaaaggaccatatttccgcccatcactgcgccaagacgagtgctggactgtggcttcggaacaggagaggttagatcaccctctgccgtcaaacgcgacccaatctcacagctagaaaactcgtcgaaggatttgggcgggtcagcatccattatcagggatgcagaccagtacctgcaaattccaatgcgcacgcgttctcgatactgacgattgtagtagtgggcccttcaagttgcctggcaacatcctaggtgcgaggtacgtatgacatataatttctttgccgttgtactatgatcatgtccgtgtcgtccatgtctttcctttcaggatatttaaggagatacaagcagcggccagctatcacttgtcctcaaatcatctccctggcctaaccgttagaaggtgaaatggaacaggaagacttggtgatacgaaagactgcatcatattcgatgaagctcgtcccagtgtcgactttctcggccagactgattttctgctcgtgaacgtgtgtccttagctaaccgaaaggctcgtaggtgcgaggcatagatataacaccccaccaccacaatcccgaagagagcctggaaaatttgtacctcgatatcgacgacctcaacatgccgtaagattcgacttgcccgaaacatcgttgatcgcgcctgacgtgccgctagtttccagtttccatccaatcatttcgacctcgttaatagcagattagtagcaggtgggctgaatagtgatcgatggacaggatattttcgagatatattcaaatgccttagacctggtggttgggtgcaaatggtcgagatcgatcttaacgcacagtcagataatggagctctggccgataactctgccctccggcagtggtcacaaacgtatctctatgccatggaacagtgcaaaaaccctagggctccacggcgacttggtaattggcttcggagtgccggctttacagacgtggatgagaggatgataccactacccatgtgcgggtggtcggaaagtgagatactagcctatctacagttgagatggaactaacaagtctttatcgcagaccagagagaatatgacataggcagctcgaaccaggagaacgttcgaatgctgctctcgtctctggcgctgtatcctttcaccaactacctcgagtaggttgtcggatgaagagtcacctatgagagggacggcagggctgacaattgctctgtagtatgacgataacggagtttcatgttcttgtcgcacaagcaagggccgaggctgccaatccggcactgaaggtaagttgcatccttctccgtacaattctccgactcggctaaggagaacgggatactcatcagccgtattttccactgtgagtgagcgcgtgcctgtcttgagctctacttgttgcgactatcatgtttctgacggggtggacaagatatgtctgtgttgggaagaagccccgccggtaaccttcgagatcgagttacgacgtcctcaccacatatctctacctactttcacatgtgccaagtcggtagtacgttgtccaagtcggcggacactaggagcatcagactggaatgtgcgttgcttgggatattagacagggtgttgggctgcatgaataatgcaactaggcaaaacgaggtgccggcaacgcacagtaagcgggctgcattcaagttgccaccatctcgctgcttcaggggctgcgactgctcgtgttgaaggaacactttgttcaaagtgacggacagagagc

SEQ ID NO: 8016 - DNA, 210 bp, Muscodor strobelii
  misc_feature: SGI cDNA ID NO. 562448
  misc_feature: Encodes the peptide sequence at SEQ ID NO 8017
atggaacagcctggcgtcaacccatggacggaggacaagggaggcacgaactcgacactgtgggctgatggctcccgccaacaaaatgtcccgagtggcgcacaacagcagtactggagaacccaagccaatggtactgccgagtcgcaactaacgcctttaggacgtggaactaacaatgccgggcccatttcctcgggtctccgctga

SEQ ID NO: 8017 - protein, 69 aa, Muscodor strobelii
  misc_feature: SGI Peptide ID NO. 562448
MEQPGVNPWTEDKGGTNSTLWADGSRQQNVPSGAQQQYWRTQANGTAESQLTPLGRGTNNAGPISSGLR

SEQ ID NO: 8018 - DNA, 2313 bp, Muscodor strobelii
  misc_feature: SGI cDNA ID NO. 562449
  misc_feature: Reduced expression when VOC is produced
  misc_feature: Encodes the peptide sequence at SEQ ID NO 8019
atgccgcgcaaccgacccgcaacgacaggctacgagcgcctcgctcaggccgaccagttcagcgatgagtccgacgacgacgtcctagcccagagctctacctcgctccaaccacagtccgctcctcgattcgctcccatcacacagccccgcccgcactcgggcatgacctctcccaaggccctgcacaaccacaaacaacgtccgagacggcataggagcaactcgggcgtcgatttgaaggccatcaatgcacgcctcgagcgctgggccgacgagattgcctccaagttcaagcgcgccaaggggaagcgccacggcgacgatgagcggcccgagatacactacagcgtcttccacccgcccgagggcgtccggtcagccacgctcgagacgcttgccgctatgcctgggcccgccatgtccaagtcccagttcgatcaagtcgtgaacagtgtgagggttgccatcgaccagggcatgcatcccagcatgattacccagggaagctctgggagctacttcgcacgcaacacagatggcaaaattgttggcgtgttcaagcctaaagacgaggagccctacgcagccggcaatcctaaatggaacaaatggattcaccggaatctgttcccttgcttcttcgggcgggcatgtctcatcccgaatctttcctacgttagtgaggcagcagcctatactctggattgtcaactccgaactaacatggtgccgtacactgatgtcgtgtggctttcctcaaaatctttccactacccctattgggatcgtcggagcttctataggaagaagaagcctctccctgccaaacctggtagctttcaagtttttcttaagggattcaaagacgccaatatatttctcagggagaatccctggccagatcagtactggtctggatttcggacaactgatatgcatcgaaacaaacgcaagcgatgggcagataactgtcggccagccaaccgtcaagattttgacgagtacgagagtgatgaagaaagcaatgttgcgcagcaaagaccacttgggccggacaactttatgtggaccgagactctgaaacaatcgttccgcgaagagctggagaagcttgttatacttgattacattatgcgaaacacagaccggggcctcgataattggatggtaaaggtggattgggagacacaggcagtctcaatcgcctccgagccgcctcaactgaatatggatctcttggacgaggaagttgagcaagcaccaagacctgtggacttgacccagcgtagttactccagtagcgctccgtctcatccctatgaggctcagaagcctatgaatgcaggccagtctagcaccagtcctcatcccaccatatcaataggagcaatagataactcgctatcctggccatggaagcatcccgatgcatggcgaagtttcccgtttggttggctcttcttgccggtcgacttgatcggtcggccgttctctcagaaaacacgtgaccattttcttccgttgctgacatctacccagtggtggagccaaacttgccatgagctacggaaggttttccaacttgacccagacttccaggaaaagatgttctcccgtcaaatggcggtcatgaagggacaggcctggaacgtagttgagaccctgaagacaccagatcatgggcctttggaactcactcgtcgagctcgtgtctgcgtgtgggacgatttggtggacgtccctgttgcggtccctatgagaccatcttcagagattcgacgtcctactgaacccgcacttcgcgattctattcaagaggagatggacatcggtgccatcgtttcttccggcgggcctaatagcaatggtggagacctccttggtgtatctgtaccccttccaaatccgggtcgctttgagttagctactagcccgagagcacaatcaccggaagcgcgcgagaacggttcgacgcacgaagaaaatggcgataacctcaaatcccgcccatccatgcacggagggcctagatctagctaccaaggccccttgcgatctgactctcatgcgtcctcatcaccaaaatatcgtcgcttctcatatgccacggcccggcggcacagcaatacaatcgcccagcaaatgtatactcagccaagccgttacagttatgatgcagatgcagaggatgatattgacggcgatctgggatatgccgctgcagagggcatggaaagcaacaggcgcaaagtcattgtggaacgtttagagaccgtcaaagcgaagaatccggtgtttacatggtgttag

SEQ ID NO: 8019 - protein, 770 aa, Muscodor strobelii
  misc_feature: SGI Peptide ID NO. 562449
  misc_feature (169)..(560): Pfam Id: PF00454 Pfam Desc: Phosphatidylinositol 3- and 4-kinase
  misc_feature (1)..(770): NCBI GI: 85075819 Blast Desc: NCU04355 [Neurospora crassa OR74A] gi|28916847|gb|EAA26591.1| NCU04355 [Neurospora crassa OR74A]
  misc_feature (1)..(768): NCBI GI: 171688600 Blast Desc: protein product [Podospora anserina] gi|170944262|emb|CAP70372.1| protein product [Podospora anserina]
  misc_feature (5)..(770): NCBI GI: 116196392 Blast Desc: CHGG_04794 [Chaetomium globosum CBS 148.51] gi|88180707|gb|EAQ88175.1| CHGG_04794 [Chaetomium globosum CBS 148.51]
  misc_feature (1)..(770): NCBI GI: 156062444 Blast Desc: SS1G_01338 [Sclerotinia sclerotiorum 1980] gi|154696674|gb|EDN96412.1| SS1G_01338 [Sclerotinia sclerotiorum 1980]
  misc_feature (5)..(770): NCBI GI: 240278275 Blast Desc: phosphatidylinositol 4-kinase [Ajellomyces capsulatus H143]
  misc_feature (5)..(770): NCBI GI: 225557593 Blast Desc: phosphatidylinositol 4-kinase [Ajellomyces capsulatus G186AR]
  misc_feature (3)..(770): NCBI GI: 261199414 Blast Desc: phosphatidylinositol 4-kinase type II subunit alpha [Ajellomyces dermatitidis SLH14081] gi|239594316|gb|EEQ76897.1| phosphatidylinositol 4-kinase type II subunit alpha [Ajellomyces
  misc_feature (3)..(770): NCBI GI: 240111017 Blast Desc: Phosphatidylinositol 3- and 4-kinase family protein [Coccidioides posadasii C735 delta SOWgp]
  misc_feature (3)..(770): NCBI GI: 225684823 Blast Desc: phosphatidylinositol 4-kinase type 2-alpha [Paracoccidioides brasiliensis Pb03]
  misc_feature (3)..(770): NCBI GI: 226286602 Blast Desc: phosphatidylinositol 4-kinase LSB6 [Paracoccidioides brasiliensis Pb18]
  misc_feature (101)..(586): SWISSPROT Homolog: EC 2.7.1.67 1-phosphatidylinositol 4-kinase
  misc_feature: Useful for introducing or modulating the production of volatile compounds
MPRNRPATTGYERLAQADQFSDESDDDVLAQSSTSLQPQSAPRFAPITQPRPHSGMTSPKALHNHKQRPRRHRSNSGVDLKAINARLERWADEIASKFKRAKGKRHGDDERPEIHYSVFHPPEGVRSATLETLAAMPGPAMSKSQFDQVVNSVRVAIDQGMHPSMITQGSSGSYFARNTDGKIVGVFKPKDEEPYAAGNPKWNKWIHRNLFPCFFGRACLIPNLSYVSEAAAYTLDCQLRTNMVPYTDVVWLSSKSFHYPYWDRRSFYRKKKPLPAKPGSFQVFLKGFKDANIFLRENPWPDQYWSGFRTTDMHRNKRKRWADNCRPANRQDFDEYESDEESNVAQQRPLGPDNFMWTETLKQSFREELEKLVILDYIMRNTDRGLDNWMVKVDWETQAVSIASEPPQLNMDLLDEEVEQAPRPVDLTQRSYSSSAPSHPYEAQKPMNAGQSSTSPHPTISIGAIDNSLSWPWKHPDAWRSFPFGWLFLPVDLIGRPFSQKTRDHFLPLLTSTQWWSQTCHELRKVFQLDPDFQEKMFSRQMAVMKGQAWNVVETLKTPDHGPLELTRRARVCVWDDLVDVPVAVPMRPSSEIRRPTEPALRDSIQEEMDIGAIVSSGGPNSNGGDLLGVSVPLPNPGRFELATSPRAQSPEARENGSTHEENGDNLKSRPSMHGGPRSSYQGPLRSDSHASSSPKYRRFSYATARRHSNTIAQQMYTQPSRYSYDADAEDDIDGDLGYAAAEGMESNRRKVIVERLETVKAKNPVFTWC

SEQ ID NO: 8020 - DNA, 4063 bp, Muscodor strobelii
  misc_feature: SGI EST ID NO. CUFF.19703.0
  misc_feature: Variant of the nucleotide sequence at SEQ ID NO 8018
attaaactctctctcacgcctgtggcatctggggtatccacttagactgtagcctgacatgttagcactggaggaccagcctagctcaagccgttaccaacacgtcagactgccatcaatgctgcgtcacatcttcaccactttggacctctcactacagcggcgcctttgctcatcccacttcttcgtagaccgtctctacccccattgctaccggtagattaggtttgccagcccctaaattattctgtcctggtaattgcatacgcctcgtacctcggtttggaggcgcaagtatctgtgacaacgcgctcatcgacgcgcgctgcagcggttcgtgcttctagcagaatgcgaatgccatgagccgaatttaccgaaagcaaaccctcggtctgcttgctcaactttccggagtttgaccttcctccattgccatgccgcgcaaccgacccgcaacgacaggctacgagcgcctcgctcaggccgaccagttcagcgatgagtccgacgacgacgtcctagcccagagctctacctcgctccaaccacagtccgctcctcgattcgctcccatcacacagccccgcccgcactcgggcatgacctctcccaaggccctgcacaaccacaaacaacgtccgagacggcataggagcaactcgggcgtcgatttgaaggccatcaatgcacgcctcgagcgctgggccgacgagattgcctccaagttcaagcgcgccaaggggaagcgccacggcgacgatgagcggcccgagatacactacagcgtcttccacccgcccgagggcgtccggtcagccacgctcgagacgcttgccgctatgcctgggcccgccatgtccaagtcccagttcgatcaagtcgtgaacagtgtgagggttgccatcgaccagggcatgcatcccagcatgattacccagggaagctctgggagctacttcgcacgcaacacagatggcaaaattgttggcgtgttcaagcctaaagacgaggagccctacgcagccggcaatcctaaatggaacaaatggattcaccggaatctgttcccttgcttcttcgggcgggcatgtctcatcccgaatctttcctacgttagtgaggcagcagcctatactctggattgtcaactccgaactaacatggtgccgtacactgatgtcgtgtggctttcctcaaaatctttccactacccctattgggatcgtcggagcttctataggaagaagaagcctctccctgccaaacctggtagctttcaagtttttcttaagggattcaaagacgccaatatatttctcagggagaatccctggccagatcagtactggtctggatttcggacaactgatatgcatcgaaacaaacgcaagcgatgggcagataactgtcggccagccaaccgtcaagattttgacgagtacgagagtgatgaagaaagcaatgttgcgcagcaaagaccacttgggccggacaactttatgtggaccgagactctgaaacaatcgttccgcgaagagctggagaagcttgttatacttgattacattatgcgaaacacagaccggggcctcgataattggatggtaaaggtggattgggagacacaggcagtctcaatcgcctccgagccgcctcaactgaatatggatctcttggacgaggaagttgagcaagcaccaagacctgtggacttgacccagcgtagttactccagtagcgctccgtctcatccctatgaggctcagaagcctatgaatgcaggccagtctagcaccagtcctcatcccaccatatcaataggagcaatagataactcgctatcctggccatggaagcatcccgatgcatggcgaagtttcccgtttggttggctcttcttgccggtcgacttgatcggtcggccgttctctcagaaaacacgtgaccattttcttccgttgctgacatctacccagtggtggagccaaacttgccatgagctacggaaggttttccaacttgacccagacttccaggaaaagatgttctcccgtcaaatggcggtcatgaagggacaggcctggaacgtagttgagaccctgaagacaccagatcatgggcctttggaactcactcgtcgagctcgtgtctgcgtgtgggacgatttggtggacgtccctgttgcggtccctatgagaccatcttcagagattcgacgtcctactgaacccgcacttcgcgattctattcaagaggagatggacatcggtgccatcgtttcttccggcgggcctaatagcaatggtggagacctccttggtgtatctgtaccccttccaaatccgggtcgctttgagttagctactagcccgagagcacaatcaccggaagcgcgcgagaacggttcgacgcacgaagaaaatggcgataacctcaaatcccgcccatccatgcacggagggcctagatctagctaccaaggccccttgcgatctgactctcatgcgtcctcatcaccaaaatatcgtcgcttctcatatgccacggcccggcggcacagcaatacaatcgcccagcaaatgtatactcagccaagccgttacagttatgatgcagatgcagaggatgatattgacggcgatctgggatatgccgctgcagagggcatggaaagcaacaggcgcaaagtcattgtggaacgtttagagaccgtcaaagcgaagaatccggtgtttacatggtgttagattactcttcttgttggtattattaacttttgcttcaagcacagctcgaagcctgtaacacttcagtaccggccagatccgccgcgttgggtttcttaaggcggaacatttccgtctcgacgcttcctcatttactggtccattagggaggatagaatagacactgcatgggatagaggagacatggcgcattcactgtactacaggacaaatggataaaacggctcggttcgcgccgtcttgcattgtgtcccaatgcaaagaccagattcgatgacatggtggttcgatgttcatatttgagtggtgtactagaatgaactagaagaactaatacagcaagtatatgttgaccatcatgatcgtcgaatgtgtttcctttcaactaccgcgattcgcgtgtacgagttatgtacacgtacgaataagtgcgtctgatataggaccccagtcttaggacctggccacgcctggttgcgacctccggattatggaaccgagctgccggatcagaacagagtaggttaccaaagccggtcgccggtgagcttaacatatccggaatccttcccggtaggtacatgaggcaccatcccacgagatacgttttgataactacgattatgcatccatgtggacccaaatctttcggcgggggttttgggcagcaacctcctcttctgatttccctggctccggccagatccgagtcccaacaagctggacgctggacataggtcatcatgaaacaaccatacactcggaaactgatgtaggagagcacaccaattgcgtaagtgccgcatattatattgaaatcaggtccgctgtcagattcagaggagacaaggcactatagccacgttgttggacagttgttaagaaccaccttgagcaatgggtagacggccagtggtcataagataggcaaggtgtgataaagccggcatgtaaccgcaggtaaacatgtcgacttgcagcgaatttcgccagctccgttcagtatcgcatcccaaacttggggtaccatttcgccaaggttcgaggttgcacggatacggcgagacacggctaatgattttcaagagagggtgtagatctcccttggggtaaaaagaacatgacattccaaagcttgggatgggagtataagttccatgccgtagtgctagcgaagctgcagcatgcagcatcagttgggtacacggaggaaaagaaatcttggtcaaatagcgagagaactcagaatgacacgtcaacttcgcccctgcaaagatggaaaagtcctttccaaagtgggatacgcacattgt

SEQ ID NO: 8021 - DNA, 492 bp, Muscodor strobelii
  misc_feature: SGI cDNA ID NO. 562450
  misc_feature: Encodes the peptide sequence at SEQ ID NO 8022
atggcccgagcaacattgaagcatatttcctctctggtgctgctactctcgctcttctcgctcgccagcagcgcagcggtcgaatttcgcacggttttagcaccaagacagagcccagccgccactctccctcaaaactccgtgacctgcgcggattacagccgagctgccaacctgtcgacgatcaacacgaactcgacgctacgagctgcgttcctacgatcaacccatgagggtttcaatgccgcgtctaatctgctcaacgccgaaacaaccaagttgatgtctttcatgttcaacgtaaacctaaatcaacagtgcagcaacttgagcgcactcgccgtcgctgaggctgatgctaatttcacggcgggcactgttgctgggcttaagattcagacagcgcctggtgttgcccccggcgatctcacactcccggtcctctgcgttttgtttattctcttgatgggtggagcaggaatgtcgctttga

SEQ ID NO: 8022 - protein, 163 aa, Muscodor strobelii
  misc_feature: SGI Peptide ID NO. 562450
  misc_feature (9)..(152): NCBI GI: 169621400 Blast Desc: SNOG_13909 [Phaeosphaeria nodorum SN15] gi|111057414|gb|EAT78534.1| SNOG_13909 [Phaeosphaeria nodorum SN15]
  misc_feature (18)..(158): NCBI GI: 261359116 Blast Desc: conserved [Verticillium albo-atrum VaMs.102]
  misc_feature (44)..(155): NCBI GI: 189206427 Blast Desc: conserved [Pyrenophora tritici-repentis Pt-1C-BFP] gi|187975641|gb|EDU42267.1| conserved [Pyrenophora tritici-repentis Pt-1C-BFP]
MARATLKHISSLVLLLSLFSLASSAAVEFRTVLAPRQSPAATLPQNSVTCADYSRAANLSTINTNSTLRAAFLRSTHEGFNAASNLLNAETTKLMSFMFNVNLNQQCSNLSALAVAEADANFTAGTVAGLKIQTAPGVAPGDLTLPVLCVLFILLMGGAGMSL

SEQ ID NO: 8023 - DNA, 9916 bp, Muscodor strobelii
  misc_feature: SGI EST ID NO. CUFF.19826.0
  misc_feature: Variant of the nucleotide sequence at SEQ ID NO 8021
atgctgcttacaacgagatctgcgatcaaaacataggactcgtagtggaagactttgagttgtcacgctatgtcacacacagtgaatattttacaatatcacgtctattggtatctgactacttcgagccgagtctatctacctgtgaggaagcagaatgccttgaaaccgaatagaactccactggttagaacagtccgggggcgattgaagaaagtagagagatatggcgagcgtggtgaatctataccattggatcatctaagtgtcgttcttcaaacgaaaagacaacaactcatggccatcgtctgttccacccgagcccatttccgcaaggggtgaggaacgatgttgaataccgcattgcagtcgcgtaaagcattccagagggcggacacgagagctcaaagagtagcatgtcatctatatgcgtcttggtagagccttgtcctcaatgcatataatcgtcatcccatgacgcctcgcaaacccttatatcccagttcgtgaaattggccggacccaatccaaccacacaagcaatgcagactcctctgacgccgtgaaatgcctgagcagagcggcggttactctctgtagccgattccgaaacgccgcgcaccatgtgagataggatgaacgaatgaaaagaaacaaagcaagcaccgtagtgccgataaatccgggcaaaggaagagagccgatgctcgtaataccgagctcatctgaaaagatcacgaagatctagtagcttctgtttagcggcttcttgcttgtctataacacggctcctatccatgctaagacttgcaagcttcttcttcttgtcttggagctctagcattttctcctcgatgctctcgcgcataatgtagcgaacggtacgaacgggtctcttttggccaagtcggtgaactcgatccacagcctgagcttcagctgccgggttgtactgcggttccattacgtagacgctgtttcctgccgtaagattgagacccaagcctccggccgatatggaaacaagtatgacgtctatctcggggttatcccggaattcgttcatagctgtgcttcgcgccactcgagtcatctttccgtctaaacgcgtaaagcgaatgccagcattacccagcgcaatctcaatgaggtcgagatgcgacgtccaggcagaaaatacaacggatttgaagcgcggttcggaggggttggcctcactctcagcctgagatttcttgagatcttccaagagagcaagtgtcttggtatggggaccggtatagcccgtgtacccatccttggatcgatcttttgtatctggtttgactgaacgactgccttcgtgttctaccgcgagcttgctcttacggatctcgctgcactcaaatttgatataagaaccgcaaaaggcgcagtcacccgagtctctatctcgagcttcctgtttccaggcgccaatgcaggaagaacacagaaggtgaaagcagatcgtcatgtaaccgacgacatcctcatctcgctccgattctggatctgaggcatcatttgcaccgatgatgttttggcatgaaaagcacttatcattgccggtctcctgcatcagcccgaatgcctcatatgctcttgattcggtgatcacggccttattggcctcgtcgtcctcgtcctccagatcgattggctgatcagaagtcatgccttgcaccatttctaaatctgcatcgttgaggaggtctttgccatgagctgaaatcagacgaagccttaagatggattgaagaatatgaatataagtcttgcctcctatcatacgctctttaccgggtgcagttagaaccgtaactttatcctgggcgttcttctcaaaagccgaatacagcttgcgttcggttggcgagaagtccagcttgatgagttgatcggtcctaggaggcaagttaatcttgtctttaagacgtcgaagcgtaacgctatcaacaagcactcgaagcttgggaacaatttccggatcgcagaccttgaacggagttgtgatgaactgggtaaatttacccctttcatcaaatggtttgagacgcaggaatgctagaagagctgcgaggtcatctagcttgttctggaccggagttcctgtcaccgcccatcgccggttggcttgcaaacggcagatggatttgaacatcaaggtgttctgttcgcggatctgatgtgcttcgtcaagaactatgcgaaaccagcctacttcctccagagggtaagggccatgtctacccttactgcgccccgacacctcgctagccacggagccatatgtggtcatgacaatgtcgtatcgggcgaggacagcagggtcgcggattcggttggatccgtggtagatgtaatatgtcatttgcccaggtttgatgtgtgttttgatctggtcctcccaattacttatggtactaagtggacataccagaagagtagctttcccattatgccggagctttgtcaaagggagtgggggagcggtgggcacctggaaccgccttgatgactctgtgctcttcttaggaacagctttcggttgagtaggcggcagcctgaaccacacttccgcgtcatccatcgtcgaagctacaagggacagaatgctgagtgttttgcccaggcccatcatgtcagcgagaatgccaccgaacgtctcctccggcgcttcgcgctgtgtggcacccgtgatgacgtttttgtaacatttctcgccacgcggattgagctggacctgccagaatgaatctgccgtcttaccgtgtagctcaagctgtcgtggttgctcccttttggtcatgaaaaacaaaccctgcttctgatgccggagcaactcagtttgtactcgtccgttggggttcatctcgggaaggtcctcgctttttgtgagagaatcgaaaacacccataacctcagaacgaatctcctctaccgaccgcacgggttgccaagactgcgcggcctgcggcggccgttctttcagagcaggcggtggcggcgctctcgggccttcaatgtcctgtgggttttcgtacggtttatttgcttcttggaggaatggccttctgagccaaacgcccttctgtgaaagatactttccgatagccctgccatttcttcgaggaccgtagagaaccaggtctagaggataggcaatagatatagcattgccaacctcctctcccgccttcctaggacgagatgcgattctgcaagtggttcgtacatccaagcggggagcatcaaggatgggcgcaaggcctctgctggtatgggggtcgacgacacctacagttgtgcgagagcaatcatagacacgaatcgtggagtcctccttcgcggtgagtctcttcagaactaacttgactgctggccaccagcccggaccctgaatgttaatcgcgtccggtttgggcttcggcactatgtggcagtttactttcgcattctggatcatgccatagcagacctcaacgtcaccgggcggttggatctcgacgacgtcgctctcagtagctagtcagtgttagctgcttcggctattatccccagtatcctcgaagaaaaacctacatccatccgtcaaatccaccacagtctcgacatttccaactgtgttgttgttgctgttgatgggctcttcatctcgcctcttctctttgatgtggtgtgcaatgataccagttccgccacgtgcttgcaagggctgtgtgtctgtactggcctcggtatctaattttcggcgcttggctgaggggggagcgtggctgcgctgctccaccttgttcatgcgctcgatcatgtgtccatagccactggacggcgtgttgtccggctgcgaggccggggagttaacgtattcactaccgggcgaagtgaagctgaaatcaagaggagtcgagttgccggagttattgaaaccattgtgcaggttgctatggctactggggagagtgtaggcgttggagccacgagggttgagaagagccgcagggttataggctgttggcgtggagggggcgggtacgttgggctgttgtccattgcgcaaagagcctatgaatgctgtatgtcagtgccagcgtggttggagggagaaaagtccgggttgaacataggagcaactaaaatataaaacagagctatagccagacaatgtggaaacaaagaacaggcctggttaagagaatctaaaataccttgggagtcggtgcttgtgtccatcttgccctgtcttcgccggagtggcaggcgacgggtgacaacagacggatatgcacttagcaggcaaggatggaggggcctttgtccgaaaaggcactcatagcaaaggagcccagcagtgaacaagtggatgtggtcgacgaccgtaagtagggtgtataggataagatgcgtgaggtgcgtaagatagggtcctggtggaaaagggtgggagcgaggtgaacaaagagacgaggcgccggctgctgttgtccactctatgtgcgtagataggcacgctctgtgagtgataccaccacgggcccaagccttggtcacgaaacagcaaggctgaagaaagacctcgagcgagggataaggcagggacgtttatggtgctcagcgctggcaggggtggtgggggaggggccagtatagtgtgcgatgagcgggaggtcacgatcgcaacgtggaatgcagtgcttaagtcatcgagtcgagttggttcgagtcggcggcagagctatgttcgagtcacgggatcacagttagttgcaactacattcgagatgcgcatgcgacgatggccgcttggatgtgagggttgcagttggagatgcggtggacgaggcagtcaaggtaggtacatgttagcctgcggaggggggcgaggggatgaggggagtccgcagataagacgaaaggaaagagaaacaagaactttggcatttaatgcagaggcgagcctgaggaagctgcgttgcgctcttgcacctgctgggccaacacaactaagggatggagagaaagagatatcgagccggagtcacagcagcaacgaggccgacaaggcgcagaaaaggttgacgtgagcgcatgcagttcccattgatgtgcatatgcaccattccccaccagtgccaccacgatagtcgactaacttcagagatccctatcgcgagcctgctgcttctggcattaatacatttaggtcccgcccagctctatatagctctcggtagagtgcaaaacaaagcaaccgtccagtgttgaaaatggtagtcgcgagtccatgacttccgaagagagcaaacaccctagcagacagcaaacttcttcctccaaacggcagccgcgagagatgcggtcgtccatcacaatcatcctcaacttcgcccatgccctctcttcattcacttgtggcccccaacgcgatgggattctcccgtggtctttcggaatgcaactcggatcaacctgctcgcctgcctgcaccacaaacagggctcgtacagggattccaatagtcatctgttgcttggcagagaaaagggagctagcccatggtggatcgcctccagcctgcctgcttgaaccgcctccagcttgttttgactctccacctgccccttcttcaccaacattcaaccataataacgcttttgcgatactattgcccaacccttgtgtgatgggagataaaggtggcagtgggctgtcactgtatcttcgttgcctcgggagatccagcctatcacaaactactccaagaggctacttttccaactactgggttataaatcctcaagtgtgctgcaaatacctactagaggagccaaatgttttgacttgtacatgtctctaactgaattgtcatatttttggtatatagacccgttgaattctttgcgtgtatacctacctaggaactattgaatggtttatgcgtaggctgttctacgtgggcctagtcatcgcaattacaatatcttgatactgatttcagagcaagataagaacttaatgaagagtacaagttattgatagcacagtgcttgtcgtggtgatagtgtgctatccgctagatgtgtgtgtgaatgtttactattagtcatcttatttgtatacgcagttctgcagaccttttgaaacgagccaatcgtagacagtttgtttctaaattctggctgtcagagcaatttgctacttcaccaccgagagctacatgtacgtcccatcgtcatgccactcacatgatctttgtcatgtgactattgaaaacatctaccctgtgcatttctaaacggccagtcttatcgccattcctgcctgtaatctccaggaatcgtgacatgcatgcctctattataatcgcaagtttcccttagcgacgatctgtttgagaatacttctaccacatatccaagtctggcgaagggatttcacgactacactctagccccggtagtagaaatggccgctcgcttggtcccttatgcagagaagtgttgcagaaagttctcaagcgcgtttgcgcctgattggctgcaatgatagtcatgtcccaaaacggctataaggggaaatgaaatgaaaaagaaatgggctatgatgatcatggatttctctctcatctatatatattctatcatctcatttctatgcacccaaagcatcgaaaacgatacaatgatcagttgacacgggacttctgaacgacgcaggtacgatctaatacgagctgaataagcaggggggtagcggcgtttagagctgggttggcgttccataataagagccatgcaacaaggggctgccgcacccccggcattccgtctgatcgctgcttcagaaaccaccatataggcatcgttagctgtaacaccattatcggaaaccggaatcagggtgcgctacgctgtagtttgagcctctcgaaacatcggctccagcagattttgcattgtatgagcctcagcttaccccggcctgtcgtctgactcccagacacacacatgccagggccaacctcaaatgacgctgagcggtaagtgagaaatgcagaggcaatatgtaggcttgtaggcatgttcttcgctttctggatctattctctctcttctctaccgcaaatctgtgctttcgtttctctttctcgacgtctttcgcttcgttcgattcttttctcttagttgggatcctttcattcatttcgtggcaggccacatattctttattttacaaacatctctcaccctgtgcagccccctcctattcgtataggaatcggaatcaataaacaggctttggccaagagaaagtagggattcaggaaatacaagaaagccgaagaaaaacgaagggagaaaacaccgacgactcaaaatggcccgagcaacattgaagcatatttcctctctggtgctgctactctcgctcttctcgctcgccagcagcgcagcggtcgaatttcgcacggttttagcaccaagacagagcccagccgccactctccctcaaaactccgtgacctgcgcggattacagccgagctgccaacctgtcgacgatcaacacgaactcgacgctacgagctgcgttcctacgatcaacccatgagggtttcaatgccgcgtctaatctgctcaacgccgaaacaaccaagttgatgtctttcatgttcaacgtaaacctaaatcaacagtgcagcaacttgagcgcactcgccgtcgctgaggctgatgctaatttcacggcgggcactgttgctgggcttaagattcagacagcgcctggtgttgcccccggcgatctcacactcccggtcctctgcgttttgtttattctcttgatgggtggagcaggaatgtcgctttgagtcaatgcataaaagccaataatctgggtgtactggatgccaacatatttctcggggcgaacacatggttcaggacctttagacagggagatatcgtatttctgttctgctaagcggtagtagaccggttatgagacaacatatcgtcgaattgaagatgtggcggacactgaggatgctgaggagctgagaaaattttgagtatattattaatatacttttttgtttatgtgtacacatgaagccaaccctcaagagaaaatcaaaggccatttgcaggactgcacaacgttacatgaagaggaattggtagatagtacaatcaacataatacacaacgccttgcaaattctcatgctactcgagtccccgctctgtatcgcccaacgccgagatatccgtatcaagatccaataatgctgacatttaaataaaacaatcagcatacaatgcactgaagaatggtgacaacatgctcatatctttgacaatcatgacatcagttagggatgctcagcgttattctcgatagccgatttttcatccaattgacgttggtaacgtgaagtcaacggtgtcatagccaacgccattcctttcgacaagcctccactgctgctgtgatgtaaatcaaaacccgggcctattttcacatttgtgtgggtacggctccggcttctcgttctctggcgtcggcgttttggtgattccaatatctggttatataacacgctgtagggcgagcgggacctagaaggcgactggctacgttgatggctaccggtaagctgcatcatacgcagaagttttcgtcgagaaggcgacaaggaagcagatttattgcggttattaccacgttggagccgccgctgtgaggttggtcgtgaatgggacatatccaaatatcgcgagctactacgataccgacatcgaccccgaaatgtagcggaatcagttgatgggatttgtgtcctgatgttatttgcttcgagtagatctcgacggcgtttgcgcccacgttgcagctcttcggatggtgggaatacgttgaagttgaggtccagtagacgctcgttcgccgtcacggaagacacggtcattttagagatagcaagagatcctgatgcgggaatgggagagccagtggtatcgtgtctggtctattgtagacgaggagcttgacgcattgaggatttgcgtcgggcaatgacaagcgatgattcagagtgcaaagatggtccctcctttaagctttaagagcgggtaatgtatgaacgtagccagggagagaacagtcccccttgtgatgattcaaacgactaaagaagccaagggaatgttgaagcgcacaggaagggataggagctagggatttataagccagggtgagacaagaatgggtcgaccacttctgagtcgtgatagtcatccaagcactttgcctttcacatcgacttgagaacagatagaggaacaggtgatgatcaacgtcgttttggctaggttgacgatatacctctttggttggcggcaggcatcgggttggcagacggcaagattatctaaacctatgctagtctgacgtgaactctacaagcggcccggcggaactctattctgcagtagctcccaatcgtctgattctatcctggaattaacatcaattaaatcctccgcgtatggggcgaccagggctattgagttggcaagcggtcatttcggaaggtgagtgtgagccggacagatcggaagctgtgatttagttgagattcagaagaagtgggcatctccatggcggcctagaagccgtttaatggtaggtgaggtgggaacacgcaagaaggatttccacgttttgcggtgaacgatggaggcctgttagttagcctgctcctacaatcatcaaccatcggtgatcgaatgcagataaggcaagctccggcttggttcccggcaacagctggcgatttttccagtttctctccggtgcatttggtgcacaacaccatgttcatgtttttcaagc

SEQ ID NO: 8024 - DNA, 3333 bp, Muscodor strobelii
  misc_feature: SGI cDNA ID NO. 562451
  misc_feature: Encodes the peptide sequence at SEQ ID NO 8025
atggacacaagcaccgactcccaaggctctttgcgcaatggacaacagcccaacgtacccgccccctccacgccaacagcctataaccctgcggctcttctcaaccctcgtggctccaacgcctacactctccccagtagccatagcaacctgcacaatggtttcaataactccggcaactcgactcctcttgatttcagcttcacttcgcccggtagtgaatacgttaactccccggcctcgcagccggacaacacgccgtccagtggctatggacacatgatcgagcgcatgaacaaggtggagcagcgcagccacgctcccccctcagccaagcgccgaaaattagataccgaggccagtacagacacacagcccttgcaagcacgtggcggaactggtatcattgcacaccacatcaaagagaagaggcgagatgaagagcccatcaacagcaacaacaacacagttggaaatgtcgagactgtggtggatttgacggatggatctactgagagcgacgtcgtcgagatccaaccgcccggtgacgttgaggtctgctatggcatgatccagaatgcgaaagtaaactgccacatagtgccgaagcccaaaccggacgcgattaacattcagggtccgggctggtggccagcagtcaagttagttctgaagagactcaccgcgaaggaggactccacgattcgtgtctatgattgctctcgcacaactgtaggtgtcgtcgacccccataccagcagaggccttgcgcccatccttgatgctccccgcttggatgtacgaaccacttgcagaatcgcatctcgtcctaggaaggcgggagaggaggttggcaatgctatatctattgcctatcctctagacctggttctctacggtcctcgaagaaatggcagggctatcggaaagtatctttcacagaagggcgtttggctcagaaggccattcctccaagaagcaaataaaccgtacgaaaacccacaggacattgaaggcccgagagcgccgccaccgcctgctctgaaagaacggccgccgcaggccgcgcagtcttggcaacccgtgcggtcggtagaggagattcgttctgaggttatgggtgttttcgattctctcacaaaaagcgaggaccttcccgagatgaaccccaacggacgagtacaaactgagttgctccggcatcagaagcagggtttgtttttcatgaccaaaagggagcaaccacgacagcttgagctacacggtaagacggcagattcattctggcaggtccagctcaatccgcgtggcgagaaatgttacaaaaacgtcatcacgggtgccacacagcgcgaagcgccggaggagacgttcggtggcattctcgctgacatgatgggcctgggcaaaacactcagcattctgtcccttgtagcttcgacgatggatgacgcggaagtgtggttcaggctgccgcctactcaaccgaaagctgttcctaagaagagcacagagtcatcaaggcggttccaggtgcccaccgctcccccactccctttgacaaagctccggcataatgggaaagctactcttctggtatgtccacttagtaccataagtaattgggaggaccagatcaaaacacacatcaaacctgggcaaatgacatattacatctaccacggatccaaccgaatccgcgaccctgctgtcctcgcccgatacgacattgtcatgaccacatatggctccgtggctagcgaggtgtcggggcgcagtaagggtagacatggcccttaccctctggaggaagtaggctggtttcgcatagttcttgacgaagcacatcagatccgcgaacagaacaccttgatgttcaaatccatctgccgtttgcaagccaaccggcgatgggcggtgacaggaactccggtccagaacaagctagatgacctcgcagctcttctagcattcctgcgtctcaaaccatttgatgaaaggggtaaatttacccagttcatcacaactccgttcaaggtctgcgatccggaaattgttcccaagcttcgagtgcttgttgatagcgttacgcttcgacgtcttaaagacaagattaacttgcctcctaggaccgatcaactcatcaagctggacttctcgccaaccgaacgcaagctgtattcggcttttgagaagaacgcccaggataaagttacggttctaactgcacccggtaaagagcgtatgataggaggcaagacttatattcatattcttcaatccatcttaaggcttcgtctgatttcagctcatggcaaagacctcctcaacgatgcagatttagaaatggtgcaaggcatgacttctgatcagccaatcgatctggaggacgaggacgacgaggccaataaggccgtgatcaccgaatcaagagcatatgaggcattcgggctgatgcaggagaccggcaatgataagtgcttttcatgccaaaacatcatcggtgcaaatgatgcctcagatccagaatcggagcgagatgaggatgtcgtcggttacatgacgatctgctttcaccttctgtgttcttcctgcattggcgcctggaaacaggaagctcgagatagagactcgggtgactgcgccttttgcggttcttatatcaaatttgagtgcagcgagatccgtaagagcaagctcgcggtagaacacgaaggcagtcgttcagtcaaaccagatacaaaagatcgatccaaggatgggtacacgggctataccggtccccataccaagacacttgctctcttggaagatctcaagaaatctcaggctgagagtgaggccaacccctccgaaccgcgcttcaaatccgttgtattttctgcctggacgtcgcatctcgacctcattgagattgcgctgggtaatgctggcattcgctttacgcgtttagacggaaagatgactcgagtggcgcgaagcacagctatgaacgaattccgggataaccccgagatagacgtcatacttgtttccatatcggccggaggcttgggtctcaatcttacggcaggaaacagcgtctacgtaatggaaccgcagtacaacccggcagctgaagctcaggctgtggatcgagttcaccgacttggccaaaagagacccgttcgtaccgttcgctacattatgcgcgagagcatcgaggagaaaatgctagagctccaagacaagaagaagaagcttgcaagtcttagcatggataggagccgtgttatagacaagcaagaagccgctaaacagaagctactagatcttcgtgatcttttcagatga

SEQ ID NO: 8025 - protein, 1110 aa, Muscodor strobelii
  misc_feature: SGI Peptide ID NO. 562451
  misc_feature (973)..(1051): Pfam Id: PF00271 Pfam Desc: Helicase conserved C-terminal domain
  misc_feature (401)..(776): Pfam Id: PF00176 Pfam Desc: SNF2 family N-terminal domain
  misc_feature (16)..(1110): NCBI GI: 256727456 Blast Desc: SNF2 family DNA-dependent ATPase [Nectria haematococca mpVI 77-13-4]
  misc_feature (13)..(1110): NCBI GI: 46123559 Blast Desc: FG06157.1 [Gibberella zeae PH-1]
  misc_feature (28)..(1110): NCBI GI: 116196398 Blast Desc: CHGG_04797 [Chaetomium globosum CBS 148.51] gi|88180710|gb|EAQ88178.1| CHGG_04797 [Chaetomium globosum CBS 148.51]
  misc_feature (26)..(1110): NCBI GI: 171688590 Blast Desc: protein product [Podospora anserina] gi|170944257|emb|CAP70367.1| protein product [Podospora anserina]
  misc_feature (27)..(1110): NCBI GI: 85105641 Blast Desc: NCU05246 [Neurospora crassa OR74A] gi|28923601|gb|EAA32774.1| conserved [Neurospora crassa OR74A] gi|118496048|dbj|BAF37540.1| DNA repair and recombination protein
  misc_feature (27)..(1110): NCBI GI: 39971679 Blast Desc: MGG_07155 [Magnaporthe grisea 70-15] gi|145019630|gb|EDK03858.1| MGG_07155 [Magnaporthe grisea 70-15]
  misc_feature (13)..(1110): NCBI GI: 156062442 Blast Desc: SS1G_01337 [Sclerotinia sclerotiorum 1980] gi|154696673|gb|EDN96411.1| SS1G_01337 [Sclerotinia sclerotiorum 1980]
  misc_feature (12)..(1110): NCBI GI: 154302115 Blast Desc: BC1G_09738 [Botryotinia fuckeliana B05.10] gi|150855512|gb|EDN30704.1| BC1G_09738 [Botryotinia fuckeliana B05.10]
  misc_feature (401)..(1110): NCBI GI: 261355857 Blast Desc: transcription termination factor 2 [Verticillium albo-atrum VaMs.102]
  misc_feature (26)..(1109): NCBI GI: 239615480 Blast Desc: SNF2 family helicase/ATPase [Ajellomyces dermatitidis ER-3]
MDTSTDSQGSLRNGQQPNVPAPSTPTAYNPAALLNPRGSNAYTLPSSHSNLHNGFNNSGNSTPLDFSFTSPGSEYVNSPASQPDNTPSSGYGHMIERMNKVEQRSHAPPSAKRRKLDTEASTDTQPLQARGGTGIIAHHIKEKRRDEEPINSNNNTVGNVETVVDLTDGSTESDVVEIQPPGDVEVCYGMIQNAKVNCHIVPKPKPDAINIQGPGWWPAVKLVLKRLTAKEDSTIRVYDCSRTTVGVVDPHTSRGLAPILDAPRLDVRTTCRIASRPRKAGEEVGNAISIAYPLDLVLYGPRRNGRAIGKYLSQKGVWLRRPFLQEANKPYENPQDIEGPRAPPPPALKERPPQAAQSWQPVRSVEEIRSEVMGVFDSLTKSEDLPEMNPNGRVQTELLRHQKQGLFFMTKREQPRQLELHGKTADSFWQVQLNPRGEKCYKNVITGATQREAPEETFGGILADMMGLGKTLSILSLVASTMDDAEVWFRLPPTQPKAVPKKSTESSRRFQVPTAPPLPLTKLRHNGKATLLVCPLSTISNWEDQIKTHIKPGQMTYYIYHGSNRIRDPAVLARYDIVMTTYGSVASEVSGRSKGRHGPYPLEEVGWFRIVLDEAHQIREQNTLMFKSICRLQANRRWAVTGTPVQNKLDDLAALLAFLRLKPFDERGKFTQFITTPFKVCDPEIVPKLRVLVDSVTLRRLKDKINLPPRTDQLIKLDFSPTERKLYSAFEKNAQDKVTVLTAPGKERMIGGKTYIHILQSILRLRLISAHGKDLLNDADLEMVQGMTSDQPIDLEDEDDEANKAVITESRAYEAFGLMQETGNDKCFSCQNIIGANDASDPESERDEDVVGYMTICFHLLCSSCIGAWKQEARDRDSGDCAFCGSYIKFECSEIRKSKLAVEHEGSRSVKPDTKDRSKDGYTGYTGPHTKTLALLEDLKKSQAESEANPSEPRFKSVVFSAWTSHLDLIEIALGNAGIRFTRLDGKMTRVARSTAMNEFRDNPEIDVILVSISAGGLGLNLTAGNSVYVMEPQYNPAAEAQAVDRVHRLGQKRPVRTVRYIMRESIEEKMLELQDKKKKLASLSMDRSRVIDKQEAAKQKLLDLRDLFR

SEQ ID NO: 8026 - DNA, 5398 bp, Muscodor strobelii
  misc_feature: SGI EST ID NO. CUFF.19825.1
  misc_feature: Variant of the nucleotide sequence at SEQ ID NO 8024
caggctggaggcgatccaccatgggctagctcccttttctctgccaagcaacagatgactattggaatccctgtacgagccctgtttgtggtgcaggcaggcgagcaggttgatccgagttgcattccgaaagaccacgggagaatcccatcgcgttgggggccacaagtgaatgaagagagggcatgggcgaagttgaggatgattgtgatggacgaccgcatctctcgcggctgccgtttggaggaagaagtttgctgtctgctagggtgtttgctctcttcggaagtcatggactcgcgactaccattttcaacactggacggttgctttgttttgcactctaccgagagctatatagagctgggcgggacctaaatgtattaatgccagaagcagcaggctcgcgatagggatctctgaagttagtcgactatcgtggtggcactggtggggaatggtgcatatgcacatcaatgggaactgcatgcgctcacgtcaaccttttctgcgccttgtcggcctcgttgctgctgtgactccggctcgatatctctttctctccatcccttagttgtgttggcccagcaggtgcaagagcgcaacgcagcttcctcaggctcgcctctgcattaaatgccaaagttcttgtttctctttcctttcgtcttatctgcggactcccctcatcccctcgcccccctccgcaggctaacatgtacctaccttgactgcctcgtccaccgcatctccaactgcaaccctcacatccaagcggccatcgtcgcatgcgcatctcgaatgtagttgcaactaactgtgatcccgtgactcgaacatagctctgccgccgactcgaaccaactcgactcgatgacttaagcactgcattccacgttgcgatcgtgacctcccgctcatcgcacactatactggcccctcccccaccacccctgccagcgctgagcaccataaacgtccctgccttatccctcgctcgaggtctttcttcagccttgctgtttcgtgaccaaggcttgggcccgtggtggtatcactcacagagcgtgcctatctacgcacatagagtggacaacagcagccggcgcctcgtctctttgttcacctcgctcccacccttttccaccaggaccctatcttacgcacctcacgcatcttatcctatacaccctacttacggtcgtcgaccacatccacttgttcactgctgggctcctttgctatgagtgccttttcggacaaaggcccctccatccttgcctgctaagtgcatatccgtctgttgtcacccgtcgcctgccactccggcgaagacagggcaagatggacacaagcaccgactcccaaggctctttgcgcaatggacaacagcccaacgtacccgccccctccacgccaacagcctataaccctgcggctcttctcaaccctcgtggctccaacgcctacactctccccagtagccatagcaacctgcacaatggtttcaataactccggcaactcgactcctcttgatttcagcttcacttcgcccggtagtgaatacgttaactccccggcctcgcagccggacaacacgccgtccagtggctatggacacatgatcgagcgcatgaacaaggtggagcagcgcagccacgctcccccctcagccaagcgccgaaaattagataccgaggccagtacagacacacagcccttgcaagcacgtggcggaactggtatcattgcacaccacatcaaagagaagaggcgagatgaagagcccatcaacagcaacaacaacacagttggaaatgtcgagactgtggtggatttgacggatggatctactgagagcgacgtcgtcgagatccaaccgcccggtgacgttgaggtctgctatggcatgatccagaatgcgaaagtaaactgccacatagtgccgaagcccaaaccggacgcgattaacattcagggtccgggctggtggccagcagtcaagttagttctgaagagactcaccgcgaaggaggactccacgattcgtgtctatgattgctctcgcacaactgtaggtgtcgtcgacccccataccagcagaggccttgcgcccatccttgatgctccccgcttggatgtacgaaccacttgcagaatcgcatctcgtcctaggaaggcgggagaggaggttggcaatgctatatctattgcctatcctctagacctggttctctacggtcctcgaagaaatggcagggctatcggaaagtatctttcacagaagggcgtttggctcagaaggccattcctccaagaagcaaataaaccgtacgaaaacccacaggacattgaaggcccgagagcgccgccaccgcctgctctgaaagaacggccgccgcaggccgcgcagtcttggcaacccgtgcggtcggtagaggagattcgttctgaggttatgggtgttttcgattctctcacaaaaagcgaggaccttcccgagatgaaccccaacggacgagtacaaactgagttgctccggcatcagaagcagggtttgtttttcatgaccaaaagggagcaaccacgacagcttgagctacacggtaagacggcagattcattctggcaggtccagctcaatccgcgtggcgagaaatgttacaaaaacgtcatcacgggtgccacacagcgcgaagcgccggaggagacgttcggtggcattctcgctgacatgatgggcctgggcaaaacactcagcattctgtcccttgtagcttcgacgatggatgacgcggaagtgtggttcaggctgccgcctactcaaccgaaagctgttcctaagaagagcacagagtcatcaaggcggttccaggtgcccaccgctcccccactccctttgacaaagctccggcataatgggaaagctactcttctggtatgtccacttagtaccataagtaattgggaggaccagatcaaaacacacatcaaacctgggcaaatgacatattacatctaccacggatccaaccgaatccgcgaccctgctgtcctcgcccgatacgacattgtcatgaccacatatggctccgtggctagcgaggtgtcggggcgcagtaagggtagacatggcccttaccctctggaggaagtaggctggtttcgcatagttcttgacgaagcacatcagatccgcgaacagaacaccttgatgttcaaatccatctgccgtttgcaagccaaccggcgatgggcggtgacaggaactccggtccagaacaagctagatgacctcgcagctcttctagcattcctgcgtctcaaaccatttgatgaaaggggtaaatttacccagttcatcacaactccgttcaaggtctgcgatccggaaattgttcccaagcttcgagtgcttgttgatagcgttacgcttcgacgtcttaaagacaagattaacttgcctcctaggaccgatcaactcatcaagctggacttctcgccaaccgaacgcaagctgtattcggcttttgagaagaacgcccaggataaagttacggttctaactgcacccggtaaagagcgtatgataggaggcaagacttatattcatattcttcaatccatcttaaggcttcgtctgatttcagctcatggcaaagacctcctcaacgatgcagatttagaaatggtgcaaggcatgacttctgatcagccaatcgatctggaggacgaggacgacgaggccaataaggccgtgatcaccgaatcaagagcatatgaggcattcgggctgatgcaggagaccggcaatgataagtgcttttcatgccaaaacatcatcggtgcaaatgatgcctcagatccagaatcggagcgagatgaggatgtcgtcggttacatgacgatctgctttcaccttctgtgttcttcctgcattggcgcctggaaacaggaagctcgagatagagactcgggtgactgcgccttttgcggttcttatatcaaatttgagtgcagcgagatccgtaagagcaagctcgcggtagaacacgaaggcagtcgttcagtcaaaccagatacaaaagatcgatccaaggatgggtacacgggctataccggtccccataccaagacacttgctctcttggaagatctcaagaaatctcaggctgagagtgaggccaacccctccgaaccgcgcttcaaatccgttgtattttctgcctggacgtcgcatctcgacctcattgagattgcgctgggtaatgctggcattcgctttacgcgtttagacggaaagatgactcgagtggcgcgaagcacagctatgaacgaattccgggataaccccgagatagacgtcatacttgtttccatatcggccggaggcttgggtctcaatcttacggcaggaaacagcgtctacgtaatggaaccgcagtacaacccggcagctgaagctcaggctgtggatcgagttcaccgacttggccaaaagagacccgttcgtaccgttcgctacattatgcgcgagagcatcgaggagaaaatgctagagctccaagacaagaagaagaagcttgcaagtcttagcatggataggagccgtgttatagacaagcaagaagccgctaaacagaagctactagatcttcgtgatcttttcagatgagctcggtattacgagcatcggctctcttcctttgcccggatttatcggcactacggtgcttgctttgtttcttttcattcgttcatcctatctcacatggtgcgcggcgtttcggaatcggctacagagagtaaccgccgctctgctcaggcatttcacggcgtcagaggagtctgcattgcttgtgtggttggattgggtccggccaatttcacgaactgggatataagggtttgcgaggcgtcatgggatgacgattatatgcattgaggacaaggctctaccaagacgcatatagatgacatgctactctttgagctctcgtgtccgccctctggaatgctttacgcgactgcaatgcggtattcaacatcgttcctcaccccttgcggaaatgggctcgggtggaacagacgatggccatgagttgttgtcttttcgtttgaagaacgacacttagatgatccaatggtatagattcaccacgctcgccatatctctctactttcttcaatcgcccccggactgttctaaccagtggagttctattcggtttcaaggcattctgcttcctcacaggtagatagactcggctcgaagtagtcagataccaatagacgtgatattgtaaaatattcactgtgtgtgacatagcgtgacaactcaaagtcttccactacgagtcctatgttttgatcgcagatctcgttgtaagcagcat

SEQ ID NO: 8027 - DNA, 1527 bp, Muscodor strobelii
  misc_feature: SGI cDNA ID NO. 562452
  misc_feature: Encodes the peptide sequence at SEQ ID NO 8028
atggcgtccaccgccagcctgcccaagggctctggtgccgatggcatcagcgacggtaccaaggactataagccactcagatccgcgaaacaagatatgaagaaacctcacataaccgaaactcccatcacatggggaaactggtataagcatgtcaactggttgaacacgttgttcatcgttatcacgccccttgccggtctcatcgccgcctactggactcctctccagaccaagacagctctcttcgctgttttctactacttcaactctgggctgggtatcactgctgggtatcatcgtttatgggcacattcgtcgtacaaggcaaccttgccattgaagatctacctcgccgctatgggtgccgccgcagtcgagggttcctgccgttggtggtcacggggtcaccgtgctcaccaccgttacaccgataccgaaaaagatccttactcagtccgtaagggtctgatttactcgcatatagggtggatggtcatgcgccaggaccccaagcgcattggtcgtactgacatatccgatctcaatgatgacccggtagttgtatggcagcatgtcaattatatcaagtgcgttgtcaccatgtccttgattgtaccgaccgttgtatgcggccttggctggggtgactggtggggtggctatatctacgccggtattttgcgaatcatgttcgttcaacaagccactttctgcgtcaactcgctggcgcactggctgggtgaccagcctttcgatgatcgcaactcgccccgcgaccacgtcctcactgccctggtcacccttggtgagggctaccataactttcatcacgagtttccatctgattatcgcaatgctgtcctttgtcttcaatcgcccgcccccccactccacaacccccactccacaacccccactccacaatttccccacctaacacacaaacacctaacacgcattgagttttaccaatacgacccgacaaaatgggctatttggacctggaagcagctcggcctcgcctacgatttgaaagaattccgccagaacgaaatcgagaagggtcgtgtccagcagttgcagaagaaacttgaccagaagcgctctctcctcgactggggcacccctcttgaactgcttcccgtcattagctgggacgatttcgttgcccagtctaagaacggcaaagccctcatttcggtcgccggtgtaattcacgatgtgaccgatttcatcaaggaccaccctggtggtaaggctctcatttcttcagctattggtaaagatgctacagctatcttcaacgggggtgtttatctccactccaatgccgcccataacttgctttcgaccatgagagtcggtgtgcttcgtggaggttgtgaagtggagatatggaaacgcgcccaaagcgagaacaaggactcttctgccatctacgattcaactggcgcccgaattacgcgcgcaggtgatcaagtcacaaaagttgtgcagccaacagctagtgcggatgctgcttga

SEQ ID NO: 8028 - protein, 508 aa, Muscodor strobelii
  misc_feature: SGI Peptide ID NO. 562452
  misc_feature (383)..(459): Pfam Id: PF00173 Pfam Desc: Cytochrome b5-like Heme/Steroid binding domain
  misc_feature (77)..(298): Pfam Id: PF00487 Pfam Desc: Fatty acid desaturase
  misc_feature (2)..(508): NCBI GI: 39952295 Blast Desc: conserved [Magnaporthe grisea 70-15] gi|145020356|gb|EDK04485.1| conserved [Magnaporthe grisea 70-15]
  misc_feature (1)..(508): NCBI GI: 171688528 Blast Desc: protein product [Podospora anserina] gi|170944226|emb|CAP70336.1| protein product [Podospora anserina]
  misc_feature (1)..(508): NCBI GI: 154294644 Blast Desc: acyl-CoA desaturase [Botryotinia fuckeliana B05.10] gi|150844671|gb|EDN19864.1| acyl-CoA desaturase [Botryotinia fuckeliana B05.10]
  misc_feature (1)..(508): NCBI GI: 85104874 Blast Desc: acyl-CoA desaturase 1 [Neurospora crassa OR74A] gi|28923402|gb|EAA32588.1| acyl-CoA desaturase 1 [Neurospora crassa OR74A]
  misc_feature (1)..(508): NCBI GI: 116196400 Blast Desc: conserved [Chaetomium globosum CBS 148.51] gi|88180711|gb|EAQ88179.1| conserved [Chaetomium globosum CBS 148.51]
  misc_feature (10)..(508): NCBI GI: 46123613 Blast Desc: FG06184.1 [Gibberella zeae PH-1]
  misc_feature (19)..(508): NCBI GI: 238839784 Blast Desc: delta-9 fatty acid desaturase [Microsporum canis CBS 113480]
  misc_feature (27)..(508): NCBI GI: 261204395 Blast Desc: delta-9 fatty acid desaturase [Ajellomyces dermatitidis SLH14081] gi|239587196|gb|EEQ69839.1| delta-9 fatty acid desaturase [Ajellomyces dermatitidis SLH14081] delta-9 fatty
  misc_feature (4)..(508): NCBI GI: 256727440 Blast Desc: [Nectria haematococca mpVI 77-13-4]
  misc_feature (2)..(508): NCBI GI: 46395695 Blast Desc: ACO1_AJECA RecName: Full=Acyl-CoA desaturase; AltName: Full=Stearoyl-CoA desaturase; AltName: Full=Fatty acid desaturase; AltName: Full=Delta(9)-desaturase delta-9 fatty acid
  misc_feature (2)..(508): SWISSPROT Homolog: EC 1.14.19.1 Stearoyl-CoA 9-desaturase
MASTASLPKGSGADGISDGTKDYKPLRSAKQDMKKPHITETPITWGNWYKHVNWLNTLFIVITPLAGLIAAYWTPLQTKTALFAVFYYFNSGLGITAGYHRLWAHSSYKATLPLKIYLAAMGAAAVEGSCRWWSRGHRAHHRYTDTEKDPYSVRKGLIYSHIGWMVMRQDPKRIGRTDISDLNDDPVVVWQHVNYIKCVVTMSLIVPTVVCGLGWGDWWGGYIYAGILRIMFVQQATFCVNSLAHWLGDQPFDDRNSPRDHVLTALVTLGEGYHNFHHEFPSDYRNAVLCLQSPAPPLHNPHSTTPTPQFPHLTHKHLTRIEFYQYDPTKWAIWTWKQLGLAYDLKEFRQNEIEKGRVQQLQKKLDQKRSLLDWGTPLELLPVISWDDFVAQSKNGKALISVAGVIHDVTDFIKDHPGGKALISSAIGKDATAIFNGGVYLHSNAAHNLLSTMRVGVLRGGCEVEIWKRAQSENKDSSAIYDSTGARITRAGDQVTKVVQPTASADAA

SEQ ID NO: 8029 - DNA, 2361 bp, Muscodor strobelii
  misc_feature: SGI EST ID NO. CUFF.19749.0
  misc_feature: Variant of the nucleotide sequence at SEQ ID NO 8027
cggggtcctgttcgctgcagggttctggattctaggtcccactaggccgacgttcctgcactcctttaatcctgtgagcaatgtacattatccagagtagcttatcacacgccaaaccattctcttcaaataaatatctaatcctcatccctctcatccatcccctctgctcccccctactgtctttgatcttattagttcttggcttgcccataaatacgaagtattcaaagctgatacgaaaagtacaaggctttggtatctacaagtcgacaacaacaacatcgtcaacatggcgtccaccgccagcctgcccaagggctctggtgccgatggcatcagcgacggtaccaaggactataagccactcagatccgcgaaacaagatatgaagaaacctcacataaccgaaactcccatcacatggggaaactggtataagcatgtcaactggttgaacacgttgttcatcgttatcacgccccttgccggtctcatcgccgcctactggactcctctccagaccaagacagctctcttcgctgttttctactacttcaactctgggctgggtatcactgctgggtatcatcgtttatgggcacattcgtcgtacaaggcaaccttgccattgaagatctacctcgccgctatgggtgccgccgcagtcgagggttcctgccgttggtggtcacggggtcaccgtgctcaccaccgttacaccgataccgaaaaagatccttactcagtccgtaagggtctgatttactcgcatatagggtggatggtcatgcgccaggaccccaagcgcattggtcgtactgacatatccgatctcaatgatgacccggtagttgtatggcagcatgtcaattatatcaagtgcgttgtcaccatgtccttgattgtaccgaccgttgtatgcggccttggctggggtgactggtggggtggctatatctacgccggtattttgcgaatcatgttcgttcaacaagccactttctgcgtcaactcgctggcgcactggctgggtgaccagcctttcgatgatcgcaactcgccccgcgaccacgtcctcactgccctggtcacccttggtgagggctaccataactttcatcacgagtttccatctgattatcgcaatgctggtacgtacatcaaaatcccgcgcgatttacttctttttcgatcgtattcttggaacatcatactaactctttcgtagtaagtgatctaacctgccaaatattggatatcagtcctttgtcttcaatcgcccgcccccccactccacaacccccactccacaacccccactccacaatttccccacctaacacacaaacacctaacacgcgtacccccgagtctggtaacggaacatcatgaacaataactaacgcatcgcctttctatcagattgagttttaccaatacgacccgacaaaatgggctatttggacctggaagcagctcggcctcgcctacgatttgaaagaattccgccagaacgaaatcgagaagggtcgtgtccagcagttgcagaagaaacttgaccagaagcgctctctcctcgactggggcacccctcttgaactgcttcccgtcattagctgggacgatttcgttgcccagtctaagaacggcaaagccctcatttcggtcgccggtgtaattcacgatgtgaccgatttcatcaaggaccaccctggtggtaaggctctcatttcttcagctattggtaaagatgctacagctatcttcaacgggggtgtttatctccactccaatgccgcccataacttgctttcgaccatgagagtcggtgtgcttcgtggaggttgtgaagtggagatatggaaacgcgcccaaagcgagaacaaggactcttctgccatctacgattcaactggcgcccgaattacgcgcgcaggtgatcaagtcacaaaagttgtgcagccaacagctagtgcggatgctgcttgaaaatccgaagagtaatgggtcacgatgaccacccatctaatagaaaaggcgatggatacttaatcactatcgacctaagttgagccgaactccttgatatgagcacgacttcaaccatgattcacgacaatgccatgtatatttccaagatatgaacgcactcttaccaaaatagcaagtttggatgagggatacttccttctacccagccccaatgttcaaacaagggcagcgaagactaaaaagaagtagtagttagtgagattattacgccaattagcatattagatcacgatagagaacgttgcttcaggcatacaatacaattagataagaattcatcttgtgaagccccacctttgtgactag

SEQ ID NO: 8030 - DNA, 3315 bp, Muscodor strobelii
  misc_feature: SGI cDNA ID NO. 562453
  misc_feature: Reduced expression when VOC is produced
  misc_feature: Encodes the peptide sequence at SEQ ID NO 8031
atgctgtgccgccaacagctctcgcggcagcttgccgtgcgagcatcgccctcattcccctcgagactacgactacgctcgtccacgaggctgtatctgacaaatgcccccgatcggcctggcagatcccaggtcgcgtgcctcagaacctccgtccccctacgcgccggcacgctctccaggtcctcgttctccacgactacgacgagacggaaagagaaaaacaacgatttcttcgacggctctgtccagcccctgaccgacgaggaagctcacaccaacgtcgaggagaaagcggacgaggcggggaaagacgtggccgatgcaaagagctctaccgcagaatctccatcgtcgtctggcaacaaccagggccaaggcggcgcacaggacgagaaggcaggcagcgctgccggtggcgcatcgtcaggttctggcaacgacggacctggtgacggtggccgaagaggtcgaaagtctgctgagaaagcattgcaaaagcccgtcgtcccggatgtctaccctcaggttatggcaataccgatagctaagcgaccgttgtttcctggcttctacaaggccattacgattaaggaccctaatgtctctgcggcaatccaagaaatgatcaagagaggccagccctacgtcggtgctttcctattcaaagatgagaacgcagatgaggatataatacgagaccccgcagatgtctacgatactggtgtctttgctcagatcacgagtgcctttcccgtgcacggcgaacagaatagtctcaccgctatattgtatcctcaccgtaggattaaactatctactttgattcctcccacgaccaccgaggccaagaaatctgagcccgagcctgaagtcattccagatcccatacctcccaagcccgaagaggatttgtcccaggagaagaagggagatgtggtcgcgagttttgaagaggggccagtagccaagtctgatccggtacccgagaaatatgagcctacatctttcctacgcaagtaccccgtcagtctcgttaacgtcgagaatctggtggaggagccattcgacccaaaaagccctgtcgtgcgagcagtcaccaacgaaatagtgaatgtcttcaaggaagttgcgacgatgaacagtcttttcagagatcagatctcaaccttctccatgagtcagtcgacaggcaacgttactgcggagcctgcgaagcttgcggatttcgctgctgcggtatcggctggtgagcctgctgagctgcaggaagtcctctctagcttgaacgtggaagagcggatgcagaaggcactcgtagtgcttaagaaagaactcatgaacgcgcagctacagtctaaaattaccaaggacgtggaacagaaaatcacaaagcgacaacgagagtattggctcatggagcaaatgaagggaatccgcagagagcttggcatcgaatctgacggcaaggacaaacttatcgaaaagttcaaggagaaagccgacaagcttgccatgcccgaagctgtgcgaaaagtctacgatgacgagattaacaagctcgcccatctagagcccgctgcttcggaatttaacgttacgagaaattacctggattggttgacacagataccatggggccagagaagcgccgagaattttggcatacaaaatgctatgaaaatcttggacgaagatcattatgggttgaaggacgtcaaggaccgaatcttggaattcattgcagtcggtaagctgcggggtactgtcgaaggcaaaattctctgctttgtcggccctccaggtgttggtaagacaagcattggtaaatccattgccaaagctttaaatcgacaatactaccgattcagcgtgggaggtctcacagatgttgccgagatcaagggtcaccgccgtacctacgttggcgctcttcccggtcgagtcattcaagctctcaaaaagtgtcagacagaaaaccctctcattttgatcgatgaagtcgacaagattggacgcggatatcaaggagacccgtcgtctgctcttcttgaattgctagaccccgaacagaacggctcgtttctagatcactacatggacgtacccgtggacctttctaaggttctctttgtctgtactgccaatatgacggacacgataccgagacccctactcgaccgcatggaagttattcgattatctggctatgtatccgacgagaagaaagcaatcgcagatcgttacctggcacccgctgctaaggaacttgccgggctcaaggatgccaatgtcaccctgtcggatcaagccatcgaggaactcatcaagtcttattgtcgagaatccggcgttcgtaatctgaagaagcaaatcgagaaagtgtatcgcaagtctgctctcaagatcgtacaggaactcggtgaagaggttctaccagagtctaaggcattgacagaagatggcaaagcagccttagaagaatccgaaaagtccaagagtgaagacgagtcagtatcaacagaagcatccgagaaggagactacagaagtgcctcgagtcgctttgaaggtgccagattccgtaagtgtagtgattgatcaagagaacctaaaggactatgtcggcccgcctatcttcacgtctgatcgcctttacgacgttaccccatctggtgttactatgggcttggcttggacccagttaggtggctctgccatgtatattgaatctattcttcaatctgccctgcggcctagcagccgtgccggcctggaaattactggcaacttgaagacggtcatgaaagaatcgtctgcgattgcctattcctttgcaaaggcatacatggcaaagaacttcaccgaaaaccacttctttgacaaggcaaagatccatctgcacgtaccagaaggagctgttcagaaagatggcccatcggccggcatcaccatggccacctctctcctgtcattggcactcgacacgccagtggagcccactgtagcaatgactggagaattaactctgactggcaaggtactccgtataggcggattgcgtgagaagacggtggcggctcgacgtgctggttgcaaaatgattattttccccgaggataatatgtctgattggcttgaacttcctgagaatatcaagaaaggcattgagggtcgccccgcaagttggtacacagatgtgtttgatcttgtcttccccaatctcgataaggagaaggcgaacatttgcaagatctgcgagtacaaaaaggagcacgactccaaatcgaccaaggatagcgacaatgacgactaa

SEQ ID NO: 8031 - protein, 1104 aa, Muscodor strobelii
  misc_feature: SGI Peptide ID NO. 562453
  misc_feature (594)..(789): Pfam Id: PF00004 Pfam Desc: ATPase family associated with various cellular activities (AAA)
  misc_feature (594)..(737): Pfam Id: PF07728 Pfam Desc: ATPase family associated with various cellular activities (AAA)
  misc_feature (176)..(444): Pfam Id: PF02190 Pfam Desc: ATP-dependent protease La (LON) domain
  misc_feature (865)..(1074): Pfam Id: PF05362 Pfam Desc: Lon protease (S16) C-terminal proteolytic domain
  misc_feature (601)..(621): Pfam Id: PF01202 Pfam Desc: Shikimate kinase
  misc_feature (1)..(1104): NCBI GI: 256727442 Blast Desc: NECHADRAFT_66291 [Nectria haematococca mpVI 77-13-4]
  misc_feature (1)..(1104): NCBI GI: 85104882 Blast Desc: ATP-dependent protease La [Neurospora crassa OR74A] gi|28923404|gb|EAA32590.1| ATP-dependent protease La [Neurospora crassa OR74A]
  misc_feature (71)..(1086): NCBI GI: 171688524 Blast Desc: protein product [Podospora anserina] gi|170944224|emb|CAP70334.1| protein product [Podospora anserina]
  misc_feature (162)..(1081): NCBI GI: 156045093 Blast Desc: SS1G_09735 [Sclerotinia sclerotiorum 1980] gi|154694130|gb|EDN93868.1| SS1G_09735 [Sclerotinia sclerotiorum 1980]
  misc_feature (42)..(1104): NCBI GI: 46123611 Blast Desc: FG06183.1 [Gibberella zeae PH-1]
  misc_feature (16)..(1081): NCBI GI: 240104680 Blast Desc: ATP-dependent protease La, [Coccidioides posadasii C735 delta SOWgp]
  misc_feature (42)..(1081): NCBI GI: 258577423 Blast Desc: ATP-dependent protease La [Uncinocarpus reesii 1704] gi|237903159|gb|EEP77560.1| ATP-dependent protease La [Uncinocarpus reesii 1704]
  misc_feature (16)..(1081): NCBI GI: 119178672 Blast Desc: CIMG_08144 [Coccidioides immitis RS]
  misc_feature (63)..(1081): NCBI GI: 119481221 Blast Desc: LON domain serine protease, [Neosartorya fischeri NRRL 181] gi|119408793|gb|EAW18742.1| LON domain serine protease, [Neosartorya fischeri NRRL 181]
  misc_feature (18)..(1081): NCBI GI: 145232097 Blast Desc: An02g03760 [Aspergillus niger] gi|134056423|emb|CAL00590.1| protein product [Aspergillus niger]
  misc_feature (363)..(1075): SWISSPROT Homolog: EC 3.4.21.53 Endopeptidase La
  misc_feature: Useful for introducing or modulating the production of volatile compounds
MLCRQQLSRQLAVRASPSFPSRLRLRSSTRLYLTNAPDRPGRSQVACLRTSVPLRAGTLSRSSFSTTTTRRKEKNNDFFDGSVQPLTDEEAHTNVEEKADEAGKDVADAKSSTAESPSSSGNNQGQGGAQDEKAGSAAGGASSGSGNDGPGDGGRRGRKSAEKALQKPVVPDVYPQVMAIPIAKRPLFPGFYKAITIKDPNVSAAIQEMIKRGQPYVGAFLFKDENADEDIIRDPADVYDTGVFAQITSAFPVHGEQNSLTAILYPHRRIKLSTLIPPTTTEAKKSEPEPEVIPDPIPPKPEEDLSQEKKGDVVASFEEGPVAKSDPVPEKYEPTSFLRKYPVSLVNVENLVEEPFDPKSPVVRAVTNEIVNVFKEVATMNSLFRDQISTFSMSQSTGNVTAEPAKLADFAAAVSAGEPAELQEVLSSLNVEERMQKALVVLKKELMNAQLQSKITKDVEQKITKRQREYWLMEQMKGIRRELGIESDGKDKLIEKFKEKADKLAMPEAVRKVYDDEINKLAHLEPAASEFNVTRNYLDWLTQIPWGQRSAENFGIQNAMKILDEDHYGLKDVKDRILEFIAVGKLRGTVEGKILCFVGPPGVGKTSIGKSIAKALNRQYYRFSVGGLTDVAEIKGHRRTYVGALPGRVIQALKKCQTENPLILIDEVDKIGRGYQGDPSSALLELLDPEQNGSFLDHYMDVPVDLSKVLFVCTANMTDTIPRPLLDRMEVIRLSGYVSDEKKAIADRYLAPAAKELAGLKDANVTLSDQAIEELIKSYCRESGVRNLKKQIEKVYRKSALKIVQELGEEVLPESKALTEDGKAALEESEKSKSEDESVSTEASEKETTEVPRVALKVPDSVSVVIDQENLKDYVGPPIFTSDRLYDVTPSGVTMGLAWTQLGGSAMYIESILQSALRPSSRAGLEITGNLKTVMKESSAIAYSFAKAYMAKNFTENHFFDKAKIHLHVPEGAVQKDGPSAGITMATSLLSLALDTPVEPTVAMTGELTLTGKVLRIGGLREKTVAARRAGCKMIIFPEDNMSDWLELPENIKKGIEGRPASWYTDVFDLVFPNLDKEKANICKICEYKKEHDSKSTKDSDNDD

SEQ ID NO: 8032 - DNA, 4161 bp, Muscodor strobelii
  misc_feature: SGI EST ID NO. CUFF.19727.0
  misc_feature: Variant of the nucleotide sequence at SEQ ID NO 8030
tcgacgccgaggcgactctcttgcacgcgcacttgcattcccaacgcggacatgggcactgtatcgtgtctaatctcgccatctactgtcactcgcagtctgtattatttcccctagaccttcgatctgcacatactggctgctagaggtccgagccaacagccacctgcgcgcccatcctccgaccatcgcccgccctcactcgaagatttatcctgattcctccctgctatgctgtgccgccaacagctctcgcggcagcttgccgtgcgagcatcgccctcattcccctcgagactacgactacgctcgtccacgaggctgtatctgacaaatgcccccgatcggcctggcagatcccaggtcgcgtgcctcagaacctccgtccccctacgcgccggcacgctctccaggtcctcgttctccacgactacgacgagacggaaagagaaaaacaacgatttcttcgacggctctgtccagcccctgaccgacgaggaagctcacaccaacgtcgaggagaaagcggacgaggcggggaaagacgtggccgatgcaaagagctctaccgcagaatctccatcgtcgtctggcaacaaccagggccaaggcggcgcacaggacgagaaggcaggcagcgctgccggtggcgcatcgtcaggttctggcaacgacggacctggtgacggtggccgaagaggtcgaaagtctgctgagaaagcattgcaaaagcccgtcgtcccggatgtctaccctcaggttatggcaataccgatagctaagcgaccgttgtttcctggcttctacaaggccattacgattaaggaccctaatgtctctgcggcaatccaagaaatgatcaagagaggccagccctacgtcggtgctttcctattcaaagatgagaacgcagatgaggatataatacgagaccccgcagatgtctacgatactggtgtctttgctcagatcacgagtgcctttcccgtgcacggcgaacagaatagtctcaccgctatattgtatcctcaccgtaggattaaactatctactttgattcctcccacgaccaccgaggccaagaaatctgagcccgagcctgaagtcattccagatcccatacctcccaagcccgaagaggatttgtcccaggagaagaagggagatgtggtcgcgagttttgaagaggggccagtagccaagtctgatccggtacccgagaaatatgagcctacatctttcctacgcaagtaccccgtcagtctcgttaacgtcgagaatctggtggaggagccattcgacccaaaaagccctgtcgtgcgagcagtcaccaacgaaatagtgaatgtcttcaaggaagttgcgacgatgaacagtcttttcagagatcagatctcaaccttctccatgagtcagtcgacaggcaacgttactgcggagcctgcgaagcttgcggatttcgctgctgcggtatcggctggtgagcctgctgagctgcaggaagtcctctctagcttgaacgtggaagagcggatgcagaaggcactcgtagtgcttaagaaagaactcatgaacgcgcagctacagtctaaaattaccaaggacgtggaacagaaaatcacaaagcgacaacgagagtattggctcatggagcaaatgaagggaatccgcagagagcttggcatcgaatctgacggcaaggacaaacttatcgaaaagttcaaggagaaagccgacaagcttgccatgcccgaagctgtgcgaaaagtctacgatgacgagattaacaagctcgcccatctagagcccgctgcttcggaatttaacgttacgagaaattacctggattggttgacacagataccatggggccagagaagcgccgagaattttggcatacaaaatgctatgaaaatcttggacgaagatcattatgggttgaaggacgtcaaggaccgaatcttggaattcattgcagtcggtaagctgcggggtactgtcgaaggcaaaattctctgctttgtcggccctccaggtgttggtaagacaagcattggtaaatccattgccaaagctttaaatcgacaatactaccgattcagcgtgggaggtctcacagatgttgccgagatcaagggtcaccgccgtacctacgttggcgctcttcccggtcgagtcattcaagctctcaaaaagtgtcagacagaaaaccctctcattttgatcgatgaagtcgacaagattggacgcggatatcaaggagacccgtcgtctgctcttcttgaattgctagaccccgaacagaacggctcgtttctagatcactacatggacgtacccgtggacctttctaaggttctctttgtctgtactgccaatatgacggacacgataccgagacccctactcgaccgcatggaagttattcgattatctggctatgtatccgacgagaagaaagcaatcgcagatcgttacctggcacccgctgctaaggaacttgccgggctcaaggatgccaatgtcaccctgtcggatcaagccatcgaggaactcatcaagtcttattgtcgagaatccggcgttcgtaatctgaagaagcaaatcgagaaagtgtatcgcaagtctgctctcaagatcgtacaggaactcggtgaagaggttctaccagagtctaaggcattgacagaagatggcaaagcagccttagaagaatccgaaaagtccaagagtgaagacgagtcagtatcaacagaagcatccgagaaggagactacagaagtgcctcgagtcgctttgaaggtgccagattccgtaagtgtagtgattgatcaagagaacctaaaggactatgtcggcccgcctatcttcacgtctgatcgcctttacgacgttaccccatctggtgttactatgggcttggcttggacccagttaggtggctctgccatgtatattgaatctattcttcaatctgccctgcggcctagcagccgtgccggcctggaaattactggcaacttgaagacggtcatgaaagaatcgtctgcgattgcctattcctttgcaaaggcatacatggcaaagaacttcaccgaaaaccacttctttgacaaggcaaagatccatctgcacgtaccagaaggagctgttcagaaagatggcccatcggccggcatcaccatggccacctctctcctgtcattggcactcgacacgccagtggagcccactgtagcaatgactggagaattaactctgactggcaaggtactccgtataggcggattgcgtgagaagacggtggcggctcgacgtgctggttgcaaaatgattattttccccgaggataatatgtctgattggcttgaacttcctgagaatatcaagaaaggcattgagggtcgccccgcaagttggtacacagatgtgtttgatcttgtcttccccaatctcgataaggagaaggcgaacatttgcaagatctgcgagtacaaaaaggagcacgactccaaatcgaccaaggatagcgacaatgacgactaaagaatcatatggaaatccaaaccataggaatttaatctggaactcgaccgagtctactcggatgtatatcatactaatcattaagtgttcttgggcataaagcagcggcttgagccgttctgttcagggtatatataagtcatttagattttacatagaggcgcatgggacagcattcgtcttccggcgagttagggttctctttcttgcttaaaaggctcctgcatacaagcaccatggacagtgcatattgcatctatcgcgaggaagcgtgaaaaagaggagaagatgtgaatgccatttccacttctactctacgcattgtgtattgctgtggcgcactatacggaggcaatagacctcatggaactctcatctcaagttcatgtatcataagctttaagagtcaacatcgaaggactcaaccaatacagtgtagtagaggggcggcataataaagctggcatggatcacttcctctcaatatgccaatatgatattgtttggcgatactactctgctcatctcacttgatcgtgatgtcattcgctctcatctaattcctggcgtgtaaagctcttggagatatcctcgaacaggaaggcatcatgctca

SEQ ID NO: 8033 - DNA, 2781 bp, Muscodor strobelii
  misc_feature: SGI cDNA ID NO. 562454
  misc_feature: Encodes the peptide sequence at SEQ ID NO 8034
atggctaccgaatcgacgtatgcaacgcctccgtcgtcttcagatggcagtcgcttgaccgccttttggaaaaaaattacgggcaaaggtcaagcgccggcttctccgtctccgcccggacccgagccggagctgtctcgagattcgtcacccaactcaggtctaattcggagagtctcgcggagagtcgtacctggattgccacgagcaaaaacattcagaaggcagcagtccgagggccgggagaaactcgaggtcgatcagcccactccggccgagaggagagctgtctctgttgataggcgactgcatgtcaaacgcagcgcttcctatactcgccagcctttacctcgcgcaagcgcgccagacttccttggtcaggatgtaccctcggatagtcagggcgtcgctcccgaataccccgtgtctccggctcatagccctatcgaggaaaagcagttaccgagtctggacggcattagcaccacaagcaatgatcatttcgagagtgccacggacgaccaggccccttatcaggatgccgtcgaaaacgcggatgctcactcaatttctacctctcgttacgatgctattatccacgacgaactagaacgcaaatggatcctaaatcttagtatgcactttcgagacaaatctaagagggaaaagtttttcgtcacgtatcgagaaagggactctatatggcgccgagtgactatctctctcgattatcgaaatgcgcctgacgattcactcgaacgggatcttctaaacaccaagtttcagagagagaaaagcgccaagatctacgaagcaattcgtgaaagtcttcaagatatccaattttacgagactgtcacaaacctcaagctccaaactgcagaggggagattgcatgttcatgtagttgaggatgtgaatgaaataatccatttcccaagtgtccgcacagtccagcacatgggctgccgacgcattcgtgagagtgatcttcatttcgactcacatatgtccggatttgtgtataaggtgcaagtagacggtcagacgctcattaaaaaggagattcccggaccggacactattgaagaatttctgtatgaagtcaatgcactgagttcgctacgatattcccgcagcatcattggattttacggcgtcgtcgttgatgacgctgatgagcttgtcaagggcctgctcatcaattatgctgagcaaggtgccctaattgatgttatctacgattcgcaagagcgcggtgagcatctgccctgggccgtccgagagaaatgggcgcgacagatcgttggaggactgtccgacatccacgagaccggcttcgtccagggtgattttaccctatcgaatatcgtcatcgatgacttcggcaatgccaagattattgacatcaacaggagaggctgcccagttggttgggaacctccggaggccactcctttgatcgacagtaatcagcgtatttccatgtatattggtgtcaaatctgatctttaccagttggggatggtgctatgggcactcgccactctcgaggatgagcccgaggcccatccacgaccccttcgtttgaagcccgagttagaagtgccattatggtaccgtcaaatagttgagaactgtctgcacgagaacccacgggttagactgcaagcaacagcactgttgacgatgttccccgaggcgtcatttgatgatgcacatgaccaagaggacttcctccatgacactacttcctttcagaaacacgacgtagatgagcgccaaaacattccaatagttcgaacggtcgaacctcggaacagttggccatattcgtccagaagtgagacgcaggcgacctcgccaagctttgaggatgagccatattacccgccacgtggtcgatctccgcctagccctctacccagccatcatgatttgtatagcttgcctcatgtcgccgaaaacgtgccaggggctaagatgcatgatgttgcagctatggattttgagtccattgctgacgatgcgagggtagagactcccagagatcttgacgacacgaccgcgctggcgaagcaactgggagacgaactcgagcaaatgcattcgagtttcctggtcgatcctggtctggaaaatgaccatgatcagaccactggtggtgatagccaggcagacgcttcgcctaacgcaaccgatgttgtaccacttgacgagaacgctggccaaatcgaagagagcgaggtacgaaacgtacaaagcgaggatgaatcggtcacaacacccacaaatgatgcggtgttgcagacaacaatggacgaggcattgtctacggatgctttgcatgctgaggaagcttttgcttcagtcccggaaagtgccgccaaaagcgcggagcttcttgatattgcagttgaaacagatgacattaacgaaaggcatacattgaagaaagaccagcctgagacgtcgcaagacgaatatattgatgacggtaaagatgatgcaaccaaggcggatgagatacaggctcagaatagcggcttggatgtaagcgacataaacgacagtacagatgacaagacagaagacgcgtctacgcgatccacagaagcagcgacgcaactggctactgatttgacctccccagaagatctaccatcaaaagaaagcctggccgatgaagcagtagatgaaagcggccgattagaagcttcagacgaagctccgatccctgtcgcgacagaagccattcaagattcagaaacttcggtctga

SEQ ID NO: 8034 - protein, 926 aa, Muscodor strobelii
  misc_feature: SGI Peptide ID NO. 562454
  misc_feature (99)..(657): NCBI GI: 256727441 Blast Desc: NECHADRAFT_66289 [Nectria haematococca mpVI 77-13-4]
  misc_feature (35)..(604): NCBI GI: 85104878 Blast Desc: NCU05260 [Neurospora crassa OR74A] gi|28923403|gb|EAA32589.1| [Neurospora crassa OR74A]
  misc_feature (56)..(644): NCBI GI: 145613237 Blast Desc: MGG_11140 [Magnaporthe grisea 70-15] gi|145020357|gb|EDK04486.1| MGG_11140 [Magnaporthe grisea 70-15]
  misc_feature (99)..(648): NCBI GI: 116196402 Blast Desc: CHGG_04799 [Chaetomium globosum CBS 148.51] gi|88180712|gb|EAQ88180.1| CHGG_04799 [Chaetomium globosum CBS 148.51]
  misc_feature (53)..(567): NCBI GI: 171688526 Blast Desc: protein product [Podospora anserina] gi|170944225|emb|CAP70335.1| protein product [Podospora anserina]
  misc_feature (54)..(624): NCBI GI: 156045089 Blast Desc: SS1G_09733 [Sclerotinia sclerotiorum 1980] gi|154694128|gb|EDN93866.1| SS1G_09733 [Sclerotinia sclerotiorum 1980]
  misc_feature (11)..(578): NCBI GI: 154298402 Blast Desc: BC1G_11656 [Botryotinia fuckeliana B05.10] gi|150858109|gb|EDN33301.1| BC1G_11656 [Botryotinia fuckeliana B05.10]
  misc_feature (54)..(574): NCBI GI: 212543969 Blast Desc: Protein kinase domain-containing protein [Penicillium marneffei ATCC 18224] gi|210067046|gb|EEA21139.1| Protein kinase domain-containing protein [Penicillium marneffei ATCC 18224]
  misc_feature (57)..(574): NCBI GI: 242788195 Blast Desc: Protein kinase domain-containing protein [Talaromyces stipitatus ATCC 10500] gi|218721316|gb|EED20735.1| Protein kinase domain-containing protein [Talaromyces stipitatus ATCC 10500]
  misc_feature (34)..(567): NCBI GI: 119481219 Blast Desc: Protein kinase domain-containing protein [Neosartorya fischeri NRRL 181] gi|119408792|gb|EAW18741.1| Protein kinase domain-containing protein [Neosartorya fischeri NRRL 181]
MATESTYATPPSSSDGSRLTAFWKKITGKGQAPASPSPPGPEPELSRDSSPNSGLIRRVSRRVVPGLPRAKTFRRQQSEGREKLEVDQPTPAERRAVSVDRRLHVKRSASYTRQPLPRASAPDFLGQDVPSDSQGVAPEYPVSPAHSPIEEKQLPSLDGISTTSNDHFESATDDQAPYQDAVENADAHSISTSRYDAIIHDELERKWILNLSMHFRDKSKREKFFVTYRERDSIWRRVTISLDYRNAPDDSLERDLLNTKFQREKSAKIYEAIRESLQDIQFYETVTNLKLQTAEGRLHVHVVEDVNEIIHFPSVRTVQHMGCRRIRESDLHFDSHMSGFVYKVQVDGQTLIKKEIPGPDTIEEFLYEVNALSSLRYSRSIIGFYGVVVDDADELVKGLLINYAEQGALIDVIYDSQERGEHLPWAVREKWARQIVGGLSDIHETGFVQGDFTLSNIVIDDFGNAKIIDINRRGCPVGWEPPEATPLIDSNQRISMYIGVKSDLYQLGMVLWALATLEDEPEAHPRPLRLKPELEVPLWYRQIVENCLHENPRVRLQATALLTMFPEASFDDAHDQEDFLHDTTSFQKHDVDERQNIPIVRTVEPRNSWPYSSRSETQATSPSFEDEPYYPPRGRSPPSPLPSHHDLYSLPHVAENVPGAKMHDVAAMDFESIADDARVETPRDLDDTTALAKQLGDELEQMHSSFLVDPGLENDHDQTTGGDSQADASPNATDVVPLDENAGQIEESEVRNVQSEDESVTTPTNDAVLQTTMDEALSTDALHAEEAFASVPESAAKSAELLDIAVETDDINERHTLKKDQPETSQDEYIDDGKDDATKADEIQAQNSGLDVSDINDSTDDKTEDASTRSTEAATQLATDLTSPEDLPSKESLADEAVDESGRLEASDEAPIPVATEAIQDSETSV

SEQ ID NO: 8035 - DNA, 4140 bp, Muscodor strobelii
  misc_feature: SGI EST ID NO. CUFF.19739.0
  misc_feature: Variant of the nucleotide sequence at SEQ ID NO 8033
gagattttgtagttgtggctcagagcccactattcctagcccgtcgtcatgtaaagccgttcggctctttgcccgcctcaccgtctcttcggcttcaacctgctcgcctgtcttgactgctggtgagggcgtcgcatcttagcccttgcaacagcattccattaatctcgtcaatctgcccgcctgatctactgtatgcaattgctcctttgatctctccacttcttgatcccacagctagagaaataggtgcatttccgacccaacgtggttagtatgcatgcgtgcttcatgtacgtcggccgtgattgtagaccagaccgccaacgcatctcttgccccatgtccgtccctcccatgccatgctcgtccatcgtaagtgtttgccagtagcataccgtagcctcacttgctgccgcttccgttccctttcccttctgcttctctgcccacattcttccacgctgtgcatgcctaagaagccatgtcgagcccaatcccaccagcctctacgtctagaccatccttacaatagcattccttgcgccctactgtgcaacctctatcccgagtagaaactgcacttctacacccctccccacctaagtcccttgtagagcgacaataggccgcttgtcggttgggcttggatacaccactagtcacagcctcagtcacgtcagaggaacattacatcttctctttcgacaccagccatcccccattccgtcagtgtgtgcattgccgtcgtctgcgagcctacgtgggcgactaagagaactcaacataacagtgacgccccgtcttcatacatgctcatctggttcatttttcctcttctgcatggtcgacgttgactggatacttccacacaactggaaatccactgtaccgttctcatgaaataaacgtcgccatggctaccgaatcgacgtatgcaacgcctccgtcgtcttcagatggcagtcgcttgaccgccttttggaaaaaaattacgggcaaaggtcaagcgccggcttctccgtctccgcccggacccgagccggagctgtctcgagattcgtcacccaactcaggtctaattcggagagtctcgcggagagtcgtacctggattgccacgagcaaaaacattcagaaggcagcagtccgagggccgggagaaactcgaggtcgatcagcccactccggccgagaggagagctgtctctgttgataggcgactgcatgtcaaacgcagcgcttcctatactcgccagcctttacctcgcgcaagcgcgccagacttccttggtcaggatgtaccctcggatagtcagggcgtcgctcccgaataccccgtgtctccggctcatagccctatcgaggaaaagcagttaccgagtctggacggcattagcaccacaagcaatgatcatttcgagagtgccacggacgaccaggccccttatcaggatgccgtcgaaaacgcggatgctcactcaatttctacctctcgttacgatgctattatccacgacgaactagaacgcaaatggatcctaaatcttagtatgcactttcgagacaaatctaagagggaaaagtttttcgtcacgtatcgagaaagggactctatatggcgccgagtgactatctctctcgattatcgaaatgcgcctgacgattcactcgaacgggatcttctaaacaccaagtttcagagagagaaaagcgccaagatctacgaagcaattcgtgaaagtcttcaagatatccaattttacgagactgtcacaaacctcaagctccaaactgcagaggggagattgcatgttcatgtagttgaggatgtgaatgaaataatccatttcccaagtgtccgcacagtccagcacatgggctgccgacgcattcgtgagagtgatcttcatttcgactcacatatgtccggatttgtgtataaggtgcaagtagacggtcagacgctcattaaaaaggagattcccggaccggacactattgaagaatttctgtatgaagtcaatgcactgagttcgctacgatattcccgcagcatcattggattttacggcgtcgtcgttgatgacgctgatgagcttgtcaagggcctgctcatcaattatgctgagcaaggtgccctaattgatgttatctacgattcgcaagagcgcggtgagcatctgccctgggccgtccgagagaaatgggcgcgacagatcgttggaggactgtccgacatccacgagaccggcttcgtccagggtgattttaccctatcgaatatcgtcatcgatgacttcggcaatgccaagattattgacatcaacaggagaggctgcccagttggttgggaacctccggaggccactcctttgatcgacagtaatcagcgtatttccatgtatattggtgtcaaatctgatctttaccagttggggatggtgctatgggcactcgccactctcgaggatgagcccgaggcccatccacgaccccttcgtttgaagcccgagttagaagtgccattatggtaccgtcaaatagttgagaactgtctgcacgagaacccacgggttagactgcaagcaacagcactgttgacgatgttccccgaggcgtcatttgatgatgcacatgaccaagaggacttcctccatgacactacttcctttcagaaacacgacgtagatgagcgccaaaacattccaatagttcgaacggtcgaacctcggaacagttggccatattcgtccagaagtgagacgcaggcgacctcgccaagctttgaggatgagccatattacccgccacgtggtcgatctccgcctagccctctacccagccatcatgatttgtatagcttgcctcatgtcgccgaaaacgtgccaggggctaagatgcatgatgttgcagctatggattttgagtccattgctgacgatgcgagggtagagactcccagagatcttgacgacacgaccgcgctggcgaagcaactgggagacgaactcgagcaaatgcattcgagtttcctggtcgatcctggtctggaaaatgaccatgatcagaccactggtggtgatagccaggcagacgcttcgcctaacgcaaccgatgttgtaccacttgacgagaacgctggccaaatcgaagagagcgaggtacgaaacgtacaaagcgaggatgaatcggtcacaacacccacaaatgatgcggtgttgcagacaacaatggacgaggcattgtctacggatgctttgcatgctgaggaagcttttgcttcagtcccggaaagtgccgccaaaagcgcggagcttcttgatattgcagttgaaacagatgacattaacgaaaggcatacattgaagaaagaccagcctgagacgtcgcaagacgaatatattgatgacggtaaagatgatgcaaccaaggcggatgagatacaggctcagaatagcggcttggatgtaagcgacataaacgacagtacagatgacaagacagaagacgcgtctacgcgatccacagaagcagcgacgcaactggctactgatttgacctccccagaagatctaccatcaaaagaaagcctggccgatgaagcagtagatgaaagcggccgattagaagcttcagacgaagctccgatccctgtcgcgacagaagccattcaagattcagaaacttcggtctgaagaagcccgatctttcagtctacttgttggcgctgtctagccatcttatttgcaacttagccaggagttcgtggtggtcaatctatgggaggtcattgtcatttctcttgctaacagtcatttccttttctcagctttcaacttattatcacatgacgtcaaggagcggaaatatttctaactcgaaaccattactctttgaaccataggaaggtcgggatcgagtcagcatattggaatttacagcgcacagcgagcatggcatggcataatgtattgatggattattctctgacctagatacctctacctctacttggcgcattacggaacgcagaaaaggcgtgaggagcagaaatggtagctatgaaacaatgataatgacaaatcacagaatagaatattgtctcattctatttgctcgctgaatgtcaaagatgaag

SEQ ID NO: 8036 - DNA, 1509 bp, Muscodor strobelii
  misc_feature: SGI cDNA ID NO. 562455
  misc_feature: Reduced expression when VOC is produced
  misc_feature: Encodes the peptide sequence at SEQ ID NO 8037
atgctttcctcagacaggcgcttttctagcgccttgactgatcaaatagatgcacttgattcatctgagagatcaaaattcttatccgttcctccttcatctgtctggcccgagccgagaacccaatccactactgttgctcaacagccgattcccggaaccgcagcaactgcatcaccaatacccattccaagtatcaccaagaacaaacctcaagatcctcccagccatgtaaagcatgtaagatttgaggttgcgcaaccccaagtcacaccgaaaacacagcaatgcttctccgaatccgcgctaccatcgttggcgcctgtcgacggccctcagagctcacgagccgtgaaccccgttttccctcccatcttcgaggagagatatcccagatggcacgtctttccaccgccatacccgatgacttttgattcgcggcgtccgaattcgagtaccgctgaaggcaacatacctattccgatcaagagatatctacgtcaatcagcgacgtttcaagactgggtgaacgagcaaaacgagtcgcggatcgctgtacgccataactcaacatacgagaagcttgtccatgtacgatacaaattcgagtatctcgctacggaaagccggtggcctgcaacccgtgcggatgctaagcagtggatgtggcagctggaccaaattatggccaaagagcgcaagaaattctcgaaggatgagctcaggcggatcaaggacattgagaaaggcttcttggcctttgtcagtattcacaatgacgaagacactgggcccaatcagaagaaacagactccattggtgaaatcgacgcctcggcctgcactatcaagagtcgagacgctcttgggtaatgacggatcacaaccgtgtgataaatgggagccaaattggacgcatgagactctaccagatgaggttgaagttgctccgtggaacaatcttgaggcgcccccatcgccggtgacatggatgtccatagtgaaacgccgatccttcgaaactcaaatcccggagtggtacatcgtgggcgaagaagaaggcattattgtggcggatggtacgactcttggtgatcgatggcacaatttttgtcgctgtattgttgaactagaagaatacatgaggattcatgaggacgaccacaaaaagaggctggctaaagcgcggagcgagccaggtccacagtggcacagtcctcatcccggatggccaacgccacaaaggcaactaactggagggctttggagatgtcggaaaggtctgggagcgactccagccgagaatagttgcaggctctgcccaaacgtgccatgcccatggccggaacccgacatgtacgatgaggcacaatacaggcttgagcgcctaatgctacgtgttgcacgatctatggccgtggcagcgcaaccactcgatgaggacaattgcgtgaagaagcccaaaggcaaccaaatttgggtcagaggcgttcttgttcatcaagactga

SEQ ID NO: 8037 - protein, 502 aa, Muscodor strobelii
  misc_feature: SGI Peptide ID NO. 562455
  misc_feature: Useful for introducing or modulating the production of volatile compounds
MLSSDRRFSSALTDQIDALDSSERSKFLSVPPSSVWPEPRTQSTTVAQQPIPGTAATASPIPIPSITKNKPQDPPSHVKHVRFEVAQPQVTPKTQQCFSESALPSLAPVDGPQSSRAVNPVFPPIFEERYPRWHVFPPPYPMTFDSRRPNSSTAEGNIPIPIKRYLRQSATFQDWVNEQNESRIAVRHNSTYEKLVHVRYKFEYLATESRWPATRADAKQWMWQLDQIMAKERKKFSKDELRRIKDIEKGFLAFVSIHNDEDTGPNQKKQTPLVKSTPRPALSRVETLLGNDGSQPCDKWEPNWTHETLPDEVEVAPWNNLEAPPSPVTWMSIVKRRSFETQIPEWYIVGEEEGIIVADGTTLGDRWHNFCRCIVELEEYMRIHEDDHKKRLAKARSEPGPQWHSPHPGWPTPQRQLTGGLWRCRKGLGATPAENSCRLCPNVPCPWPEPDMYDEAQYRLERLMLRVARSMAVAAQPLDEDNCVKKPKGNQIWVRGVLVHQD

SEQ ID NO: 8038 - DNA, 4426 bp, Muscodor strobelii
  misc_feature: SGI EST ID NO. CUFF.19743.0
  misc_feature: Variant of the nucleotide sequence at SEQ ID NO 8036
tctgcatctagactgaatcaacaacgacataatcgagacataatgtgccatgtcacgaattcttgcgaaatggctaccgctgagccggccttcgcagcgccccttggtgatcaagtctgcacagaaatctccattgcgacccatctcttccacagttgtagggacacgggcgcaatcgactcaaccgatgcgcctccgtgaatatcaagaagaatgcatccaatccgttctatcatcattggagcaagggcacaagcgattaggcatatctttggcgacgggagccgggaagactgttgtctttacccaaatgattgaacgtatcaagccaagctctaaaacagccacgcagacattgatcttggcccatcgacgggaactcgtagagcaggcagcccgtcattgtagcaatacatatcccaacaagactgttgagatcgagatgggaaatatgcacgcctcaggaagtgcagacatcacaatcgccagtattcaaagtatcacttccggtgaccggatcagcaagttcgatcccaaactattcaaacttgtgcttgttgatgaagcccatcacattgtggcccctggatatttgcgtacgttggaacactttggtcttgactccaaaaaccttagctcgccaatccttgtgggtgtctctgcaaccttttctcgtttcgatggacttcgactcggagccgccatcgatgagattgtgtaccacaaagattacgttgatatgattggcgaaaaatggctttccaacgtgattttcacgacggtcgagtctactgcagacatctccaaggttagaaagggggcaaatggggacttccagccgggtgaattatctagagcagtcaacacagaacagatcaatgagattacggttcgcagctggcttgctcgagctaaagggaggaaatccacgctggtcttctgcgtggacttggctcacgtctccgggttgactaggacctttcggcaacacggcattgacgcgagattcgtgactggtgacacgcccaaggtcgagagaagcgatcgcttagaggcgttcaagaacggcgagtttccagtgctcgtgaactgcggtgtcttcaccgaaggaactgacatcccgaacatcgactgcgttatccttgcccgcccaactcgttctcgaaacttattggtacagatgatcggaagaggtatgcggcttcatccaaacaaaacggattgccatgtcatagacatggtgtccagtcttgagactggcattgtaacgacccctacgctttttgggttagatccatctcaactcgtcaacgaaacttctgtagatgagatgaggtccctaaaagagcgcaaggaggcagagaaagagagaaatacgggtctggctgcgaatgatccaggtgtatctggtgcaacaccattggaccctagaatcagtcgcaatatcaccttcaccgagtatgactccgtcttcgatttgatatcggatacatctggcgagaagcatatcaggtcgattagcatgcatgcatgggtgcaaattggaccacatcgatatatcctttctggcccagaagggacattcatcagacttgaaaagaatgaggtagaagcagatgaggaacctgagtttgttgcctgggagatccgagcactgccaaagggtgtctcgaaagcgccttttgcaaagcctaaccgccttctccaagctaagactttcatcgatgctgtgcatggagccgataaatatgcagcggagaaatatccccattatctcatatttaggaatacgggctggcgcaaaggtctgccgacagaaggacaactgaagttcttgaacaggctacgagatgaagatgacgagcttaaagcaaccgacattactaaaggtaaagcagcagacatgatcacgaagatacggcatggagcacgaggtcgctttgccacgctggcggctgacaagcgcaagatggagcggcaaatctcattgcaagagcatgagcgagaaatgaggctccgggagcaggtcacggtcgggccattgtcagtataggctcagtgtgttatttatgtaccaaatgttgttgtgttgaaacctggtttacttgactggcaacccgtcaccaggctcgaggggttgccaactcacatcctgtcactttgagtgcctatgtcaccacttatcactattcacctattcatctcataattttgccatttgcttttccatattacataccattcaatgagtctcactctagcccctcccattactgccacaaccacaccctcgcactcttcaggtctttgctctgctcacgcttgtctggaatctttcggtcaagtactgtaacttctcgcactggacgcgggcgcataagctagacttgaattctaccctgaacctgaattgctcagatacatcttcgggcacgaaaaagtgcaaacacctacggctccgcatgctcctcatcatcgtcgggtgttgacaatgctttcctcagacaggcgcttttctagcgccttgactgatcaaatagatgcacttgattcatctgagagatcaaaattcttatccgttcctccttcatctgtctggcccgagccgagaacccaatccactactgttgctcaacagccgattcccggaaccgcagcaactgcatcaccaatacccattccaagtatcaccaagaacaaacctcaagatcctcccagccatgtaaagcatgtaagatttgaggttgcgcaaccccaagtcacaccgaaaacacagcaatgcttctccgaatccgcgctaccatcgttggcgcctgtcgacggccctcagagctcacgagccgtgaaccccgttttccctcccatcttcgaggagagatatcccagatggcacgtctttccaccgccatacccgatgacttttgattcgcggcgtccgaattcgagtaccgctgaaggcaacatacctattccgatcaagagatatctacgtcaatcagcgacgtttcaagactgggtgaacgagcaaaacgagtcgcggatcgctgtacgccataactcaacatacgagaagcttgtccatgtacgatacaaattcgagtatctcgctacggaaagccggtggcctgcaacccgtgcggatgctaagcagtggatgtggcagctggaccaaattatggccaaagagcgcaagaaattctcgaaggatgagctcaggcggatcaaggacattgagaaaggcttcttggcctttgtcagtattcacaatgacgaagacactgggcccaatcagaagaaacagactccattggtgaaatcgacgcctcggcctgcactatcaagagtcgagacgctcttgggtaatgacggatcacaaccgtgtgataaatgggagccaaattggacgcatgagactctaccagatgaggttgaagttgctccgtggaacaatcttgaggcgcccccatcgccggtgacatggatgtccatagtgaaacgccgatccttcgaaactcaaatcccggagtggtacatcgtgggcgaagaagaaggcattattgtggcggatggtacgactcttggtgatcgatggcacaatttttgtcgctgtattgttgaactagaagaatacatgaggattcatgaggacgaccacaaaaagaggctggctaaagcgcggagcgagccaggtccacagtggcacagtcctcatcccggatggccaacgccacaaaggcaactaactggagggctttggagatgtcggaaaggtctgggagcgactccagccgagaatagttgcaggctctgcccaaacgtgccatgcccatggccggaacccgacatgtacgatgaggcacaatacaggcttgagcgcctaatgctacgtgttgcacgatctatggccgtggcagcgcaaccactcgatgaggacaattgcgtgaagaagcccaaaggcaaccaaatttgggtcagaggcgttcttgttcatcaagactgagccgtacgatgcgataacactggagattcggttctccacgatcattgctacaggacctcccgctccatcccgtctgtctaattatacttcgccaccgttcgagactccctgcaagaagaaaacttctaagagtgaggcttggctatgagcggaacgttgtgctcgattcacaagtttgctcaatgaaaaattgattcggattgctggacgcaagctatggtactgtctagttggcgagacctatcttctttcgtcagaatgcctttgacttattaccttggcttgccgatccagaaatcgaggtgttgagatggctttttcacgctgtttgttgatacccgggctctcaaatatgcctttaatgtctagtcaatactttgagaagccagttgtacaataggaagtaatcagcttcacaaatttcgc

SEQ ID NO: 8039 - DNA, 1611 bp, Muscodor strobelii
  misc_feature: SGI cDNA ID NO. 562456
  misc_feature: Encodes the peptide sequence at SEQ ID NO 8040
atgggaaatatgcacgcctcaggaagtgcagacatcacaatcgccagtattcaaagtatcacttccggtgaccggatcagcaagttcgatcccaaactattcaaacttgtgcttgttgatgaagcccatcacattgtggcccctggatatttgcgtacgttggaacactttggtcttgactccaaaaaccttagctcgccaatccttgtgggtgtctctgcaaccttttctcgtttcgatggacttcgactcggagccgccatcgatgagattgtgtaccacaaagattacgttgatatgattggcgaaaaatggctttccaacgtgattttcacgacggtcgagtctactgcagacatctccaaggttagaaagggggcaaatggggacttccagccgggtgaattatctagagcagtcaacacagaacagatcaatgagattacggttcgcagctggcttgctcgagctaaagggaggaaatccacgctggtcttctgcgtggacttggctcacgtctccgggttgactaggacctttcggcaacacggcattgacgcgagattcgtgactggtgacacgcccaaggtcgagagaagcgatcgcttagaggcgttcaagaacggcgagtttccagtgctcgtgaactgcggtgtcttcaccgaaggaactgacatcccgaacatcgactgcgttatccttgcccgcccaactcgttctcgaaacttattggtacagatgatcggaagaggtatgcggcttcatccaaacaaaacggattgccatgtcatagacatggtgtccagtcttgagactggcattgtaacgacccctacgctttttgggttagatccatctcaactcgtcaacgaaacttctgtagatgagatgaggtccctaaaagagcgcaaggaggcagagaaagagagaaatacgggtctggctgcgaatgatccaggtgtatctggtgcaacaccattggaccctagaatcagtcgcaatatcaccttcaccgagtatgactccgtcttcgatttgatatcggatacatctggcgagaagcatatcaggtcgattagcatgcatgcatgggtgcaaattggaccacatcgatatatcctttctggcccagaagggacattcatcagacttgaaaagaatgaggtagaagcagatgaggaacctgagtttgttgcctgggagatccgagcactgccaaagggtgtctcgaaagcgccttttgcaaagcctaaccgccttctccaagctaagactttcatcgatgctgtgcatggagccgataaatatgcagcggagaaatatccccattatctcatatttaggaatacgggctggcgcaaaggtctgccgacagaaggacaactgaagttcttgaacaggctacgagatgaagatgacgagcttaaagcaaccgacattactaaaggtaaagcagcagacatgatcacgaagatacggcatggagcacgaggtcgctttgccacgctggcggctgacaagcgcaagatggagcggcaaatctcattgcaagagcatgagcgagaaatgaggctccgggagcaggtcacggtcgggccattgtcagtatag

SEQ ID NO: 8040 - protein, 536 aa, Muscodor strobelii
  misc_feature: SGI Peptide ID NO. 562456
  misc_feature (179)..(255): Pfam Id: PF00271 Pfam Desc: Helicase conserved C-terminal domain
  misc_feature (2)..(78): Pfam Id: PF04851 Pfam Desc: Type III restriction enzyme, res subunit
  misc_feature (1)..(535): NCBI GI: 261352210 Blast Desc: conserved [Verticillium albo-atrum VaMs.102]
  misc_feature (1)..(534): NCBI GI: 145603330 Blast Desc: MGG_06119 [Magnaporthe grisea 70-15] gi|145011584|gb|EDJ96240.1| MGG_06119 [Magnaporthe grisea 70-15]
  misc_feature (1)..(535): NCBI GI: 116196386 Blast Desc: CHGG_04791 [Chaetomium globosum CBS 148.51] gi|88180704|gb|EAQ88172.1| CHGG_04791 [Chaetomium globosum CBS 148.51]
  misc_feature (1)..(536): NCBI GI: 256727542 Blast Desc: [Nectria haematococca mpVI 77-13-4]
  misc_feature (1)..(535): NCBI GI: 46136549 Blast Desc: FG09790.1 [Gibberella zeae PH-1]
  misc_feature (1)..(534): NCBI GI: 156050031 Blast Desc: SS1G_07601 [Sclerotinia sclerotiorum 1980] gi|154692003|gb|EDN91741.1| SS1G_07601 [Sclerotinia sclerotiorum 1980]
  misc_feature (1)..(535): NCBI GI: 164429479 Blast Desc: NCU04354 [Neurospora crassa OR74A] gi|157073493|gb|EAA26590.2| NCU04354 [Neurospora crassa OR74A]
  misc_feature (1)..(534): NCBI GI: 154318026 Blast Desc: BC1G_02996 [Botryotinia fuckeliana B05.10] gi|150843654|gb|EDN18847.1| BC1G_02996 [Botryotinia fuckeliana B05.10]
  misc_feature (1)..(535): NCBI GI: 171688604 Blast Desc: protein product [Podospora anserina] gi|170944264|emb|CAP70374.1| protein product [Podospora anserina]
  misc_feature (1)..(535): NCBI GI: 119190431 Blast Desc: CIMG_05263 [Coccidioides immitis RS] gi|240107232|gb|EER25417.1| DEAD/DEAH box helicase domain containing protein [Coccidioides posadasii C735 delta SOWgp]
MGNMHASGSADITIASIQSITSGDRISKFDPKLFKLVLVDEAHHIVAPGYLRTLEHFGLDSKNLSSPILVGVSATFSRFDGLRLGAAIDEIVYHKDYVDMIGEKWLSNVIFTTVESTADISKVRKGANGDFQPGELSRAVNTEQINEITVRSWLARAKGRKSTLVFCVDLAHVSGLTRTFRQHGIDARFVTGDTPKVERSDRLEAFKNGEFPVLVNCGVFTEGTDIPNIDCVILARPTRSRNLLVQMIGRGMRLHPNKTDCHVIDMVSSLETGIVTTPTLFGLDPSQLVNETSVDEMRSLKERKEAEKERNTGLAANDPGVSGATPLDPRISRNITFTEYDSVFDLISDTSGEKHIRSISMHAWVQIGPHRYILSGPEGTFIRLEKNEVEADEEPEFVAWEIRALPKGVSKAPFAKPNRLLQAKTFIDAVHGADKYAAEKYPHYLIFRNTGWRKGLPTEGQLKFLNRLRDEDDELKATDITKGKAADMITKIRHGARGRFATLAADKRKMERQISLQEHEREMRLREQVTVGPLSV

SEQ ID NO: 8041 - DNA, 4426 bp, Muscodor strobelii; identical to SEQ ID NO: 8038
  misc_feature: SGI EST ID NO. CUFF.19743.0
  misc_feature: Variant of the nucleotide sequence at SEQ ID NO 8039

SEQ ID NO: 8042 - DNA, 1968 bp, Muscodor strobelii
  misc_feature: SGI cDNA ID NO. 562457
  misc_feature: Encodes the peptide sequence at SEQ ID NO 8043
atggatacggactcagatgatgaatatcagcccgacagcgggagtgatgccccgaagccaagacatcgaagcgtgagagccagctcacagccgcgaagtcgggcgccttctcacgatcgcacggcaccccggaaaaggagacgcccaatgagttttactgaacgtcatgacctgccatgcttgaagcgtcagaaaggcaacctcaatacaggatatatcggtctcctcaataacgacattcaagctatcaccacgggacgaatccaggatgaagattctcaaaatacacaactggagtccacccaaatcggtgcagtcacttggagcgcagcggagaaagcatcactcttcgcggcagtgagttgtcttgggcggagtgacattgagaacatcgccttgcgcatagggacgaaaagcgagttggaggtgacgcaatacttgatgcttctcagttccgcagatcgccagcgacgtagtgatgaaggaaaacggagtcgcgctttgaaattgagcgatataccagccgcagtcgagctcagtgctgagtgcacagctgcacttgaaggcgtcgcagacggactgtcgctgcgtcaggaggcatatgaagaagacctggagaggaaacgctgggatacgcgttggttgattcacccggttcttgcgcagatcttggagctttcgttccagaatcagtcacagttgcgagaaccgagtgaggaaccacagacacccgagcacgcacggcgacagagcgttatggggagaagtgtagaaaatctgcctttcttacagcttttcccagttcggaattggttgcggttatcggagaggatattcatgaattcgaccgtacctgatggaaactggcgtgccgtcacggatgacaataatccgcctgcgatccgagccactgcatttgaggattttcatgcgctggcggtgagcatcactaagcgactggttctaactactctattcgttgctgaatctcggcttcgagcgaaaactttaggtaatgccggtcatcacacgagacgttttgtcagaaaatatgatgtcgaggcagcagcaacttcgctggggatgaaaatcaatccaaagagattctgggcaaaatgcgcgagaagtatacgactagacattgttgatgatcaagatgaggaggaaacgatcgacgagatggatgatgaggttatggatatgagcgaagacggactgtcagaaccggaagagcctggttcaagcatcgagcctgatctggatgacacagaggagcacatagaaactccgactttcgatgtgatgaattacgacgatgttgaggccgcattaggaatcattaagaacgtcaatccacaggcaaatctcgacgatttaccgagtgttccgagttccgaaacggatgatacagacatagagatggaagaccccggctctccaaccactagattcaaattaagcctatattccgatctcgaagacaacgaggagacaggactcgattccgaagccataacacaagatttccgagagtcaactatctactccgcatctctcgaatttgtcggtacagcacgagcaaaagaggctttacggtcccggatccgcgccgaacacgcactagagcaggaagcagagcgacaggatatacaagccagtgccgaagccgaaagtgatctgtggacaatgcttcgccctaggcagacagactcgaaccatactagtgatgttaataacttcacctttaagggggtctacgggccgggcaaatcttacagaacaagaagcaaatcacgacacgccgaagaagaggatgagaacgctgggcgtaaaggtagtgaattcaattcagcagacgaggatgacgtggaaccaagaccacgccaaggaggaatcatagatgttgagccagattggcgagagaacctgaaatattacagtgagtgggaaatgggtctgagaagttag

SEQ ID NO: 8043 - protein, 655 aa, Muscodor strobelii
  misc_feature: SGI Peptide ID NO. 562457
  misc_feature (61)..(605): NCBI GI: 46136551 Blast Desc: FG09791.1 [Gibberella zeae PH-1]
  misc_feature (62)..(564): NCBI GI: 85075810 Blast Desc: NCU04353 [Neurospora crassa OR74A] gi|28916845|gb|EAA26589.1| NCU04353 [Neurospora crassa OR74A]
  misc_feature (60)..(650): NCBI GI: 256726969 Blast Desc: NECHADRAFT_66482 [Nectria haematococca mpVI 77-13-4]
  misc_feature (5)..(595): NCBI GI: 261352211 Blast Desc: conserved [Verticillium albo-atrum VaMs.102]
  misc_feature (36)..(460): NCBI GI: 156050033 Blast Desc: SS1G_07602 [Sclerotinia sclerotiorum 1980] gi|154692004|gb|EDN91742.1| SS1G_07602 [Sclerotinia sclerotiorum 1980]
  misc_feature (36)..(381): NCBI GI: 154318024 Blast Desc: BC1G_02995 [Botryotinia fuckeliana B05.10] gi|150843653|gb|EDN18846.1| BC1G_02995 [Botryotinia fuckeliana B05.10]
  misc_feature (11)..(381): NCBI GI: 238841740 Blast Desc: conserved [Microsporum canis CBS 113480]
  misc_feature (71)..(398): NCBI GI: 171688606 Blast Desc: protein product [Podospora anserina] gi|170944265|emb|CAP70375.1| protein product [Podospora anserina]
  misc_feature (101)..(383): NCBI GI: 119482936 Blast Desc: NFIA_026730 [Neosartorya fischeri NRRL 181] gi|119409651|gb|EAW19599.1| conserved [Neosartorya fischeri NRRL 181]
  misc_feature (92)..(383): NCBI GI: 121711545 Blast Desc: conserved [Aspergillus clavatus NRRL 1] gi|119401539|gb|EAW11962.1| conserved [Aspergillus clavatus NRRL 1]
MDTDSDDEYQPDSGSDAPKPRHRSVRASSQPRSRAPSHDRTAPRKRRRPMSFTERHDLPCLKRQKGNLNTGYIGLLNNDIQAITTGRIQDEDSQNTQLESTQIGAVTWSAAEKASLFAAVSCLGRSDIENIALRIGTKSELEVTQYLMLLSSADRQRRSDEGKRSRALKLSDIPAAVELSAECTAALEGVADGLSLRQEAYEEDLERKRWDTRWLIHPVLAQILELSFQNQSQLREPSEEPQTPEHARRQSVMGRSVENLPFLQLFPVRNWLRLSERIFMNSTVPDGNWRAVTDDNNPPAIRATAFEDFHALAVSITKRLVLTTLFVAESRLRAKTLGNAGHHTRRFVRKYDVEAAATSLGMKINPKRFWAKCARSIRLDIVDDQDEEETIDEMDDEVMDMSEDGLSEPEEPGSSIEPDLDDTEEHIETPTFDVMNYDDVEAALGIIKNVNPQANLDDLPSVPSSETDDTDIEMEDPGSPTTRFKLSLYSDLEDNEETGLDSEAITQDFRESTIYSASLEFVGTARAKEALRSRIRAEHALEQEAERQDIQASAEAESDLWTMLRPRQTDSNHTSDVNNFTFKGVYGPGKSYRTRSKSRHAEEEDENAGRKGSEFNSADEDDVEPRPRQGGIIDVEPDWRENLKYYSEWEMGLRS

SEQ ID NO: 8044 - DNA, 2036 bp, Muscodor strobelii
  misc_feature: SGI EST ID NO. CUFF.19745.0
  misc_feature: Variant of the nucleotide sequence at SEQ ID NO 8042
tgaatatcagcccgacagcgggagtgatgccccgaagccaagacatcgaagcgtgagagccagctcacagccgcgaagtcgggcgccttctcacgatcgcacggcaccccggaaaaggagacgcccaatgagttttactgaacgtcatgacctgccatgcttgaagcgtcagaaaggcaacctcaatacaggatatatcggtctcctcaataacgacattcaagctatcaccacgggacgaatccaggatgaagattctcaaaatacacaactggagtccacccaaatcggtgcagtcacttggagcgcagcggagaaagcatcactcttcgcggcagtgagttgtcttgggcggagtgacattgagaacatcgccttgcgcatagggacgaaaagcgagttggaggtgacgcaatacttgatgcttctcagttccgcagatcgccagcgacgtagtgatgaaggaaaacggagtcgcgctttgaaattgagcgatataccagccgcagtcgagctcagtgctgagtgcacagctgcacttgaaggcgtcgcagacggactgtcgctgcgtcaggaggcatatgaagaagacctggagaggaaacgctgggatacgcgttggttgattcacccggttcttgcgcagatcttggagctttcgttccagaatcagtcacagttgcgagaaccgagtgaggaaccacagacacccgagcacgcacggcgacagagcgttatggggagaagtgtagaaaatctgcctttcttacagcttttcccagttcggaattggttgcggttatcggagaggatattcatgaattcgaccgtacctgatggaaactggcgtgccgtcacggatgacaataatccgcctgcgatccgagccactgcatttgaggattttcatgcgctggcggtgagcatcactaagcgactggttctaactactctattcgttgctgaatctcggcttcgagcgaaaactttaggtaatgccggtcatcacacgagacgttttgtcagaaaatatgatgtcgaggcagcagcaacttcgctggggatgaaaatcaatccaaagagattctgggcaaaatgcgcgagaagtatacgactagacattgttgatgatcaagatgaggaggaaacgatcgacgagatggatgatgaggttatggatatgagcgaagacggactgtcagaaccggaagagcctggttcaagcatcgagcctgatctggatgacacagaggagcacatagaaactccgactttcgatgtgatgaattacgacgatgttgaggccgcattaggaatcattaagaacgtcaatccacaggcaaatctcgacgatttaccgagtgttccgagttccgaaacggatgatacagacatagagatggaagaccccggctctccaaccactagattcaaattaagcctatattccgatctcgaagacaacgaggagacaggactcgattccgaagccataacacaagatttccgagagtcaactatctactccgcatctctcgaatttgtcggtacagcacgagcaaaagaggctttacggtcccggatccgcgccgaacacgcactagagcaggaagcagagcgacaggatatacaagccagtgccgaagccgaaagtgatctgtggacaatgcttcgccctaggcagacagactcgaaccatactagtgatgttaataacttcacctttaagggggtctacgggccgggcaaatcttacagaacaagaagcaaatcacgacacgccgaagaagaggatgagaacgctgggcgtaaaggtagtgaattcaattcagcagacgaggatgacgtggaaccaagaccacgccaaggaggaatcatagatgttgagccagattggcgagagaacctgaaatattacagtgagtgggaaatgggtctgagaagttagtgcagatgccatagcagttgtctctagattcaaggtaatcaaatcaagtctacgatcatgataaatctagtccgatactctaaaataa

SEQ ID NO: 8045 - DNA, 1944 bp, Muscodor strobelii
  misc_feature: SGI cDNA ID NO. 562458
  misc_feature: Reduced expression when VOC is produced
  misc_feature: Encodes the peptide sequence at SEQ ID NO 8046
atggatgacaacacaggctatggctctccagccaatgccgcctcgcccggcagcaatcccattctagcccagcctcctctgccgcctgctgccgccgcggcgcccccacaaccagatgatgtccagatgaagacgaggagatggggggacgcccagcccgaggccaaggaccagcccgccggcgaaggtcaagatgcgcctcccgctgccgccgagggtgctgctgcagagcccgccaagaccaaggagacgatcgagaacgccgcccgcgagcacctcatctcccagacgcacgccatcgtcctgcccagctacagcacctggttcgacatggccattatccacaacatcgagcgcaaggccctgcccgagttcttcaacaaccgcaaccgcagcaagacccccaacgtctacaaggactaccgcgacttcatgatcaacacctaccgcctcaaccccgtcgagtatctgaccgtcaccgcctgccgacgcaaccttgccggcgacgtctgcgccatcatgcgcgtccatgctttcctcgagcagtggggtctcatcaactaccaggttgacgccgaccaacgcccatcccaagtcggcccgcccttcaccggccatttcaaggtcatctgcgacaccccccgtggccttcagccttggcagccatcagcagatccagtcctgctcgaaggcaagaagaacccagacacagaccagaaggcagcgacggcagcaaccgccgctggtgaaagaaatcttgagattggtcgcaacatatatgaggctaacgccaagggcaccaagctcaccaaagacaaatccaacggtgagcccgctgctaacggcacctcggcgtcatcttcaggcgtagaggatgctctgaagggcgctgtcgccaaggtcttctgccagaactgctccatcgactgcacccgagcctactaccacctcccggaagctaaagctacggacaagactaagcatgatgtgtgccctagctgctatctcgaaggccgcatacccaacaaccaaaccaattctcagtttgtccgtatggagaataagacatactcgacaatccgtgaccgcgatgccccctggagcgatgccgaaattctccgtcttctcgaaggattggagagatacgatgacgactggtctgagattgctgaacacgttggcacgcgaagccgcgaggagtgtgtactacaattccttcaactggatattgaagataaatacctggaatcagaagccccagtacaagcaccaactgggctccagctattgggaacccacggtggttttcttcccttcagccaagcagacaatcccgtcatgtctgttatcgggtttatcgctagtctcgcagatccgaagacggccgctgccgccgctaacaagtcggttgaggaactccagcaaggtcttcgcaaccgcatcgaaggtaacggggaggccaaactcaacggaaagggcaaagagaaagagagtgactccatggagatcgatgttcgcgctgagactaccacgacaacgaccacaacgaccactaccaccaccaacgcagttgcttctatacctttagctggcatgggtgctagagctggtggattggcatcccacgaagagcgtgaaatgactcgtctactatcggctgctgtcaacgtcactctccagaaaatggagctcaagctcaaatatttcgatgagatggaggctattctccaagccgagcgacgtgagcttgagcgaggcaggcagcagctgttcctggaccgcttggcctttaagaagcgagttcgcgagacacgagagagtctcaaggccggcaatggcatggccccagctggcggcagcggcctgagcttcacgcccgcccctgccgtgtcggctgtgcagccactcagtgcgggaggacctattaagagttacgacgcctag

SEQ ID NO: 8046 - protein, 647 aa, Muscodor strobelii
  misc_feature: SGI Peptide ID NO. 562458
  misc_feature (364)..(409): Pfam Id: PF00249 Pfam Desc: Myb-like DNA-binding domain
  misc_feature (100)..(188): Pfam Id: PF04433 Pfam Desc: SWIRM domain
  misc_feature (7)..(647): NCBI GI: 85108949 Blast Desc: NCU08003 [Neurospora crassa OR74A] gi|28924284|gb|EAA33437.1| conserved [Neurospora crassa OR74A] gi|39979152|emb|CAE85526.1| related to nucleosome remodeling RSC8
  misc_feature (1)..(647): NCBI GI: 46110086 Blast Desc: FG01925.1 [Gibberella zeae PH-1]
  misc_feature (1)..(647): NCBI GI: 256720758 Blast Desc: SWI/SNF complex protein [Nectria haematococca mpVI 77-13-4]
  misc_feature (1)..(647): NCBI GI: 171690890 Blast Desc: protein product [Podospora anserina] gi|170945393|emb|CAP71505.1| protein product [Podospora anserina]
  misc_feature (1)..(647): NCBI GI: 39952155 Blast Desc: MGG_01720 [Magnaporthe grisea 70-15] gi|145020436|gb|EDK04565.1| MGG_01720 [Magnaporthe grisea 70-15]
  misc_feature (1)..(646): NCBI GI: 154318022 Blast Desc: BC1G_02994 [Botryotinia fuckeliana B05.10] gi|150843652|gb|EDN18845.1| BC1G_02994 [Botryotinia fuckeliana B05.10]
  misc_feature (14)..(646): NCBI GI: 156050035 Blast Desc: SS1G_07603 [Sclerotinia sclerotiorum 1980] gi|154692005|gb|EDN91743.1| SS1G_07603 [Sclerotinia sclerotiorum 1980]
  misc_feature (1)..(646): NCBI GI: 261355793 Blast Desc: transcription regulatory protein SWI3 [Verticillium albo-atrum VaMs.102]
  misc_feature (15)..(646): NCBI GI: 238841741 Blast Desc: transcription regulatory protein SWI3 [Microsporum canis CBS 113480]
  misc_feature (7)..(646): NCBI GI: 238482655 Blast Desc: RSC complex subunit (RSC8), [Aspergillus flavus NRRL3357] gi|220700616|gb|EED56954.1| RSC complex subunit (RSC8), [Aspergillus flavus NRRL3357]
  misc_feature: Useful for introducing or modulating the production of volatile compounds
MDDNTGYGSPANAASPGSNPILAQPPLPPAAAAAPPQPDDVQMKTRRWGDAQPEAKDQPAGEGQDAPPAAAEGAAAEPAKTKETIENAAREHLISQTHAIVLPSYSTWFDMAIIHNIERKALPEFFNNRNRSKTPNVYKDYRDFMINTYRLNPVEYLTVTACRRNLAGDVCAIMRVHAFLEQWGLINYQVDADQRPSQVGPPFTGHFKVICDTPRGLQPWQPSADPVLLEGKKNPDTDQKAATAATAAGERNLEIGRNIYEANAKGTKLTKDKSNGEPAANGTSASSSGVEDALKGAVAKVFCQNCSIDCTRAYYHLPEAKATDKTKHDVCPSCYLEGRIPNNQTNSQFVRMENKTYSTIRDRDAPWSDAEILRLLEGLERYDDDWSEIAEHVGTRSREECVLQFLQLDIEDKYLESEAPVQAPTGLQLLGTHGGFLPFSQADNPVMSVIGFIASLADPKTAAAAANKSVEELQQGLRNRIEGNGEAKLNGKGKEKESDSMEIDVRAETTTTTTTTTTTTTNAVASIPLAGMGARAGGLASHEEREMTRLLSAAVNVTLQKMELKLKYFDEMEAILQAERRELERGRQQLFLDRLAFKKRVRETRESLKAGNGMAPAGGSGLSFTPAPAVSAVQPLSAGGPIKSYDA

SEQ ID NO: 8047 - DNA, 2910 bp, Muscodor strobelii
  misc_feature: SGI EST ID NO. CUFF.19887.1
  misc_feature: Variant of the nucleotide sequence at SEQ ID NO 8045
gaccacttttgcctagtcgtaattagcaagacccgaccgattccatctccccatcgacgcttgccccagctcacccattgcccagctcagcgctctgtccgcactacagtagccagtcgagccagtcgcgccgaaatttgttctccaaacgcgcgatcgatccagcctcatcctcctcccatcgcatcgtcgcattgcgaagcagaaccatcttatcccttaatatcgatagccactcgcagcttagcgttctgcgagctttgcgcatcgtctcgagctacacatttcccctgacgccccgtacccttttcaattctcgatgacttgagggtcaccgaccaactacctccaaccccaactcgcgccgcttcaatccatcgcctccaaggcgccgtcgttcatcaccactttcaagatggatgacaacacaggctatggctctccagccaatgccgcctcgcccggcagcaatcccattctagcccagcctcctctgccgcctgctgccgccgcggcgcccccacaaccagatgatgtccagatgtccgaggccgcatcggcggagcctgccattaagcaagacagcaccacgcctgcacccacgggtacttctgacaaccccctcgatgcgccccctgcaccacccgctgagtccactatagccaaggaagacgaggagatggggggacgcccagcccgaggccaaggaccagcccgccggcgaaggtcaagatgcgcctcccgctgccgccgagggtgctgctgcagagcccgccaagaccaaggagacgatcgagaacgccgcccgcgagcacctcatctcccagacgcacgccatcgtcctgcccagctacagcacctggttcgacatggccattatccacaacatcgagcgcaaggccctgcccgagttcttcaacaaccgcaaccgcagcaagacccccaacgtctacaaggactaccgcgacttcatgatcaacacctaccgcctcaaccccgtcgagtatctgaccgtcaccgcctgccgacgcaaccttgccggcgacgtctgcgccatcatgcgcgtccatgctttcctcgagcagtggggtctcatcaactaccaggttgacgccgaccaacgcccatcccaagtcggcccgcccttcaccggccatttcaaggtcatctgcgacaccccccgtggccttcagccttggcagccatcagcagatccagtcctgctcgaaggcaagaagaacccagacacagaccagaaggcagcgacggcagcaaccgccgctggtgaaagaaatcttgagattggtcgcaacatatatgaggctaacgccaagggcaccaagctcaccaaagacaaatccaacggtgagcccgctgctaacggcacctcggcgtcatcttcaggcgtagaggatgctctgaagggcgctgtcgccaaggtcttctgccagaactgctccatcgactgcacccgagcctactaccacctcccggaagctaaagctacggacaagactaagcatgatgtgtgccctagctgctatctcgaaggccgcatacccaacaaccaaaccaattctcagtttgtccgtatggagaataagacatactcgacaatccgtgaccgcgatgccccctggagcgatgccgaaattctccgtcttctcgaaggattggagagatacgatgacgactggtctgagattgctgaacacgttggcacgcgaagccgcgaggagtgtgtactacaattccttcaactggatattgaagataaatacctggaatcagaagccccagtacaagcaccaactgggctccagctattgggaacccacggtggttttcttcccttcagccaagcagacaatcccgtcatgtctgttatcgggtttatcgctagtctcgcagatccgaagacggccgctgccgccgctaacaagtcggttgaggaactccagcaaggtcttcgcaaccgcatcgaaggtaacggggaggccaaactcaacggaaagggcaaagagaaagagagtgactccatggagatcgatgttcgcgctgagactaccacgacaacgaccacaacgaccactaccaccaccaacgcagttgcttctatacctttagctggcatgggtgctagagctggtggattggcatcccacgaagagcgtgaaatgactcgtctactatcggctgctgtcaacgtcactctccagaaaatggagctcaagctcaaatatttcgatgagatggaggctattctccaagccgagcgacgtgagcttgagcgaggcaggcagcagctgttcctggaccgcttggcctttaagaagcgagttcgcgagacacgagagagtctcaaggccggcaatggcatggccccagctggcggcagcggcctgagcttcacgcccgcccctgccgtgtcggctgtgcagccactcagtgcgggaggacctattaagagttacgacgcctaggaggttcgcactatgtttaggtcgggtgtgtattagtgcgatggtgtaagtggtgtaagcggcgaaattcagggattatctggtaacggacaggcttcagcttatgagttttctgcactatttctttaaaacaggcgttcgaggggcaaggctttggcagagtgcctagagcttgatgttatttccctgttcttctgctggaacagtgtccggaataaaatgtactatcacagagcaacggatactcctgatgagagctgagagaaggtggttggtacctcgccggtacaatatgaagtgatttctccaatgactccatatcttctgcgttcgtgatcgagtgtgactcaggtgaagatcatgttacaaaattgccaagacgaaacgatgaaattgccatactctacgacgagtcttaagataatca

SEQ ID NO: 8048 - DNA, 1029 bp, Muscodor strobelii
  misc_feature: SGI cDNA ID NO. 562459
  misc_feature: Encodes the peptide sequence at SEQ ID NO 8049
atgttgcccgccgctagaagagccgtcctccggccgctcgcgcgctcctgtcccttccaccagtccgctatccagaggctgttgtcgtcacttgctgttctcgaacagcgcgagggcgtgctcaaccatggatctctcagcgcaatcaccgctgccaaagccataggcggacccatccatgcgtttgtcgctggcagcaatatcaaggccgttgctgaagaagctgccaaagtagagggtgtcgacaagatcattgctgtcgacagtgcttcttacgacaagggtcttgctgaaacgtacgctcccttgttggtcgagaatatcaagaagggcggatacacacacatcatcgccggccacactgccttcggcaagaacctgctgcctcgcgtcgccgctctgctcgattcccagcagatctccgacatcaccgccatagaaaatgagaacaccttcgtccggcctatatatgcaggcaatgccatcgccaccgtcgagtcttccgatcccgtcaagttcatcaccataagaggcaccgccttccccgccgccgagatacagggcggttctgccaccgtcgaggccggtgttgaccccaagtccgaggcgtcagctgagtggttatccgaggacttggccaagtcggaccgcccagatcttgccacggccggcaaggtcgtctccggcggccgtggtctgaagtccaaggaggacttcgacaaggtcatgcttccgcttgccgataccataggcgctgcagttggcgcatcgcgtgccgctgtggatagtggctatgccgacaatagtctgcaggtcggtcagacgggtaaggttgtggcgccccagctgtacatggctgtgggcatttctggcgccattcagcatttggccggtatgaaggacagcaaggtgatagcagccatcaacaaggacgccgatgctcctatattccaagttgccgacgttggtcttgtcggcgatctatttgagaaagttcccgagttgaccgagaagctcaaaagctcatag

SEQ ID NO: 8049 - protein, 342 aa, Muscodor strobelii
  misc_feature: SGI Peptide ID NO. 562459
  misc_feature (29)..(211): Pfam Id: PF01012 Pfam Desc: Electron transfer flavoprotein domain
  misc_feature (217)..(303): Pfam Id: PF00766 Pfam Desc: Electron transfer flavoprotein FAD-binding domain
  misc_feature (3)..(341): NCBI GI: 171690888 Blast Desc: protein product [Podospora anserina] gi|170945392|emb|CAP71504.1| protein product [Podospora anserina]
  misc_feature (4)..(340): NCBI GI: 261355794 Blast Desc: electron transfer flavoprotein subunit alpha [Verticillium albo-atrum VaMs.102]
  misc_feature (1)..(342): NCBI GI: 145613347 Blast Desc: conserved [Magnaporthe grisea 70-15] gi|145020437|gb|EDK04566.1| conserved [Magnaporthe grisea 70-15]
  misc_feature (1)..(342): NCBI GI: 164423647 Blast Desc: electron transfer flavoprotein alpha-subunit, mitochondrial precursor [Neurospora crassa OR74A] gi|39979151|emb|CAE85525.1| electron transfer flavoprotein alpha
  misc_feature (7)..(340): NCBI GI: 154318020 Blast Desc: conserved [Botryotinia fuckeliana B05.10] gi|150843651|gb|EDN18844.1| conserved [Botryotinia fuckeliana B05.10]
  misc_feature (14)..(342): NCBI GI: 256720977 Blast Desc: [Nectria haematococca mpVI 77-13-4]
  misc_feature (1)..(341): NCBI GI: 119482926 Blast Desc: electron transfer flavoprotein alpha subunit, [Neosartorya fischeri NRRL 181] gi|119409646|gb|EAW19594.1| electron transfer flavoprotein alpha subunit, [Neosartorya NRRL
  misc_feature (1)..(341): NCBI GI: 169766020 Blast Desc: [Aspergillus oryzae RIB40] gi|238482647|ref|XP_002372562.1| electron transfer flavoprotein alpha subunit, [Aspergillus flavus NRRL3357] protein product
  misc_feature (1)..(341): NCBI GI: 115399950 Blast Desc: electron transfer flavoprotein alpha-subunit, mitochondrial precursor [Aspergillus terreus NIH2624] gi|114191230|gb|EAU32930.1| electron transfer flavoprotein
  misc_feature (1)..(341): NCBI GI: 70986952 Blast Desc: electron transfer flavoprotein alpha subunit [Aspergillus fumigatus Af293] gi|66846592|gb|EAL86924.1| electron transfer flavoprotein alpha subunit, [Aspergillus fumigatus alpha
MLPAARRAVLRPLARSCPFHQSAIQRLLSSLAVLEQREGVLNHGSLSAITAAKAIGGPIHAFVAGSNIKAVAEEAAKVEGVDKIIAVDSASYDKGLAETYAPLLVENIKKGGYTHIIAGHTAFGKNLLPRVAALLDSQQISDITAIENENTFVRPIYAGNAIATVESSDPVKFITIRGTAFPAAEIQGGSATVEAGVDPKSEASAEWLSEDLAKSDRPDLATAGKVVSGGRGLKSKEDFDKVMLPLADTIGAAVGASRAAVDSGYADNSLQVGQTGKVVAPQLYMAVGISGAIQHLAGMKDSKVIAAINKDADAPIFQVADVGLVGDLFEKVPELTEKLKSS

SEQ ID NO: 8050 - DNA, 2997 bp, Muscodor strobelii
  misc_feature: SGI EST ID NO. CUFF.19858.0
  misc_feature: Variant of the nucleotide sequence at SEQ ID NO 8048
tcaatgctctcaccttgtccggcctgctccggctgtagcagagtgggaacagtagagtccgcgacgaggtcatgaccatcatcccgctgtcgacacactctaccctcgaactcccttcctgacatcgacaccggtgctgcgcagttgcaaccaggacttcaattgcgtgtgtgtcgacatgttgcccgccgctagaagagccgtcctccggccgctcgcgcgctcctgtcccttccaccagtccgctatccagaggctgttgtcgtcacttgctgttctcgaacagcgcgagggcgtgctcaaccatggatctctcagcgcaatcaccgctgccaaagccataggcggacccatccatgcgtttgtcgctggcagcaatatcaaggccgttgctgaagaagctgccaaagtagagggtgtcgacaagatcattgctgtcgacagtgcttcttacgacaagggtcttgctgaaacgtacgctcccttgttggtcgagaatatcaagaagggcggatacacacacatcatcgccggccacactgccttcggcaagaacctgctgcctcgcgtcgccgctctgctcgattcccagcagatctccgacatcaccgccatagaaaatgagaacaccttcgtccggcctatatatgcaggcaatgccatcgccaccgtcgagtcttccgatcccgtcaagttcatcaccataagaggcaccgccttccccgccgccgagatacagggcggttctgccaccgtcgaggccggtgttgaccccaagtccgaggcgtcagctgagtggttatccgaggacttggccaagtcggaccgcccagatcttgccacggccggcaaggtcgtctccggcggccgtggtctgaagtccaaggaggacttcgacaaggtcatgcttccgcttgccgataccataggcgctgcagttggcgcatcgcgtgccgctgtggatagtggctatgccgacaatagtctgcaggtcggtcagacgggtaaggttgtggcgccccagctgtacatggctgtgggcatttctggcgccattcagcatttggccggtatgaaggacagcaaggtgatagcagccatcaacaaggacgccgatgctcctatattccaagttgccgacgttggtcttgtcggcgatctatttgagaaagttcccgagttgaccgagaagctcaaaagctcatagtatatacagtaaaattacataataaacatagatcggcccgcgagggcgttgtttgagatctacgctctgctggtgctggcagccaacatctctcccgtgctggtgaatttctctcgctctttaccgacaagtagacccctttctctttcggctttatcgatccttttccagtcttgccaatgtatgacccggcttcgctccttgtcgacttctgattgcaatccttcccagccacgagggcagtccgatggtaggaacggactcgcggcatcccaatcagcggcaatggcgtcgcccgtagaaaacgcatcggccatggtcgatgcaatgacaccggtcggtcccctttttacccatccagcgcagtagacaccctggagatgcgtcctctggttgctgtcatcggcattgcttgggctgttttgtagaacgcgtccaaatccgtcattttctatcacgccccttttctcgtcaaacagcacgcctgcttcagagaacccgggcagcgccactgacttgtagccaatggatcgaaatacagctgatgatggtagttctagcttctcgcccagattttggacaccggaagacggatcaaaaggccatgagagcgatgttagttggaattcggtactagatacatgcccatccgagttaccgacaaaagcggtgggtgataagcagaaatcgagggaccacgacttagaagacgcctcggcttggctcgtagaacctttcagtaagacctccatcaagcgccttcggggtcgagggagttgagagatctcatcaggtaagagggacatgtcaatcgggtggaatccgacatcgtgcagtttcatcagctctcgtacttctttgattgtgaaagcggcctgttcaaaagtgagcacacagttttccattgatatatcctttagaagagttcatacttgcatcgggcctctccgcccaacaacatgtacgcgcttaatccgactcttggaaagggtctctatagccgtatccgtgatgtctgactttcgcaagacgtcgacattctctaacatcatccgagctacatcaagagctacattgccttggccaataatgactgcttcctcgccctgcgtcagatcaggggccagatgagcaaactccggtaagccattataccagccgacaaattcgcgcgccgagtatataccgcggagctcagactcatttgaaatgccaagttttttgtctttagcagcgccatatgcaaacacgacggcgtcgtaatgacgcatcagtgaattaagcggaatagtacacccgtcaaaatggccgccaggattgccaatagacacattgccgatgaaggtgaagtcgggcgagctcgccacttcttcgaatttatcctggcagttctacagatatccagtcagtcaacgtgttgtaagtggttgtctcttccttttcctcatactttgacctcgggatgatctggcgcaacaccgaaacgaacgagaccaaacggtacaggtagagcttcaaacatatccaccttggcccctacgattttagacatgactctgtaggccgtataaaaaccggcaggaccggaaccgactacggccatgcgcaatggcctgttccgaccatttacggtggcataccggcgatagctcattgaaacccatgatttcgaggcacggatatttcctgtcgctgctctacgtaggcatgtcttgcagagccatgaattggtaagagacgacataatctacaaagacaagtgccctgtcaaacacattatagaaatgcag

SEQ ID NO: 8051 - DNA, 1428 bp, Muscodor strobelii
  misc_feature: SGI cDNA ID NO. 562460
  misc_feature: Encodes the peptide sequence at SEQ ID NO 8052
atggccgtagtcggttccggtcctgccggtttttatacggcctacagagtcatgtctaaaatcgtaggggccaaggtggatatgtttgaagctctacctgtaccgtttggtctcgttcgtttcggtgttgcgccagatcatcccgaggtcaaaaactgccaggataaattcgaagaagtggcgagctcgcccgacttcaccttcatcggcaatgtgtctattggcaatcctggcggccattttgacgggtgtactattccgcttaattcactgatgcgtcattacgacgccgtcgtgtttgcatatggcgctgctaaagacaaaaaacttggcatttcaaatgagtctgagctccgcggtatatactcggcgcgcgaatttgtcggctggtataatggcttaccggagtttgctcatctggcccctgatctgacgcagggcgaggaagcagtcattattggccaaggcaatgtagctcttgatgtagctcggatgatgttagagaatgtcgacgtcttgcgaaagtcagacatcacggatacggctatagagaccctttccaagagtcggattaagcgcgtacatgttgttgggcggagaggcccgatgcaagccgctttcacaatcaaagaagtacgagagctgatgaaactgcacgatgtcggattccacccgattgacatgtccctcttacctgatgagatctctcaactccctcgaccccgaaggcgcttgatggaggtcttactgaaaggttctacgagccaagccgaggcgtcttctaagtcgtggtccctcgatttctgcttatcacccaccgcttttgtcggtaactcggatgggcatgtatctagtaccgaattccaactaacatcgctctcatggccttttgatccgtcttccggtgtccaaaatctgggcgagaagctagaactaccatcatcagctgtatttcgatccattggctacaagtcagtggcgctgcccgggttctctgaagcaggcgtgctgtttgacgagaaaaggggcgtgatagaaaatgacggatttggacgcgttctacaaaacagcccaagcaatgccgatgacagcaaccagaggacgcatctccagggtgtctactgcgctggatgggtaaaaaggggaccgaccggtgtcattgcatcgaccatggccgatgcgttttctacgggcgacgccattgccgctgattgggatgccgcgagtccgttcctaccatcggactgccctcgtggctgggaaggattgcaatcagaagtcgacaaggagcgaagccgggtcatacattggcaagactggaaaaggatcgataaagccgaaagagaaaggggtctacttgtcggtaaagagcgagagaaattcaccagcacgggagagatgttggctgccagcaccagcagagcgtag

SEQ ID NO: 8052 - protein, 475 aa, Muscodor strobelii
  misc_feature: SGI Peptide ID NO. 562460
  misc_feature (1)..(469): NCBI GI: 46110090 Blast Desc: FG01927.1 [Gibberella zeae PH-1]
  misc_feature (1)..(469): NCBI GI: 256720757 Blast Desc: [Nectria haematococca mpVI 77-13-4]
  misc_feature (1)..(468): NCBI GI: 261355795 Blast Desc: NADPH:adrenodoxin oxidoreductase [Verticillium albo-atrum VaMs.102]
  misc_feature (1)..(468): NCBI GI: 238496697 Blast Desc: NADPH-adrenodoxin reductase Arh1, [Aspergillus flavus NRRL3357] gi|220694464|gb|EED50808.1| NADPH-adrenodoxin reductase Arh1, [Aspergillus flavus NRRL3357]
  misc_feature (1)..(468): NCBI GI: 169774713 Blast Desc: [Aspergillus oryzae RIB40] gi|83769687|dbj|BAE59822.1| protein product [Aspergillus oryzae]
  misc_feature (1)..(468): NCBI GI: 119481375 Blast Desc: NADPH-adrenodoxin reductase, [Neosartorya fischeri NRRL 181] gi|119408870|gb|EAW18819.1| NADPH-adrenodoxin reductase, [Neosartorya fischeri NRRL 181]
  misc_feature (1)..(468): NCBI GI: 71001824 Blast Desc: NADPH-adrenodoxin reductase Arh1 [Aspergillus fumigatus Af293] gi|66853231|gb|EAL93555.1| NADPH-adrenodoxin reductase Arh1, [Aspergillus fumigatus Af293] NADPH-adrenodoxin
  misc_feature (1)..(469): NCBI GI: 242809561 Blast Desc: NADPH-adrenodoxin reductase Arh1, [Talaromyces stipitatus ATCC 10500] gi|218716020|gb|EED15442.1| NADPH-adrenodoxin reductase Arh1, [Talaromyces stipitatus ATCC
  misc_feature (1)..(468): NCBI GI: 240275834 Blast Desc: NADPH-adrenodoxin oxidoreductase [Ajellomyces capsulatus H143]
  misc_feature (1)..(468): NCBI GI: 225563244 Blast Desc: NADPH:adrenodoxin oxidoreductase [Ajellomyces capsulatus G186AR]
  misc_feature (1)..(468): SWISSPROT Homolog: EC 1.18.1.2 Ferredoxin--NADP(+) reductase
MAVVGSGPAGFYTAYRVMSKIVGAKVDMFEALPVPFGLVRFGVAPDHPEVKNCQDKFEEVASSPDFTFIGNVSIGNPGGHFDGCTIPLNSLMRHYDAVVFAYGAAKDKKLGISNESELRGIYSAREFVGWYNGLPEFAHLAPDLTQGEEAVIIGQGNVALDVARMMLENVDVLRKSDITDTAIETLSKSRIKRVHVVGRRGPMQAAFTIKEVRELMKLHDVGFHPIDMSLLPDEISQLPRPRRRLMEVLLKGSTSQAEASSKSWSLDFCLSPTAFVGNSDGHVSSTEFQLTSLSWPFDPSSGVQNLGEKLELPSSAVFRSIGYKSVALPGFSEAGVLFDEKRGVIENDGFGRVLQNSPSNADDSNQRTHLQGVYCAGWVKRGPTGVIASTMADAFSTGDAIAADWDAASPFLPSDCPRGWEGLQSEVDKERSRVIHWQDWKRIDKAERERGLLVGKEREKFTSTGEMLAASTSRA

SEQ ID NO: 8053 - DNA, 2942 bp, Muscodor strobelii
  misc_feature: SGI EST ID NO. CUFF.19859.1
  misc_feature: Variant of the nucleotide sequence at SEQ ID NO 8051
ctgcatttctataatgtgtttgacagggcacttgtctttgtagattatgtcgtctcttaccaattcatggctctgcaagacatgcctacgtagagcagcgacaggaaatatccgtgcctcgaaatcatgggtttcaatgagctatcgccggtatgccaccgtaaatggtcggaacaggccattgcgcatggccgtagtcggttccggtcctgccggtttttatacggcctacagagtcatgtctaaaatcgtaggggccaaggtggatatgtttgaagctctacctgtaccgtttggtctcgttcgtttcggtgttgcgccagatcatcccgaggtcaaaaactgccaggataaattcgaagaagtggcgagctcgcccgacttcaccttcatcggcaatgtgtctattggcaatcctggcggccattttgacgggtgtactattccgcttaattcactgatgcgtcattacgacgccgtcgtgtttgcatatggcgctgctaaagacaaaaaacttggcatttcaaatgagtctgagctccgcggtatatactcggcgcgcgaatttgtcggctggtataatggcttaccggagtttgctcatctggcccctgatctgacgcagggcgaggaagcagtcattattggccaaggcaatgtagctcttgatgtagctcggatgatgttagagaatgtcgacgtcttgcgaaagtcagacatcacggatacggctatagagaccctttccaagagtcggattaagcgcgtacatgttgttgggcggagaggcccgatgcaagccgctttcacaatcaaagaagtacgagagctgatgaaactgcacgatgtcggattccacccgattgacatgtccctcttacctgatgagatctctcaactccctcgaccccgaaggcgcttgatggaggtcttactgaaaggttctacgagccaagccgaggcgtcttctaagtcgtggtccctcgatttctgcttatcacccaccgcttttgtcggtaactcggatgggcatgtatctagtaccgaattccaactaacatcgctctcatggccttttgatccgtcttccggtgtccaaaatctgggcgagaagctagaactaccatcatcagctgtatttcgatccattggctacaagtcagtggcgctgcccgggttctctgaagcaggcgtgctgtttgacgagaaaaggggcgtgatagaaaatgacggatttggacgcgttctacaaaacagcccaagcaatgccgatgacagcaaccagaggacgcatctccagggtgtctactgcgctggatgggtaaaaaggggaccgaccggtgtcattgcatcgaccatggccgatgcgttttctacgggcgacgccattgccgctgattgggatgccgcgagtccgttcctaccatcggactgccctcgtggctgggaaggattgcaatcagaagtcgacaaggagcgaagccgggtcatacattggcaagactggaaaaggatcgataaagccgaaagagaaaggggtctacttgtcggtaaagagcgagagaaattcaccagcacgggagagatgttggctgccagcaccagcagagcgtagatctcaaacaacgccctcgcgggccgatctatgtttattatgtaattttactgtatatactatgagcttttgagcttctcggtcaactcgggaactttctcaaatagatcgccgacaagaccaacgtcggcaacttggaatataggagcatcggcgtccttgttgatggctgctatcaccttgctgtccttcataccggccaaatgctgaatggcgccagaaatgcccacagccatgtacagctggggcgccacaaccttacccgtctgaccgacctgcagactattgtcggcatagccactatccacagcggcacgcgatgcgccaactgcagcgcctatggtatcggcaagcggaagcatgaccttgtcgaagtcctccttggacttcagaccacggccgccggagacgaccttgccggccgtggcaagatctgggcggtccgacttggccaagtcctcggataaccactcagctgacgcctcggacttggggtcaacaccggcctcgacggtggcagaaccgccctgtatctcggcggcggggaaggcggtgcctcttatggtgatgaacttgacgggatcggaagactcgacggtggcgatggcattgcctgcatatataggccggacgaaggtgttctcattttctatggcggtgatgtcggagatctgctgggaatcgagcagagcggcgacgcgaggcagcaggttcttgccgaaggcagtgtggccggcgatgatgtgtgtgtatccgcccttcttgatattctcgaccaacaagggagcgtacgtttcagcaagaccctagtgagaagcatgagcatgtattcttaaccattgcaattggaagtaatgggtgatataccttgtcgtaagaagcactgtcgacagcaatgatcttgtcgacaccctctactttggcagcttcttcagcaacggccttgatattgctgccagcgacaaacgcatggatgggtccgcctatggctttggcagcggtgattgcgctgagagatccatggttgagcacgccctcgcgctgttcgagaacagcaagtgacgacaacagcctctggatagcggactggtggaagggacaggagcgcgcgagcggccggaggacggctcttctagcggcgggcaacatgtcgacacacacgcaattgaagtcctggttgcaactgcgcagcaccggtgtcgatgtcaggaagggagttcgagggtagagtgtgtcgacagcgggatgatggtcatgacctcgtcgcggactctactgttcccactctgctacagccggagcaggccggacaaggtgagagcattga

SEQ ID NO: 8054 - DNA, 1788 bp, Muscodor strobelii
  misc_feature: SGI cDNA ID NO. 562461
  misc_feature: Encodes the peptide sequence at SEQ ID NO 8055
atgggggcgcaacaaccttatttgtacacctcgaattctcgagattcgagactgcccgagaaagagttcgacccaaaagcgatcactagggcgagctgggagcccaaacccaagaagccgaagcaacatggcccgcttgtatctttcaatcgccatccggacgcgcatgaagtgttgcctggcagaacatacagcaactttcggccgatgagcgacagagcgaaatggtggataaaatggactcgatacttccaacttctgctgcgcgctattgagctgctcgccgcagctggacttctcgcactcatgatcctcatcaacaaagttcaaccattgacagcttggatcctacgaattgcgcccggtatcatcatcctatgcaatgcttacgctattctacatctcgcaaaacctgcacgagcaaggcctcccgcttcttcggctgcgtaccaattgtttgccggactcactgacttggctatcgtctcgatctacgcctttggaggaatctcagtggtcaaggaaagcgagaaatgggacactcttttggtcgacaaatggtacctcccatggttcatcaagggagaatactacggtcttataggcgcaggaggtctccatctcatttctttggggatctcactgtatcttggtttaatcttcaagcgcattgccaacatgccgccggacatgaacccactagagagcaatctcacatcccgggcgaagcataagcgcagcaagtcatcgatcgcgagcgactacacttcggtctctcagagcaccaagcgtctctcaacaccgctcgaggagtatcgcaggtcgggagcaccatacgaaagtctgtcccgcccgccaagtatccctttcatgcatacacgtagcggctcgcaagactcgatgtcctcatctaaacgtgactctcgcgtcgatctacccagtcgtcaatatcagattgttcctgattcgaaccgtacgtccactcccaagctggctcagcgaggtagctacatggagatcccgcttcatgagacaggatctccctcaccctcacggcctagtagcgttgcaacagcggctgcatcgcagccaatcaatgcctcgccaacacggatagccaagttcacggagaagtgcgagcaaaaggcttacgaggcgctaactctgccatacggcgacgatgagtcagaagacgagcatatgcgacctggtgatgcttcagactacagtgattatgagaatgatgaacccatcaacgtgatgggcaatatgcaccatccgaacccattgcggtacaaccccgtcacttccacccctccccgaagcagtgcttcaaatacgccccgacaaaagacacctttccgcccgcacgattcagcgccagttttaggagaggtcagctccaatgcccggcgcgtgagcggtagccaggatatcgcggacgccaagtctgctcccgctcctgggcgtcgtggtacaataatcggaaactggggtcggaataagggaattagaaactcctctattcaacacgacgaccagttctactccaagccctacggtgagctgaggagcgcaacgccgccggtcatggtcggtgagaatggaaatcttacggcaagtccgcgagctggaaacggtcgccaagtttcatctggaaatgactatgacttgggctcgggtagagataagacctaccgtcgtaacgtcagtgggaaggcagctgaagagggaatggccggcccggggacttcgagattttcgcgttatggacctttagatgagtaa

SEQ ID NO: 8055 - protein, 595 aa, Muscodor strobelii
  misc_feature: SGI Peptide ID NO. 562461
  misc_feature (1)..(588): NCBI GI: 261355796 Blast Desc: conserved [Verticillium albo-atrum VaMs.102]
  misc_feature (3)..(588): NCBI GI: 256720976 Blast Desc: NECHADRAFT_96797 [Nectria haematococca mpVI 77-13-4]
  misc_feature (2)..(581): NCBI GI: 171690884 Blast Desc: protein product [Podospora anserina] gi|170945390|emb|CAP71502.1| protein product [Podospora anserina]
  misc_feature (3)..(587): NCBI GI: 145613351 Blast Desc: MGG_01717 [Magnaporthe grisea 70-15] gi|145020439|gb|EDK04568.1| MGG_01717 [Magnaporthe grisea 70-15]
  misc_feature (3)..(581): NCBI GI: 46110092 Blast Desc: FG01928.1 [Gibberella zeae PH-1]
  misc_feature (1)..(581): NCBI GI: 154318016 Blast Desc: BC1G_02991 [Botryotinia fuckeliana B05.10] gi|150843649|gb|EDN18842.1| BC1G_02991 [Botryotinia fuckeliana B05.10]
  misc_feature (13)..(581): NCBI GI: 85108955 Blast Desc: NCU08006 [Neurospora crassa OR74A] gi|28924287|gb|EAA33440.1| [Neurospora crassa OR74A] gi|39979149|emb|CAE85523.1| [Neurospora crassa]
  misc_feature (1)..(581): NCBI GI: 156050041 Blast Desc: SS1G_07606 [Sclerotinia sclerotiorum 1980] gi|154692008|gb|EDN91746.1| SS1G_07606 [Sclerotinia sclerotiorum 1980]
  misc_feature (2)..(516): NCBI GI: 116195896 Blast Desc: CHGG_04546 [Chaetomium globosum CBS 148.51] gi|88180459|gb|EAQ87927.1| CHGG_04546 [Chaetomium globosum CBS 148.51]
  misc_feature (1)..(326): NCBI GI: 261195294 Blast Desc: conserved [Ajellomyces dermatitidis SLH14081] gi|239587923|gb|EEQ70566.1| conserved [Ajellomyces dermatitidis SLH14081]
MGAQQPYLYTSNSRDSRLPEKEFDPKAITRASWEPKPKKPKQHGPLVSFNRHPDAHEVLPGRTYSNFRPMSDRAKWWIKWTRYFQLLLRAIELLAAAGLLALMILINKVQPLTAWILRIAPGIIILCNAYAILHLAKPARARPPASSAAYQLFAGLTDLAIVSIYAFGGISVVKESEKWDTLLVDKWYLPWFIKGEYYGLIGAGGLHLISLGISLYLGLIFKRIANMPPDMNPLESNLTSRAKHKRSKSSIASDYTSVSQSTKRLSTPLEEYRRSGAPYESLSRPPSIPFMHTRSGSQDSMSSSKRDSRVDLPSRQYQIVPDSNRTSTPKLAQRGSYMEIPLHETGSPSPSRPSSVATAAASQPINASPTRIAKFTEKCEQKAYEALTLPYGDDESEDEHMRPGDASDYSDYENDEPINVMGNMHHPNPLRYNPVTSTPPRSSASNTPRQKTPFRPHDSAPVLGEVSSNARRVSGSQDIADAKSAPAPGRRGTIIGNWGRNKGIRNSSIQHDDQFYSKPYGELRSATPPVMVGENGNLTASPRAGNGRQVSSGNDYDLGSGRDKTYRRNVSGKAAEEGMAGPGTSRFSRYGPLDE

SEQ ID NO: 8056 - DNA, 2426 bp, Muscodor strobelii
  misc_feature: SGI EST ID NO. CUFF.19760.0
  misc_feature: Variant of the nucleotide sequence at SEQ ID NO 8054
aagtaatacccgtctgtcaggggtctggatccaggcacatcgggcgcgttgccgtggagacgagacagatgtgtacattcaacatatgtgcgacgcacccagcgtcatagtagctagcgctgcacacttgtccgcgatccaatccaaataaaacccaagacaccacattccaattgcacaccctccttctgcgagattgaggcatctgcagttatgggggcgcaacaaccttatttgtacacctcgaattctcgagattcgagactgcccgagaaagagttcgacccaaaagcgatcactagggcgagctgggagcccaaacccaagaagccgaagcaacatggcccgcttgtatctttcaatcgccatccggacgcgcatgaagtgttgcctggcagaacatacagcaactttcggccgatgagcgacagagcgaaatggtggataaaatggactcgatacttccaacttctgctgcgcgctattgagctgctcgccgcagctggacttctcgcactcatgatcctcatcaacaaagttcaaccattgacagcttggatcctacgaattgcgcccggtatcatcatcctatgcaatgcttacgctattctacatctcgcaaaacctgcacgagcaaggcctcccgcttcttcggctgcgtaccaattgtttgccggactcactgacttggctatcgtctcgatctacgcctttggaggaatctcagtggtcaaggaaagcgagaaatgggacactcttttggtcgacaaatggtacctcccatggttcatcaagggagaatactacggtcttataggcgcaggaggtctccatctcatttctttggggatctcactgtatcttggtttaatcttcaagcgcattgccaacatgccgccggacatgaacccactagagagcaatctcacatcccgggcgaagcataagcgcagcaagtcatcgatcgcgagcgactacacttcggtctctcagagcaccaagcgtctctcaacaccgctcgaggagtatcgcaggtcgggagcaccatacgaaagtctgtcccgcccgccaagtatccctttcatgcatacacgtagcggctcgcaagactcgatgtcctcatctaaacgtgactctcgcgtcgatctacccagtcgtcaatatcagattgttcctggtaactccccctcgtaactccccccgacatagtcagagctcgctagcagattcgaaccgtacgtccactcccaagctggctcagcgaggtagctacatggagatcccgcttcatgagacaggatctccctcaccctcacggcctagtagcgttgcaacagcggctgcatcgcagccaatcaatgcctcgccaacacggatagccaagttcacggagaagtggtacgccactgaatctctcgtcaaccgcacgcagcagcgcaaccgcgccatggatgctgccgagcgatcagtagctgagcgagcaaaaggcttacgaggcgctaactctgccatacggcgacgatgagtcagaagacgagcatatgcgacctggtgatgcttcagactacagtgattatgagaatgatgaacccatcaacgtgatgggcaatatgcaccatccgaacccattgcggtacaaccccgtcacttccacccctccccgaagcagtgcttcaaatacgccccgacaaaagacacctttccgcccgcacgattcagcgccagttttaggagaggtcagctccaatgcccggcgcgtgagcggtagccaggatatcgcggacgccaagtctgctcccgctcctgggcgtcgtggtacaataatcggaaactggggtcggaataagggaattagaaactcctctattcaacacgacgaccagttctactccaagccctacggtgagctgaggagcgcaacgccgccggtcatggtcggtgagaatggaaatcttacggcaagtccgcgagctggaaacggtcgccaagtttcatctggaaatgactatgacttgggctcgggtagagataagacctaccgtcgtaacgtcagtgggaaggcagctgaagagggaatggccggcccggggacttcgagattttcgcgttatggacctttagatgagtaagggactcggtgatgggcgaagagcgtggcggtttcaaaaattcctgtggtttgggttttactggcaaggcgcacgttgcatatgagataccggtatggtgttgtttatacttgttttgttccaatcggaagtctgttagcataacgtattgagatgaggtcatgggttcaaaggcatatgtaattaagagggaaagagtccagggtgcatggacgaatacatgatggctcaacaagggcaggctttaagaggccttggtgaatatcgtcgtagtaacgtgctgtcacaaagtggccc

SEQ ID NO: 8057 - DNA, 1731 bp, Muscodor strobelii
  misc_feature: SGI cDNA ID NO. 562462
  misc_feature: Elevated expression when VOC is produced
  misc_feature: Encodes the peptide sequence at SEQ ID NO 8058
atgaaaaccacaatatcgaatctagctctgctagctatactaggtccggcaacaatagcaacagaagaatgtcgctgttttcctggtgatgaatgctggccgactgatgacacgtggtctgctttcaacgcttctgttggcgggaacctcatacgtacaacgccgattggtcaggtctgtcatgatcctcattacagtgaagaggcctgcgaagatttgaaatcgagatggctcgatccggatatccatatcgattcatcacactccattcaagctggcctctttgccaacgcaagttgcgaccccatgacgccgcgtgagacaccatgtattggaacttatgtgcaatattccgtcgctgtcgataacgccgatgctatttcgaagactattggattcgcgaacgcgaacaacattcgtttggtcattcgcaacaccgcacacgactatcttggtagatctacaggcgcgggcgcaattgctatttggacgcagaaattgaaacacgtatcaaagcttacatatgacggtaccacatacaaaggcgatgctatcaagatgggagccggcgtgttagctggagaggtatccaaatacgccagtgagcgtgggctggtagttgtgtcgggaaattgtccaacagtcggtctgggaggtggctatctgcaagggggaggacatgggccattgggctctctactgggaatggcagccgactctgctttggcttttgaagttgttatcggaactggcgagcttgtgactgctgacgccactgagaattctgacctctactgggcattaagaggaggcggaggctcgacatacggtgtagtagtcagcaccactgttagagcgtatgccgatgtctcagtaagcttcggttcattgatgtttacgtcggatggtcttgaggaagaccgatttttcgaggctgctgccgctttctacgacgttgttccatcaatagtagattctggcgcggtgccaattttccttctcactccacaagttttcgcacttcaagaactgattgcccccaatatgaccgagactgaagtcgaaaatctcttggaacccttcattgcaaaacttgaagggattgaattcgtgaagaatatcgactctgctccggaacccgaggctctatatttcgatttccaagctgatgccctcattcctatgacgaagcagcaagcgaatattatcatgggaggcagttggctcatgtctcgatctctcatcacagatcgaattgggcgtggtgaatacactgcgacgattaaagaaattgcgaagtcaggtcttatcgtccaacagctcggatttaatgtctctaagaaaactggaagtgacatcgacaatgccattttgcctgcatggagaagtacccttcttcatacagttatcggaaccttatatgattctcaatcgactccggagcaaaacaaggccgccttgactgccgttcaagatgaaggcattatgaagcttgctaagcttgctcccgagtctggcgcctacatgagcgaggctgtacctttcaatgacaactggaagaaagatttttttggtgtcaactatgataggctcgaggcgattaaaaacaaatacgacccgaaccatatattctacgccttaactgctgttgggagcgatgcgtgggtcgagcaagatgataaacggctttgtaagagaagctcgagctcatacgccagagacgagctatag

SEQ ID NO: 8058 - protein, 576 aa, Muscodor strobelii
  misc_feature: SGI Peptide ID NO. 562462
  misc_feature (507)..(551): Pfam Id: PF08031 Pfam Desc: Berberine and berberine like
  misc_feature (115)..(257): Pfam Id: PF01565 Pfam Desc: FAD binding domain
  misc_feature (23)..(565): NCBI GI: 242765564 Blast Desc: FAD/FMN-containing isoamyl alcohol oxidase MreA [Talaromyces stipitatus ATCC 10500] gi|218724196|gb|EED23613.1| FAD/FMN-containing isoamyl alcohol oxidase MreA [Talaromyces ATCC
  misc_feature (1)..(565): NCBI GI: 115386510 Blast Desc: ATEG_07110 [Aspergillus terreus NIH2624] gi|114190794|gb|EAU32494.1| ATEG_07110 [Aspergillus terreus NIH2624]
  misc_feature (4)..(565): NCBI GI: 169765902 Blast Desc: [Aspergillus oryzae RIB40] gi|10119790|dbj|BAB13480.1| isoamyl alcohol oxidase [Aspergillus oryzae] gi|83765277|dbj|BAE55420.1| protein product [Aspergillus oryzae]
  misc_feature (4)..(565): NCBI GI: 238482515 Blast Desc: conserved [Aspergillus flavus NRRL3357] gi|220700546|gb|EED56884.1| conserved [Aspergillus flavus NRRL3357]
  misc_feature (24)..(565): NCBI GI: 159122500 Blast Desc: FAD/FMN-containing isoamyl alcohol oxidase MreA [Aspergillus fumigatus A1163]
  misc_feature (24)..(565): NCBI GI: 70984404 Blast Desc: FAD/FMN-containing isoamyl alcohol oxidase MreA [Aspergillus fumigatus Af293] gi|66845342|gb|EAL85677.1| FAD/FMN-containing isoamyl alcohol oxidase MreA [Aspergillus
  misc_feature (24)..(565): NCBI GI: 212531397 Blast Desc: FAD/FMN-containing isoamyl alcohol oxidase MreA [Penicillium marneffei ATCC 18224] gi|210071219|gb|EEA25308.1| FAD/FMN-containing isoamyl alcohol oxidase MreA [Penicillium ATCC
  misc_feature (9)..(565): NCBI GI: 255949596 Blast Desc: Pc22g16510 [Penicillium chrysogenum Wisconsin 54-1255] gi|211592582|emb|CAP98939.1| Pc22g16510 [Penicillium chrysogenum Wisconsin 54-1255]
  misc_feature (8)..(564): NCBI GI: 242800117 Blast Desc: isoamyl alcohol oxidase, [Talaromyces stipitatus ATCC 10500] gi|218716866|gb|EED16287.1| isoamyl alcohol oxidase, [Talaromyces stipitatus ATCC 10500]
  misc_feature (17)..(565): NCBI GI: 121703467 Blast Desc: FAD binding domain protein [Aspergillus clavatus NRRL 1] gi|119398141|gb|EAW08572.1| FAD binding domain protein [Aspergillus clavatus NRRL 1]
  misc_feature: Useful for introducing or modulating the production of volatile compounds
MKTTISNLALLAILGPATIATEECRCFPGDECWPTDDTWSAFNASVGGNLIRTTPIGQVCHDPHYSEEACEDLKSRWLDPDIHIDSSHSIQAGLFANASCDPMTPRETPCIGTYVQYSVAVDNADAISKTIGFANANNIRLVIRNTAHDYLGRSTGAGAIAIWTQKLKHVSKLTYDGTTYKGDAIKMGAGVLAGEVSKYASERGLVVVSGNCPTVGLGGGYLQGGGHGPLGSLLGMAADSALAFEVVIGTGELVTADATENSDLYWALRGGGGSTYGVVVSTTVRAYADVSVSFGSLMFTSDGLEEDRFFEAAAAFYDVVPSIVDSGAVPIFLLTPQVFALQELIAPNMTETEVENLLEPFIAKLEGIEFVKNIDSAPEPEALYFDFQADALIPMTKQQANIIMGGSWLMSRSLITDRIGRGEYTATIKEIAKSGLIVQQLGFNVSKKTGSDIDNAILPAWRSTLLHTVIGTLYDSQSTPEQNKAALTAVQDEGIMKLAKLAPESGAYMSEAVPFNDNWKKDFFGVNYDRLEAIKNKYDPNHIFYALTAVGSDAWVEQDDKRLCKRSSSSYARDEL

SEQ ID NO: 8059 - DNA, 803 bp, Muscodor strobelii
  misc_feature: SGI EST ID NO. CUFF.19787.0
  misc_feature: Variant of the nucleotide sequence at SEQ ID NO 8057
cggcaactagattggaacttatgtgcaatattccgtcgctgtcgataacgccgatgctatttcgaagactattggattcgcgaacgcgaacaacattcgtttggtcattcgcaacaccgcacacgactatcttggtagatctacaggcgcgggcgcaattgctatttggacgcagaaattgaaacacgtatcaaagcttacatatgacggtaccacatacaaaggcgatgctatcaagatgggagccggcgtgttagctggagaggtatccaaatacgccagtgagcgtgggctggtagttgtgtcgggaaattgtccaacagtcggtctgggaggtggctatctgcaagggggaggacatgggccattgggctctctactgggaatggcagccgactctgctttggcttttgaagttgttatcggaactggcgagcttgtgactgctgacgccactgagaattctgacctctactgggcattaagaggaggcggaggctcgacatacggtgtagtagtcagcaccactgttagagcgtatgccgatgtctcagtaagcttcggttcattgatgtttacgtcggatggtcttgaggaagaccgatttttcgaggctgctgccgctttctacgacgttgttccatcaatagtagattctggcgcggtgccaattttccttctcactccacaagttttcgcacttcaagaactgattgcccccaatatgaccgagactgaagtcgaaaatctcttggaacccttcattgcaaaacttgaagggattgaattcgtgaagaatatcg

SEQ ID NO: 8060 - DNA, 1572 bp, Muscodor strobelii
  misc_feature: SGI cDNA ID NO. 562463
  misc_feature: Encodes the peptide sequence at SEQ ID NO 8061
atgatgtccccaaacagcggcattgacgtggtgaggcccgttggaacactggccaaattcaacactgctcgccacagtttaggaatcatgagagctgtgattgtgactggacgatacaatgtgtcttccgctcagctcgggcaacaagagccatctctcactatacaaagcattatagaacttgcagtatcgagagtcgtactcgggcaggcgatattatgtgtcggtattgcgggagagaacaccaaggatcctgcgttcgtgcgtcttaaagccattgatatgcgcagtgttatcgagtggaaggaactcggattgaaacagaggaaatctcaactcgaacatgacgaagaggcagcatacacgaatgatttgatgcgctccttagaggaaacccaccaatcactatgggaagatcttgcaaagaagccaggctggaaggttattgtacaccataattcacaagtgcctgttgcgtctgttcagcagaatgccctctctgaatccgaaaccatctcactcgatatatccttctgtttccatcacgcttacgcagatggtggaagtgcgtatatatttcatactgacttacaacaggcactaaacggtcctcgagactgcccttccgagctacaaaaccacacattacatctccctaatccgccagtgattcctccggcgatggaaaaactgatacctttcactctatcgtggagatacattcttcgcacaatctgggtggaaattatctacccgaacttcatccccgctttcgtcaaaacatttgctggcgaggcacagtctggtactcgatggaccggcgcgccaattgatccatcccacgcacgcggtcacattcaactcttagaaattgctgttggtgaacgtattgagaagttactagcactatgccgagcccatggggttactctaactgccctacttcacgccctaatcgctctctctcttgcacgtcgactgctagatccaggaagtctaaagtcatcgatacccatctctcttgcaaattatgtagacacaaaagtagcggggaatagcttcacggctggtaaaactatacattgtctcatcacatcgctgacaaccgaacatgacaccgtgaactcccttcgaacacaagaaccagatacagagatatggagctttgcacagagtatgacagatcgaataagagcaaggacagcaacgctcccgcgagatgacattcaaggcttgtctggtctggtgggcgattggcatgagttcttccgaaaggatttcgggaagccgcgggatacaagctgggaattatcaaatttggggagtttgagcgcgcaggatagcggtgcagaagatggttggtttctagaccgaatgatcttcactcaaggcgtgctcgcttgtggcccagctttcagtgtgagtgtatcaggggtctctaggcatggtatctacgcaacagtgacgtggcaggagggtatcgttgatgatgagctcatgcgtggtcttgtaagcgatctgcaaatctggtcactcagcctttcagatactggacgtctggaagatatttga

SEQ ID NO: 8061 - protein, 523 aa, Muscodor strobelii
  misc_feature: SGI Peptide ID NO. 562463
  misc_feature (13)..(518): Pfam Id: PF07247 Pfam Desc: Alcohol acetyltransferase
  misc_feature (19)..(510): NCBI GI: 171680355 Blast Desc: protein product [Podospora anserina] gi|170939804|emb|CAP65030.1| protein product [Podospora anserina]
  misc_feature (2)..(520): NCBI GI: 256723088 Blast Desc: NECHADRAFT_81239 [Nectria haematococca mpVI 77-13-4]
  misc_feature (9)..(519): NCBI GI: 39945256 Blast Desc: MGG_04610 [Magnaporthe grisea 70-15] gi|145011324|gb|EDJ95980.1| MGG_04610 [Magnaporthe grisea 70-15]
  misc_feature (20)..(489): NCBI GI: 261357743 Blast Desc: conserved [Verticillium albo-atrum VaMs.102]
  misc_feature (58)..(473): NCBI GI: 116206856 Blast Desc: CHGG_02721 [Chaetomium globosum CBS 148.51] gi|88183318|gb|EAQ90786.1| CHGG_02721 [Chaetomium globosum CBS 148.51]
  misc_feature (224)..(510): NCBI GI: 85110928 Blast Desc: NCU09360 [Neurospora crassa OR74A] gi|28925408|gb|EAA34461.1| [Neurospora crassa OR74A]
  misc_feature (8)..(508): NCBI GI: 212544178 Blast Desc: conserved [Penicillium marneffei ATCC 18224] gi|210065212|gb|EEA19306.1| conserved [Penicillium marneffei ATCC 18224]
  misc_feature (10)..(510): NCBI GI: 256728395 Blast Desc: NECHADRAFT_102167 [Nectria haematococca mpVI 77-13-4]
  misc_feature (43)..(518): NCBI GI: 46116024 Blast Desc: FG03854.1 [Gibberella zeae PH-1]
  misc_feature (32)..(510): NCBI GI: 256734699 Blast Desc: NECHADRAFT_75213 [Nectria haematococca mpVI 77-13-4]
MMSPNSGIDVVRPVGTLAKFNTARHSLGIMRAVIVTGRYNVSSAQLGQQEPSLTIQSIIELAVSRVVLGQAILCVGIAGENTKDPAFVRLKAIDMRSVIEWKELGLKQRKSQLEHDEEAAYTNDLMRSLEETHQSLWEDLAKKPGWKVIVHHNSQVPVASVQQNALSESETISLDISFCFHHAYADGGSAYIFHTDLQQALNGPRDCPSELQNHTLHLPNPPVIPPAMEKLIPFTLSWRYILRTIWVEIIYPNFIPAFVKTFAGEAQSGTRWTGAPIDPSHARGHIQLLEIAVGERIEKLLALCRAHGVTLTALLHALIALSLARRLLDPGSLKSSIPISLANYVDTKVAGNSFTAGKTIHCLITSLTTEHDTVNSLRTQEPDTEIWSFAQSMTDRIRARTATLPRDDIQGLSGLVGDWHEFFRKDFGKPRDTSWELSNLGSLSAQDSGAEDGWFLDRMIFTQGVLACGPAFSVSVSGVSRHGIYATVTWQEGIVDDELMRGLVSDLQIWSLSLSDTGRLEDI

SEQ ID NO: 8062 - DNA, 507 bp, Muscodor strobelii
  misc_feature: SGI cDNA ID NO. 562464
  misc_feature: Encodes the peptide sequence at SEQ ID NO 8063
atgctgcttacatcctttgccctatttgcgctggcggcaactggccttgcccagattcccgatggatatcgcgcggtatacatcacctctatggtgaatgcaaaattcgtcgtggtacctaccgcacgcacgaccggaagcacgcttgttgtcaagaccgctacaaacacgccagcgcagcaatggtatatcaaatctggcgagacaaagattcaacttgccaataccacgatgtgtgtcgatgctggagcaaaggcgaactggaaggatatggcgagtctctctatcacgacctgttcagacacatcagacggccagaaattcaacgccatggccgacggaagaatcgcgcttcagccatcaagtccacaggaatgcctcgacctccaatacatgcgagctactgaaaacaacccagttggtctctatagctgtgcgggcttaggcaatgctggggctgcagacaagggcatcaactggcctctagctaacgcaacaacaccttga

SEQ ID NO: 8063 - protein, 168 aa, Muscodor strobelii
  misc_feature: SGI Peptide ID NO. 562464
  misc_feature (44)..(108): Pfam Id: PF00652 Pfam Desc: Ricin-type beta-trefoil lectin domain
  misc_feature (12)..(167): NCBI GI: 169616127 Blast Desc: SNOG_11237 [Phaeosphaeria nodorum SN15] gi|111060616|gb|EAT81736.1| SNOG_11237 [Phaeosphaeria nodorum SN15]
  misc_feature (16)..(167): NCBI GI: 145602410 Blast Desc: [Magnaporthe grisea 70-15] gi|145010836|gb|EDJ95492.1| [Magnaporthe grisea 70-15]
  misc_feature (1)..(168): NCBI GI: 170940307 Blast Desc: protein product [Podospora anserina]
  misc_feature (1)..(164): NCBI GI: 189206904 Blast Desc: conserved [Pyrenophora tritici-repentis Pt-1C-BFP] gi|187975879|gb|EDU42505.1| conserved [Pyrenophora tritici-repentis Pt-1C-BFP]
  misc_feature (38)..(146): NCBI GI: 170120200 Blast Desc: carbohydrate-binding module family 13 protein [Laccaria bicolor S238N-H82] gi|164633602|gb|EDQ98210.1| carbohydrate-binding module family 13 protein [Laccaria bicolor
  misc_feature (46)..(145): NCBI GI: 169867106 Blast Desc: CC1G_02597 [Coprinopsis cinerea okayama7#130] gi|116498686|gb|EAU81581.1| CC1G_02597 [Coprinopsis cinerea okayama7#130]
  misc_feature (46)..(145): NCBI GI: 170099816 Blast Desc: carbohydrate-binding module family 13 protein [Laccaria bicolor S238N-H82] gi|164643805|gb|EDR08056.1| carbohydrate-binding module family 13 protein [Laccaria bicolor
  misc_feature (46)..(122): NCBI GI: 169867563 Blast Desc: [Coprinopsis cinerea okayama7#130] gi|116498521|gb|EAU81416.1| [Coprinopsis cinerea okayama7#130]
  misc_feature (38)..(148): NCBI GI: 170109147 Blast Desc: carbohydrate-binding module family 13 protein [Laccaria bicolor S238N-H82] gi|164639361|gb|EDR03633.1| carbohydrate-binding module family 13 protein [Laccaria bicolor
  misc_feature (38)..(145): NCBI GI: 170109019 Blast Desc: carbohydrate-binding module family 13 protein [Laccaria bicolor S238N-H82] gi|164639297|gb|EDR03569.1| carbohydrate-binding module family 13 protein [Laccaria bicolor
MLLTSFALFALAATGLAQIPDGYRAVYITSMVNAKFVVVPTARTTGSTLVVKTATNTPAQQWYIKSGETKIQLANTTMCVDAGAKANWKDMASLSITTCSDTSDGQKFNAMADGRIALQPSSPQECLDLQYMRATENNPVGLYSCAGLGNAGAADKGINWPLANATTP

SEQ ID NO: 8064 - DNA, 2091 bp, Muscodor strobelii
  misc_feature: SGI cDNA ID NO. 562465
  misc_feature: Encodes the peptide sequence at SEQ ID NO 8065
atgtccgccctgaatacagtcgatgcacctggagcttatcctggcacgccagctgccgaggaaccttcccaacaacaggcgtcttacaacacgcttcacaaacgtgaggatccccgaacaattggtgacgcggtcgaacctctcgaatcttctcgtggtcagcagtatactggctctggcgaagcagtgggtgatgccccgctccagtcgcaatactcacagcccaataactattcctacaacaatgactccctactcacctcctctcaaactgcacgtgaaaatgaaggtcccgcagtaacagacggtattaacaccactgccatcccttctgaagctactagtaccgacttcaacaacactggcggcactgctggagatgaaccagctcgtggcatcgtacggagcggtttgaaagagaagtcgactagcggaagcgaaaatcccccttattggggtagtattccgtctggaggcgttcacaactcggtaattggccatggctcaaacgaagacgaaggccacagtcatgagagaacctccgcacacgacaactttggcacagccatgcccagtcatcagcgagagtttccacttgtcgataactccaatgatactgttccatcaggtggtgttcacaatacggttattggccacgggtccagtgaagatgctcagagacctacaacccgcgagctgtcagacagccctcagaacacttctaccctcaacgagcagtcaagatattcagagtctttaaaccaaccgtctcaacttgatgaaaccaagactacctctgactcccaccagggtaaagaatccgacatggccctagctggtgcaactgctgcttacaccgcccatgagcgctccaataagggcaacgagcgcgttgcagaggatgagccacccaaagagaagaaagagagcaagcttgcagcattcttccaccgcgaacacgataacacggataccaagtctaagagtattgtagaagagccaaaacataaagaggagcagccaaaggagaagaaagaaagcaagattgcagctctgttccacagtagctccggcaaagacgattctgacacgaagaaagctgatgagaagaaggcagaagctgctcctagtgatattcatgacaataaatatcatcatcaacgtgaaactatagcagcagctcctgccacccaaagctctacacaggagacgagcaatgtgccagaatcaaaagataagcagaatgatcaccattacggcgctgcagcggcagctactggtgcagggttaggtgctgcatacggtgctcaccgttatgagaaccgtgacgaagccgaaaacgagaaggtggctccggctctctccacagaagagacagcctactcgagtgcgcctgctgcatcttctggccttgatagccagcatcattcgaagagccaagcccctactgagtcgaagtacgatacgctgagcgatggcgtgccttcgggagtcgctactggaactacccagacacctggtacaactacacagacacctggtacaactacacagacacctggtacaactacacagacacctggtacaactacacagacacctggtacaactacacagacacctggtacaactacacagacgcataccaacgttggccgtggctcttcggactcatcccacggcggacagtatgcggtgttgtcctccggaaccccctccgggatcaacattgaggatcgcaatgcctctcacgcaccttcaaatgtcaagtccttagaacaggaacagaagctttctacctacttgagcaatgaatctcctatcaaaagctcgtctcccaaaggcgtagttactggcgaaccctacacacatgaatacgagcagaaagatgatgtaaacagtgggcgagccatctcgaacatggaacaagctgcccaggatgcttcccagaagaaggtagaagaggagccaagctctgtcacgcgacagatggtagctgaagacggatatggtagtgctgcaaagcccacgattcacaactgcgtcaactgtgggcatgctaacgacatctcttcgtattttaaggcttag

SEQ ID NO: 8065 - protein, 696 aa, Muscodor strobelii
  misc_feature: SGI Peptide ID NO. 562465
  misc_feature (10)..(178): NCBI GI: 46113269 Blast Desc: FG02925.1 [Gibberella zeae PH-1]
  misc_feature (150)..(236): NCBI GI: 85077151 Blast Desc: NCU04538 [Neurospora crassa OR74A] gi|28917016|gb|EAA26742.1| [Neurospora crassa OR74A]
MSALNTVDAPGAYPGTPAAEEPSQQQASYNTLHKREDPRTIGDAVEPLESSRGQQYTGSGEAVGDAPLQSQYSQPNNYSYNNDSLLTSSQTARENEGPAVTDGINTTAIPSEATSTDFNNTGGTAGDEPARGIVRSGLKEKSTSGSENPPYWGSIPSGGVHNSVIGHGSNEDEGHSHERTSAHDNFGTAMPSHQREFPLVDNSNDTVPSGGVHNTVIGHGSSEDAQRPTTRELSDSPQNTSTLNEQSRYSESLNQPSQLDETKTTSDSHQGKESDMALAGATAAYTAHERSNKGNERVAEDEPPKEKKESKLAAFFHREHDNTDTKSKSIVEEPKHKEEQPKEKKESKIAALFHSSSGKDDSDTKKADEKKAEAAPSDIHDNKYHHQRETIAAAPATQSSTQETSNVPESKDKQNDHHYGAAAAATGAGLGAAYGAHRYENRDEAENEKVAPALSTEETAYSSAPAASSGLDSQHHSKSQAPTESKYDTLSDGVPSGVATGTTQTPGTTTQTPGTTTQTPGTTTQTPGTTTQTPGTTTQTPGTTTQTHTNVGRGSSDSSHGGQYAVLSSGTPSGINIEDRNASHAPSNVKSLEQEQKLSTYLSNESPIKSSSPKGVVTGEPYTHEYEQKDDVNSGRAISNMEQAAQDASQKKVEEEPSSVTRQMVAEDGYGSAAKPTIHNCVNCGHANDISSYFKA

SEQ ID NO: 8066 - DNA, 736 bp, Muscodor strobelii
  misc_feature: SGI EST ID NO. CUFF.19805.0
  misc_feature: Variant of the nucleotide sequence at SEQ ID NO 8064
gagtgcgcctgctgcatcttctggccttgatagccagcatcattcgaagagccaagcccctactgagtcgaagtacgatacgctgagcgatggcgtgccttcgggagtcgctactggaactacccagacacctggtacaactacacagacacctggtacaactacacagacacctggtacaactacacagacacctggtacaactacacagacacctggtacaactacacagacacctggtacaactacacagacgcataccaacgttggccgtggctcttcggactcatcccacggcggacagtatgcggtgttgtcctccggaaccccctccgggatcaacattgaggatcgcaatgcctctcacgcaccttcaaatgtcaagtccttagaacaggaacagaagctttctacctacttgagcaatgaatctcctatcaaaagctcgtctcccaaaggcgtagttactggcgaaccctacacacatgaatacgagcagaaagatgatgtaaacagtgggcgagccatctcgaacatggaacaagctgcccaggatgcttcccagaagaaggtagaagaggagccaagctctgtcacgcgacagatggtagctgaagacggatatggtagtgctgcaaagcccacgattcacaactgcgtcaactgtgggcatgctaacgacatctcttcgtattttaaggcttagttgtttttggatatatgatgtgcatttagc

SEQ ID NO: 8067 - DNA, 3183 bp, Muscodor strobelii
  misc_feature: SGI cDNA ID NO. 562466
  misc_feature: Encodes the peptide sequence at SEQ ID NO 8068
atgatggagcgcggttcgcccaaggacgagcgcgttctgactaccaacgcaaacggccgacaaaatactctgcgcgcctacgacagtcgccctcctctcggcaaatctgcaagcaccacaaccgctaccaaagagaatcgcatcacctctgacaccgagtctggcgcactgcccaagcgacagcctgcacgtgtcgccagccaccaccaccacggctctgactccttcatccaccgccgattcgagcctccgagtccgtctgagacatcagatcgcagcagcatcgtcttcgggacgcccagacactcggcagctgccacacgcaatactcgcatccctcgccccaagaccaccgcccccatcaccagcatcagccatccgaatcccgctgatcaacgagactcccctgagccgtcctctccgatgcgctaccctatgagcatgagcgcagcattccggcgagcccaggagcaaacagctgcagaggatttcgcagattccgactccacggccgacaacgctggcttcaatggcgcccgaggtatcgatggttcccctagtccggctccacggtcattccgtcgcgatcttccaactccgatcctcccaaacgctacttcgggaacaaaccatatcgatctcaagaagcatctccagcagtttgaccgaactcaccgcttaaccggtaatggcggccgtggcgagcctgtcaacggcttgttcgcaaaacctgatgctgcttccaagatttcggaaaccgctcatacatcggccaggaaagcgagcggcgcaggcttgacagggccgactgaaagccgcaagcaagaatatccttccgcttcagaatcagccgatgaaagtgtcaagccccacgcaacggggaacgcaatttctcagcccaccgactgggtgcctggcgcgggcactgcagatattgctgtcccatctatcgagtatgaggaagcaagcgacggcctagattcaccagctttccggcccctgaaccgatcaccggagaggggtatgaactggcaacttgacgccgactttacagctggagacctccaggtatctgaaagtccgcgagtcaaagtcactgagattattgacaccaccgccgttcctacctcgaggcgcccgaacggccgactatcccagattcaagagcgagagatcgaagtcgggaagacaaatcttgcggaagattcgttatataatgaacagaaagctactaggctatcggaaatcagagctcgagagatggaagccctcacgagacgcgccgtagcctcgagccgactcgacgaaatccggatgagaaactctgagcctcgttctgagtctcccgaaaatcgcaagcaacaagatagaaagcctagcaatggtcgatctccgctgatgaacagtgagagggccaatgattcgcagacgggcatctcaaggccagaagtaaacctgggaccagctctgagtactttacgcgccgacgatagaacggtcgatagaaaagccaaagccaacgagggcttggagacgaattccgacagaatgatggacacacgtggatttgccggcaagaatgatcctaatgacttgcttcgccgtcttactcgagctattagctcaagtccgcccgtgaaggacgttgaggagaagaacgcaaatgaaaaggtagcacccctaaaacagaccgctttgaacaaagcaactgtggaacatgactccaaccgtgcttcgacttcgaaagaggaaacgaagcccagaaatctggatattaagaacagcagagaaaggctcacggtgggctttgcagaccacaagcgaaatgtctcgagcaactctgtgcaagaaaaacgatctagtatgcataactcagatatagatccaaccgatcgtattgaggcggaacttaagctgtttgcgcctcaggacaactactcagaaaaaggttccaccagagccccctctcccggctcgtctgaaccaataaatgaagaaacgccgcgacctttgaagatagatcctttgacacaaccaacgcctcgggtcactggtgcttacgttgatactccggctacagtgcgggtgcagcccaatcatcaccctcatacggagccctctaaggcaaatacagacgtgagcggcaggacatcacctagggcatcttcaatgccgacaccgtccagacggaacaagtcatcgtcacgacgacgacgcccacttgttaacaccgcaaagccacctaccgtgaaagaagatttgatatcgattttacgagcccacaatatcgacgattcgaccttagagaaccttggttctatcctcagtagtcgagacgagaccgaagatgacttcgaccaaacggatgatgccatcgaaatggcgcctctcaagagtgagggcgatcttgactcgacgttttccagcactccggatggcaagcgcgagcttgcagcctatgacagaatgagcaaatcacttgaaactggtctactgggcattcgctctgccaaaaagggaattgagcgcttggaaggcaaggttattcacgcggaccgtaaagatacccaggctctgccccagcctgtccatcctcaacctgtgcgtgcttcgaatgataaaacacatctgtcccggcctcttgaagatggcgtcccgctgctcatacctgtaccgcgattgtaccgcaaagatcctcatttcaaactcactactttcggcatttttgcattgttatttgctctctggtataccctcgaaagcgcattctgtttgttttacgaagggccggagtacgagtgcacgcctagcattccgtgcgaatggtcacctaacgagccatactttccctacaccatgccattcatgttagatgaatgggtgaccggcggcaaagggagagctctggcattgcgggtgggtgaggaaattggcgatatagcggctgacgcttctgattgggtgacaaacacagacttcacccaattcgatcagcgcttcatgaatgtgtggcagcgcaagagacatctacgaagactgcgcaaacacaaccttgttgagaagtggcgagaacctgaaggctaccaggccagatatccaaaatggcttgctgccaaggcggcaagggagttgggatatgatggtgaggatgagacgatgagtgccgacgaaatagttcggtga

SEQ ID NO: 8068 - protein, 1060 aa, Muscodor strobelii
  misc_feature: SGI Peptide ID NO. 562466
  misc_feature (135)..(1059): NCBI GI: 46116396 Blast Desc: FG04040.1 [Gibberella zeae PH-1]
  misc_feature (184)..(992): NCBI GI: 171680353 Blast Desc: protein product [Podospora anserina] gi|170939803|emb|CAP65029.1| protein product [Podospora anserina]
  misc_feature (139)..(1059): NCBI GI: 256723163 Blast Desc: NECHADRAFT_42590 [Nectria haematococca mpVI 77-13-4]
  misc_feature (112)..(1057): NCBI GI: 261357744 Blast Desc: conserved [Verticillium albo-atrum VaMs.102]
  misc_feature (320)..(1057): NCBI GI: 116206858 Blast Desc: CHGG_02722 [Chaetomium globosum CBS 148.51] gi|88183319|gb|EAQ90787.1| CHGG_02722 [Chaetomium globosum CBS 148.51]
  misc_feature (329)..(997): NCBI GI: 85110933 Blast Desc: NCU09362 [Neurospora crassa OR74A] gi|28925411|gb|EAA34463.1| [Neurospora crassa OR74A]
  misc_feature (333)..(697): NCBI GI: 39945252 Blast Desc: MGG_04608 [Magnaporthe grisea 70-15] gi|145011326|gb|EDJ95982.1| MGG_04608 [Magnaporthe grisea 70-15]
  misc_feature (740)..(1059): NCBI GI: 39945252 Blast Desc: MGG_04608 [Magnaporthe grisea 70-15] gi|145011326|gb|EDJ95982.1| MGG_04608 [Magnaporthe grisea 70-15]
  misc_feature (676)..(1007): NCBI GI: 154314995 Blast Desc: [Botryotinia fuckeliana B05.10] gi|150848377|gb|EDN23570.1| [Botryotinia fuckeliana B05.10]
  misc_feature (733)..(961): NCBI GI: 145232997 Blast Desc: An02g07370 [Aspergillus niger] gi|134056793|emb|CAK37701.1| protein product [Aspergillus niger]
MMERGSPKDERVLTTNANGRQNTLRAYDSRPPLGKSASTTTATKENRITSDTESGALPKRQPARVASHHHHGSDSFIHRRFEPPSPSETSDRSSIVFGTPRHSAAATRNTRIPRPKTTAPITSISHPNPADQRDSPEPSSPMRYPMSMSAAFRRAQEQTAAEDFADSDSTADNAGFNGARGIDGSPSPAPRSFRRDLPTPILPNATSGTNHIDLKKHLQQFDRTHRLTGNGGRGEPVNGLFAKPDAASKISETAHTSARKASGAGLTGPTESRKQEYPSASESADESVKPHATGNAISQPTDWVPGAGTADIAVPSIEYEEASDGLDSPAFRPLNRSPERGMNWQLDADFTAGDLQVSESPRVKVTEIIDTTAVPTSRRPNGRLSQIQEREIEVGKTNLAEDSLYNEQKATRLSEIRAREMEALTRRAVASSRLDEIRMRNSEPRSESPENRKQQDRKPSNGRSPLMNSERANDSQTGISRPEVNLGPALSTLRADDRTVDRKAKANEGLETNSDRMMDTRGFAGKNDPNDLLRRLTRAISSSPPVKDVEEKNANEKVAPLKQTALNKATVEHDSNRASTSKEETKPRNLDIKNSRERLTVGFADHKRNVSSNSVQEKRSSMHNSDIDPTDRIEAELKLFAPQDNYSEKGSTRAPSPGSSEPINEETPRPLKIDPLTQPTPRVTGAYVDTPATVRVQPNHHPHTEPSKANTDVSGRTSPRASSMPTPSRRNKSSSRRRRPLVNTAKPPTVKEDLISILRAHNIDDSTLENLGSILSSRDETEDDFDQTDDAIEMAPLKSEGDLDSTFSSTPDGKRELAAYDRMSKSLETGLLGIRSAKKGIERLEGKVIHADRKDTQALPQPVHPQPVRASNDKTHLSRPLEDGVPLLIPVPRLYRKDPHFKLTTFGIFALLFALWYTLESAFCLFYEGPEYECTPSIPCEWSPNEPYFPYTMPFMLDEWVTGGKGRALALRVGEEIGDIAADASDWVTNTDFTQFDQRFMNVWQRKRHLRRLRKHNLVEKWREPEGYQARYPKWLAAKAARELGYDGEDETMSADEIVR

SEQ ID NO: 8069 - DNA, 5472 bp, Muscodor strobelii
  misc_feature: SGI EST ID NO. CUFF.19820.0
  misc_feature: Variant of the nucleotide sequence at SEQ ID NO 8067
gcctgctacaatgaccatatccagaaagaatacgatccaagtaattttgattatcaatcagtaatatgcccgggtagatggttgatccccttgatcgggaatctacttatcatggtcgaaccgaaaatgctgatcattgccctgcattacagacttcagtttgctggggaattctagacttgaagctctgttcatcaacatgtaactccgaaaggcattattcaaatactcaatacacgtagatactagctgatatgtggatcgcggcagttcaaccctccaatatgtacgtgagtagagcacttagacattacttgcttgctagagacgttgggttaccccaactctttcgacttagtaaggagacacggaattccgattgtgcgttcaacaaatgcacaatcgtaatatatttcgtatttgtaagcctcaaggaaatatccaattgaaataacacctaggtacgcctgtaggactttgaaacttcgaacagggcggcccggccttctatcgtggcccaattgatatcgccggtggtttgctgttggggaactaactcttccccaaatcccacatcacctggtaaatgttagtagcatgtctgaagcgcttggaaatgaacttccgccaatactcacaaatatttattacagcctgttcttaacccttttccaggaaaaaagtggtgcaatatcgaccgtctctagaagattaggtcatacggaaaatgatgagtgattgagcaacgtatgatcgaaagctagggatgtatgtgcaaagttataataggttgtacgctttgatcacatcgaacgggtcataggtatcagtcctcactgccaaaagatgcaagctatcagatacagctcagttacaacatagaatttagggtactcaagatctttgtatgtgcggagtggaactttctgtagccgtttgacaggtgcgccagcgttagaatgagaaaggcattagaaaagagtttgagagatccgataaagacccttgtaccccaccactgtttgagctaggacatcatcaaacagctattcggctgttgttcaagtgtatgcttgacatgctcaggcccccgtatcgatgatggggtgctacctacctatacatgtaggcccttactgtagatgatgcacatggtagatagtcgattggctgttagtatgacgcgacaggcttgacaggtacggaaggtggggggcatctagaacggggaaccttggaagtttggcggattggccaacaacatttggccattatttttggacgcgataacagccatcgcgaccgttaccgtcacgtttgtttgggtgggcaccttcctgcgagctgcacccgtgcgtcgtaacggcggcactccaacttcctcgcaacaccacgcagctcccgcaacttcacttctttgccgtaggtgccgttttacatctaacgcattcgctagcagaggtcatctaatacatacttcctcaatcgatccgcgcaagaacttccattgcggctctatccacattttgcgcgcccttctcgactctgaaaacattcgccttgtccgcctaaccaaaccaccatcgtcagtctctcatctactgttcacgacgtcttccctccctcgcgccgctggtcctctgtgtgtcatctgtgctctagactgttctcttgtgtgcgcatcatgtgtttgccctacatcgcatttgcgctctagcagctgtctgcctgatcttgcgaatcgcccgttgcgccgtactgcgctgttgcccaacttggacagcatccgctatgatggagcgcggttcgcccaaggacgagcgcgttctgactaccaacgcaaacggccgacaaaatactctgcgcgcctacgacagtcgccctcctctcggcaaatctgcaagcaccacaaccgctaccaaagagaatcgcatcacctctgacaccgagtctggcgcactgcccaagcgacagcctgcacgtgtcgccagccaccaccaccacggctctgactccttcatccaccgccgattcgagcctccgagtccgtctgagacatcagatcgcagcagcatcgtcttcgggacgcccagacactcggcagctgccacacgcaatactcgcatccctcgccccaagaccaccgcccccatcaccagcatcagccatccgaatcccgctgatcaacgagactcccctgagccgtcctctccgatgcgctaccctatgagcatgagcgcagcattccggcgagcccaggagcaaacagctgcagaggatttcgcagattccgactccacggccgacaacgctggcttcaatggcgcccgaggtatcgatggttcccctagtccggctccacggtcattccgtcgcgatcttccaactccgatcctcccaaacgctacttcgggaacaaaccatatcgatctcaagaagcatctccagcagtttgaccgaactcaccgcttaaccggtaatggcggccgtggcgagcctgtcaacggcttgttcgcaaaacctgatgctgcttccaagatttcggaaaccgctcatacatcggccaggaaagcgagcggcgcaggcttgacagggccgactgaaagccgcaagcaagaatatccttccgcttcagaatcagccgatgaaagtgtcaagccccacgcaacggggaacgcaatttctcagcccaccgactgggtgcctggcgcgggcactgcagatattgctgtcccatctatcgagtatgaggaagcaagcgacggcctagattcaccagctttccggcccctgaaccgatcaccggagaggggtatgaactggcaacttgacgccgactttacagctggagacctccaggtatctgaaagtccgcgagtcaaagtcactgagattattgacaccaccgccgttcctacctcgaggcgcccgaacggccgactatcccagattcaagagcgagagatcgaagtcgggaagacaaatcttgcggaagattcgttatataatgaacagaaagctactaggctatcggaaatcagagctcgagagatggaagccctcacgagacgcgccgtagcctcgagccgactcgacgaaatccggatgagaaactctgagcctcgttctgagtctcccgaaaatcgcaagcaacaagatagaaagcctagcaatggtcgatctccgctgatgaacagtgagagggccaatgattcgcagacgggcatctcaaggccagaagtaaacctgggaccagctctgagtactttacgcgccgacgatagaacggtcgatagaaaagccaaagccaacgagggcttggagacgaattccgacagaatgatggacacacgtggatttgccggcaagaatgatcctaatgacttgcttcgccgtcttactcgagctattagctcaagtccgcccgtgaaggacgttgaggagaagaacgcaaatgaaaaggtagcacccctaaaacagaccgctttgaacaaagcaactgtggaacatgactccaaccgtgcttcgacttcgaaagaggaaacgaagcccagaaatctggatattaagaacagcagagaaaggctcacggtgggctttgcagaccacaagcgaaatgtctcgagcaactctgtgcaagaaaaacgatctagtatgcataactcagatatagatccaaccgatcgtattgaggcggaacttaagctgtttgcgcctcaggacaactactcagaaaaaggttccaccagagccccctctcccggctcgtctgaaccaataaatgaagaaacgccgcgacctttgaagatagatcctttgacacaaccaacgcctcgggtcactggtgcttacgttgatactccggctacagtgcgggtgcagcccaatcatcaccctcatacggagccctctaaggcaaatacagacgtgagcggcaggacatcacctagggcatcttcaatgccgacaccgtccagacggaacaagtcatcgtcacgacgacgacgcccacttgttaacaccgcaaagccacctaccgtgaaagaagatttgatatcgattttacgagcccacaatatcgacgattcgaccttagagaaccttggttctatcctcagtagtcgagacgagaccgaagatgacttcgaccaaacggatgatgccatcgaaatggcgcctctcaagagtgagggcgatcttgactcgacgttttccagcactccggatggcaagcgcgagcttgcagcctatgacagaatgagcaaatcacttgaaactggtctactgggcattcgctctgccaaaaagggaattgagcgcttggaaggcaaggttattcacgcggaccgtaaagatacccaggctctgccccagcctgtccatcctcaacctgtgcgtgcttcgaatgataaaacacatctgtcccggcctcttgaagatggcgtcccgctgctcatacctgtaccgcgattgtaccgcaaagatcctcatttcaaactcactactttcggcatttttgcattgttatttgctctctggtataccctcgaaagcgcattctgtttgttttacgaagggccggagtacgagtgcacgcctagcattccgtgcgaatggtcacctaacgagccatactttccctacaccatgccattcatgttagatgaatgggtgaccggcggcaaagggagagctctggcattgcgggtgggtgaggaaattggcgatatagcggctgacgcttctgattgggtgacaaacacagacttcacccaattcgatcagcgcttcatgaatgtgtggcagcgcaagagacatctacgaagactgcgcaaacacaaccttgttgagaagtggcgagaacctgaaggctaccaggccagatatccaaaatggcttgctgccaaggcggcaagggagttgggatatgatggtgaggatgagacgatgagtgccgacgaaatagttcggtgatgtgtttgacgacttatgatgtatgactctgtaattatatcggctaaggagatatgggctgcatggtgttgaggacttgcttttacatttgcaaagggcaaaattcgccataggaaaaccggctggtgttttgctggacgacttgcgctattggtttgacgcatcttgaatcaaggacgacatgcttcccttgaagtaaatgccgcgatggcactcgaagcgtctatcccaaaacggtcatttttaaggtagataacacgtagcagcaatgcgccttaatttgacgctgctttggggtttcatctcataagcttcttgaatctctcgaacttgtgcaaaggcatactgtcggactacattcgctatctaatgttgtctagcccgtctaggtctcgagacactgactcgctcccgcaatgatttgcaaaatctactctgcgttgatcatgacattcatcacaatcgtgtcaagccatcccctccattggcaacgcaatt

SEQ ID NO: 8070 - DNA, 660 bp, Muscodor strobelii
  misc_feature: SGI cDNA ID NO. 562467
  misc_feature: Elevated expression when VOC is produced
  misc_feature: Encodes the peptide sequence at SEQ ID NO 8071
atggctttcggcaagatctggacttatcccaacaatatacgggttaaccgtgtcaaaatcatcgccaagatgaacggtcttgagcttgagttccccgaatttaccatgcgagagaccaacacgaccgacgagtttaaagcgaagttccctctcggcaaagttcctgcatttgagagtgccgatggtctttgcctttccgagagcattgctattgcgacatatgtcgctcgctcaggtcccgctgctggtcagctccttggtgcggatccgaagacggaagcattgatttcacagtgggtagcttttaccgagtgtgagatattcaacaatgtcttcgcgccaatcgcgatgaccgtcatgaaattcattccgctagacgagcatcgattcaactcgtccattgcaggaacggagcgttgcttcaagcgcctggaggttgccctccagggtggcaagaagtatcttgttggtgacaagttgactatggctgatttattcgtcacgagcatgttctggttctcatttaagcacgtcgtcgacgccgagatgcgaaaggagatccccaacgttgttgcgtacgccaagtcttttgcagagaaccctgagttcaaggagctctatggtgagcttgagatgtgcgaaactcgcatcaaagcatag

SEQ ID NO: 8071 - protein, 219 aa, Muscodor strobelii
  misc_feature: SGI Peptide ID NO. 562467
  misc_feature (112)..(201): Pfam Id: PF00043 Pfam Desc: Glutathione S-transferase, C-terminal domain
  misc_feature (2)..(77): Pfam Id: PF02798 Pfam Desc: Glutathione S-transferase, N-terminal domain
  misc_feature (3)..(219): NCBI GI: 116206126 Blast Desc: CHGG_02356 [Chaetomium globosum CBS 148.51] gi|88182953|gb|EAQ90421.1| CHGG_02356 [Chaetomium globosum CBS 148.51]
  misc_feature (4)..(219): NCBI GI: 171678335 Blast Desc: protein product [Podospora anserina] gi|170937237|emb|CAP61894.1| protein product [Podospora anserina]
  misc_feature (1)..(212): NCBI GI: 256733363 Blast Desc: NECHADRAFT_77356 [Nectria haematococca mpVI 77-13-4]
  misc_feature (3)..(216): NCBI GI: 115397343 Blast Desc: conserved [Aspergillus terreus NIH2624] gi|114192454|gb|EAU34154.1| conserved [Aspergillus terreus NIH2624]
  misc_feature (3)..(217): NCBI GI: 145609902 Blast Desc: MGG_12569 [Magnaporthe grisea 70-15] gi|145017289|gb|EDK01652.1| MGG_12569 [Magnaporthe grisea 70-15]
  misc_feature (1)..(209): NCBI GI: 149210345 Blast Desc: MGCH7_ch7g650 [Magnaporthe grisea 70-15] gi|86196605|gb|EAQ71243.1| MGCH7_ch7g650 [Magnaporthe grisea 70-15]
  misc_feature (1)..(216): NCBI GI: 145230145 Blast Desc: An01g09610 [Aspergillus niger] gi|134055496|emb|CAK44011.1| protein product [Aspergillus niger]
  misc_feature (3)..(216): NCBI GI: 256730047 Blast Desc: NECHADRAFT_104901 [Nectria haematococca mpVI 77-13-4]
  misc_feature (3)..(216): NCBI GI: 255957171 Blast Desc: Pc21g23710 [Penicillium chrysogenum Wisconsin 54-1255] gi|211591049|emb|CAP97268.1| Pc21g23710 [Penicillium chrysogenum Wisconsin 54-1255]
  misc_feature (1)..(216): NCBI GI: 70996650 Blast Desc: translation elongation factor eEF-1B gamma subunit [Aspergillus fumigatus Af293] gi|66850715|gb|EAL91042.1| translation elongation factor eEF-1B gamma subunit, [Aspergillus
  misc_feature (44)..(193): SWISSPROT Homolog: EC 2.5.1.18 Glutathione transferase
  misc_feature: Useful for introducing or modulating the production of volatile compounds
MAFGKIWTYPNNIRVNRVKIIAKMNGLELEFPEFTMRETNTTDEFKAKFPLGKVPAFESADGLCLSESIAIATYVARSGPAAGQLLGADPKTEALISQWVAFTECEIFNNVFAPIAMTVMKFIPLDEHRFNSSIAGTERCFKRLEVALQGGKKYLVGDKLTMADLFVTSMFWFSFKHVVDAEMRKEIPNVVAYAKSFAENPEFKELYGELEMCETRIKA

SEQ ID NO: 8072 - DNA, 1596 bp, Muscodor strobelii
  misc_feature: SGI EST ID NO. CUFF.19928.0
  misc_feature: Variant of the nucleotide sequence at SEQ ID NO 8070
ctgccggtcacatcgcccaattcttgatatttaaacttgatttcaaagcaagagagtgcattgtttcccaagtcgatgtatctcgaccattcatctgatgttcttagcgcaggggtaagaagacgagccgcatgtcggcatcagggttcactacccgctttccgggtgaaacaatctgcaaatgttaggcagaccaggcttttttcagccaacacactttcccttaaaagttgtacaggtgtcaaacatagcaggctcatctggccatctcgtgtagagggcagtcccgcttacaaattcagatggcttgctgtgggctggcctaaaaagagatagctttaaaggtgggcattcccacccaagttcggacctcacatcaaggccaattcactagtgctactcctcgattgcaacattcctgttcccgcttgcaacatctagaactccattaccacaaaaattcacgccttcgttaaattctcaaacgtgcgaggatcatcaaacgtacatcattcaaaatggctttcggcaagatctggacttatcccaacaatatacgggttaaccgtgtcaaaatcatcgccaagagtatgtttctggactaagtaggccacgatggcaccatttagagccatcaatagtctcgaaatatccccagtgatgatatgggcagcggtaaagctgatgccttgttatagtgaacggtcttgagcttgagttccccgaatttaccatgcgagagaccaacacgaccgacgagtttaaagcgaagttccctctcggcaaagttcctgcatttgagagtgccgatggtctttgcctttccgagagcattgctattgcgacatatgtcgctcgctcaggtcccgctgctggtcagctccttggtgcggatccgaagacggaagcattgatttcacagtgggtagcttttaccgagtgtgagatattcaacaatgtcttcgcgccaatcgcgatgaccgtcatgaaattcattccgctagacgagcatcgattcaactcgtccattgcaggaacggagcgttgcttcaagcgcctggaggttgccctccagggtggcaagaagtatcttgttggtgacaagttgactatggctgatttattcgtcacgagcatgttctggttctcatttaagcacgtcgtcgacgccgagatgcgaaaggagatccccaacgttgttgcgtacgccaagtcttttgcagagaaccctgagttcaaggagctctatggtgagcttgagatgtgcgaaactcgcatcaaagcatagatcgggggttatgggaagagctgaagattgaacgagggaaaaatggtgatatccttggttctatgtctcatgtccaggactcaatggctctgcattatttggcggcatgaaatttcacgagaagcattgggagggcgttgcaggacagcctatgagtgtcgcatcgttactaaagaattctacaacatcgcccttttagtacacactttgcgtcttgcatttatatctgtatcacaatagacagaacgctggttctcataacttccccttgctttgcgcttaaatctaagtcttctgtagtctcgatc

SEQ ID NO: 8073 - DNA, 867 bp, Muscodor strobelii
  misc_feature: SGI cDNA ID NO. 562468
  misc_feature: Encodes the peptide sequence at SEQ ID NO 8074
atggcaaagcagcaaacgcactgggttatcgctgcactagaaacgttctggtgcccgcttccaaacttcactcttccagaaggccacaccttcgagatccgcgagtattcgttgactcccttggacaaaatcgccgaacgaattcacgatgtcgatataatcatttcaacggtcttgccgctgaagccagaggtccttaagtcgactgtgtcaccccgtttgaagatgatcagtatcatcgcagtaggcaccgaccacgtggacttggaacacgcgcttgcgttgtacttcgcggcgcgtcgttccattgtttcaacacacttacttaaccgtactggggattggccagtcaatcgatcgcaattaggtgtgatgagaacaccggacgatgtagcgcctcggacttgccgtgatgaactcgttggaattgtcggctatggtgcaattggaaagatggccgaggctacattcagtaagctcggtatgaaaataatcattgctgggcgaaaaggtgacacgacgactgtggctggtcgagtctcgtttgagacagccgttcgcgagtcttcagttctcatcatatgctgtcctcgagcgccctcaacacttaaccttatctccgatgctgagttcaacatgatgaagccgtactctctcttgattaacgtttctcgaggtggtatcgtcgacgaggatgcattggtcactgcgctgaaacaaggtaaaattgcgggagcgggaacagatgtttatgctgtggaacctgcaagcccgagtaatagcccactacttgcggatgataccaaagaggtacgtgtcaagatcaactactactctggtaccttgacctcgttattcagaagctaa

SEQ ID NO: 8074 - protein, 288 aa, Muscodor strobelii
  misc_feature: SGI Peptide ID NO. 562468
  misc_feature (93)..(265): Pfam Id: PF02826 Pfam Desc: D-isomer specific 2-hydroxyacid dehydrogenase, NAD binding domain
  misc_feature (26)..(92): Pfam Id: PF00389 Pfam Desc: D-isomer specific 2-hydroxyacid dehydrogenase, catalytic domain
  misc_feature (93)..(267): Pfam Id: PF02826 Pfam Desc: D-isomer specific 2-hydroxyacid dehydrogenase, NAD binding domain
  misc_feature (6)..(273): NCBI GI: 121701253 Blast Desc: glycerate dehydrogenase [Aspergillus clavatus NRRL 1] gi|119397034|gb|EAW07465.1| glycerate dehydrogenase [Aspergillus clavatus NRRL 1]
  misc_feature (6)..(265): NCBI GI: 255953261 Blast Desc: Pc21g03190 [Penicillium chrysogenum Wisconsin 54-1255] gi|211589094|emb|CAP95216.1| Pc21g03190 [Penicillium chrysogenum Wisconsin 54-1255]
  misc_feature (6)..(269): NCBI GI: 119495211 Blast Desc: glycerate dehydrogenase [Neosartorya fischeri NRRL 181] gi|119412557|gb|EAW22498.1| glycerate dehydrogenase [Neosartorya fischeri NRRL 181]
  misc_feature (7)..(273): NCBI GI: 70995956 Blast Desc: D-isomer specific 2-hydroxyacid dehydrogenase family protein [Aspergillus fumigatus Af293] gi|20145240|emb|CAD29597.1| glycerate dehydrogenase, [Aspergillus fumigatus] D-isomer family
  misc_feature (22)..(275): NCBI GI: 115492065 Blast Desc: conserved [Aspergillus terreus NIH2624] gi|114197520|gb|EAU39220.1| conserved [Aspergillus terreus NIH2624]
  misc_feature (7)..(273): NCBI GI: 259489026 Blast Desc: TPA: D-isomer specific 2-hydroxyacid dehydrogenase family protein (AFU_orthologue; AFUA_1G13630) [Aspergillus nidulans FGSC A4]
  misc_feature (10)..(273): NCBI GI: 145240279 Blast Desc: An08g06710 [Aspergillus niger] gi|134077301|emb|CAK45641.1| protein product [Aspergillus niger]
  misc_feature (5)..(273): NCBI GI: 242774481 Blast Desc: D-isomer specific 2-hydroxyacid dehydrogenase family protein [Talaromyces stipitatus ATCC 10500] gi|218722068|gb|EED21486.1| D-isomer specific 2-hydroxyacid ATCC
  misc_feature (7)..(273): NCBI GI: 67516839 Blast Desc: AN0701.2 [Aspergillus nidulans FGSC A4] gi|40746321|gb|EAA65477.1| AN0701.2 [Aspergillus nidulans FGSC A4]
  misc_feature (19)..(273): NCBI GI: 212531963 Blast Desc: D-isomer specific 2-hydroxyacid dehydrogenase family protein [Penicillium marneffei ATCC 18224] gi|210071502|gb|EEA25591.1| D-isomer specific 2-hydroxyacid ATCC
  misc_feature (14)..(266): SWISSPROT Homolog: EC 1.1.1.29 Glycerate dehydrogenase
MAKQQTHWVIAALETFWCPLPNFTLPEGHTFEIREYSLTPLDKIAERIHDVDIIISTVLPLKPEVLKSTVSPRLKMISIIAVGTDHVDLEHALALYFAARRSIVSTHLLNRTGDWPVNRSQLGVMRTPDDVAPRTCRDELVGIVGYGAIGKMAEATFSKLGMKIIIAGRKGDTTTVAGRVSFETAVRESSVLIICCPRAPSTLNLISDAEFNMMKPYSLLINVSRGGIVDEDALVTALKQGKIAGAGTDVYAVEPASPSNSPLLADDTKEVRVKINYYSGTLTSLFRS

SEQ ID NO: 8075 - DNA, 2703 bp, Muscodor strobelii
  misc_feature: SGI cDNA ID NO. 562469
  misc_feature: Reduced expression when VOC is produced
  misc_feature: Encodes the peptide sequence at SEQ ID NO 8076
atgctcttcgcccgaaaatcctacagcaagtcaaatcccacttgcgcaaagccgtccttcgagcgcccaaaattcaactcccatgtgacttctgaccggctgaaagaaaacgcaaggttcgcaatacccatgacgaccagtaagataagaaaggggaggaaatctgtatttcgagaggtgggactggaagatgataggaaaagactgcacgaagacgatgaaaaggtgcccgaattagaagagaaggagttcgaggcaatcacagcgccaataacagcacccacgccagaagcagtaccaccgaaacgcgagcgcaatgattctgtagggtctaccggaggccagtcaacaggagggaagtcgaggttctctctgtccagattctcagtaaagcgtccaaagattaaagccgccgccgcttcaccgcctccatcgaccggcagcctacacagagtttccatgattgcattgcttatcgctgttgtcctcccaaccatcagctacaacaatggtcgcaagaaagtcgaacttagtggcgccgatgctggtgtcatccgaacaaggagtttcccgctagataatcgtgctaacagtccaacggacgtgtgcaaaagatgggcagctcagagtgctttactcaatggtacactctattactatggcggtcgttcaataacgagccaagaccaaacagataaccaatggaacaatgatttcatcacgctcgatctgacaacatcatggagtatcaactcgccgcctttaaagggactgccgcagccttcgggtccaccagctatatcagaggggtacctttggaacagtttcgattccctttttctatacggtggtcaatttgactatccgtcgagtcttcctactagtgtctcgacatgggagtatgaaattgcttcatctaagtggacagaatttcaatcgccaacaacatctgacggacagtattcagatgaaggtggcgcacctgtgcagcgtgctgcagaaggagccggaatttcagttcccgagcttggactgagttggtattttggtggtcacctcgattgggccactactgaaggatggtcaaatcaaatccgtcgtatttacttgaagagtcttcttgaattcacacatcccggatacgcaaacccccaagtaaggtcgctcgataacgctggtgctccagatggtggtgcgtaccgaaatatcacatgggcgggcgagcaaaatcaacagggtttcaccgaacgcgcagacggtgttatagtatatgtcccgggatggggcacagatgggatcgtgctcggcctgggcggtggtgttgtgggtgaagacgaaacaacagacgcgtttgcttctatgtctacaattgacgtatatgacatcgcaagtagccaatggtaccaccaagacacatccggggacgccataccacaagtccgagtcaacccatgcgccgtggttttttcggcgccagacgcaagctcgttcaacatatacatgtacggaggacagaaccttctgcctgtcggtgggcaaaggcagtacactgacatgtggattctcacgattccgtcgttcacatggatacaagtcgatacgacaggagatgagcccgccgctcgagctggtcattcgtgtgctgcgcgggacggacagattatcgtggtaggtggatacattgggaacaatacaggctgcgaaaaccccggtatctacgcctttgatgcgtcgaatctcaaatggcaggactccttcaatgccggggaccacgcagctgatgcgaattgggataatagtgtgttggcgggtagctatggctatcaagtgcctgacgctgtacagtccgtggtcggtggatcttcggacggtggtgcgactgcaacaacgcctgcttccgggccggcaactgctggtccgttcaagactggaaagccgccagtttggaccgtgaccgctgctggacaaacagctactgtgacaaattcatctcccggaagtacgagtacagtagaaaatggaggaggtgattcatcaagccacgattccgattcggctcgaaaaggtggactcatagccgcaggcgtgatagcagggttagcagggctactagcgctctacctcggattctgcgcgtggctttggcgccggcaggtagccgcgtacaagaaacatatggccgttgccaaccgatatgggggagaggatgactacggatacggcgccacaggcgccggcgaagcagggccaacactcggagccgcagcagttgcagcagcaggcaatgaaaagttacgaaagaaagacccgcaacaccgtcgaggatcgagcgccggaaacggcgatgttgacacggagcatttttcgtgggtcggccaactaggcgagccgaagttcgtttctagtagcgatgaaccctccccaggttccgggacaggttcaagtatgggcagagcaagcatgggcagagcgcgtccaagcgaagagcgcaatccatggggttggggttacgacagctatatgggcggtggagaagtggtaggagaaggtgtagaaattggaagatcaaagagtggtgcaacgagaagtacaagaagtggtggatccgcagaagcacttctcgaaggacgggagccgcatttctttagcgtcgtattgggcccgaggagagccttacgcgttgttaatggtatggaagagtga

SEQ ID NO: 8076 - protein, 900 aa, Muscodor strobelii
  misc_feature: SGI Peptide ID NO. 562469
  misc_feature (13)..(899): NCBI GI: 256735112 Blast Desc: NECHADRAFT_65530 [Nectria haematococca mpVI 77-13-4]
  misc_feature (1)..(778): NCBI GI: 85068245 Blast Desc: NCU07284 [Neurospora crassa OR74A] gi|28923735|gb|EAA32902.1| [Neurospora crassa OR74A]
  misc_feature (22)..(732): NCBI GI: 46108534 Blast Desc: FG01149.1 [Gibberella zeae PH-1]
  misc_feature (21)..(900): NCBI GI: 39975455 Blast Desc: MGG_00126 [Magnaporthe grisea 70-15] gi|145019028|gb|EDK03307.1| MGG_00126 [Magnaporthe grisea 70-15]
  misc_feature (1)..(899): NCBI GI: 170940181 Blast Desc: protein product [Podospora anserina]
  misc_feature (20)..(731): NCBI GI: 154318213 Blast Desc: BC1G_03274 [Botryotinia fuckeliana B05.10] gi|150842797|gb|EDN17990.1| BC1G_03274 [Botryotinia fuckeliana B05.10]
  misc_feature (48)..(896): NCBI GI: 156053197 Blast Desc: SS1G_06766 [Sclerotinia sclerotiorum 1980] gi|154704544|gb|EDO04283.1| SS1G_06766 [Sclerotinia sclerotiorum 1980]
  misc_feature (154)..(742): NCBI GI: 226281909 Blast Desc: conserved [Paracoccidioides brasiliensis Pb01]
  misc_feature (154)..(742): NCBI GI: 226288051 Blast Desc: conserved [Paracoccidioides brasiliensis Pb18]
  misc_feature (185)..(896): NCBI GI: 225560638 Blast Desc: conserved [Ajellomyces capsulatus G186AR]
  misc_feature: Useful for introducing or modulating the production of volatile compounds
MLFARKSYSKSNPTCAKPSFERPKFNSHVTSDRLKENARFAIPMTTSKIRKGRKSVFREVGLEDDRKRLHEDDEKVPELEEKEFEAITAPITAPTPEAVPPKRERNDSVGSTGGQSTGGKSRFSLSRFSVKRPKIKAAAASPPPSTGSLHRVSMIALLIAVVLPTISYNNGRKKVELSGADAGVIRTRSFPLDNRANSPTDVCKRWAAQSALLNGTLYYYGGRSITSQDQTDNQWNNDFITLDLTTSWSINSPPLKGLPQPSGPPAISEGYLWNSFDSLFLYGGQFDYPSSLPTSVSTWEYEIASSKWTEFQSPTTSDGQYSDEGGAPVQRAAEGAGISVPELGLSWYFGGHLDWATTEGWSNQIRRIYLKSLLEFTHPGYANPQVRSLDNAGAPDGGAYRNITWAGEQNQQGFTERADGVIVYVPGWGTDGIVLGLGGGVVGEDETTDAFASMSTIDVYDIASSQWYHQDTSGDAIPQVRVNPCAVVFSAPDASSFNIYMYGGQNLLPVGGQRQYTDMWILTIPSFTWIQVDTTGDEPAARAGHSCAARDGQIIVVGGYIGNNTGCENPGIYAFDASNLKWQDSFNAGDHAADANWDNSVLAGSYGYQVPDAVQSVVGGSSDGGATATTPASGPATAGPFKTGKPPVWTVTAAGQTATVTNSSPGSTSTVENGGGDSSSHDSDSARKGGLIAAGVIAGLAGLLALYLGFCAWLWRRQVAAYKKHMAVANRYGGEDDYGYGATGAGEAGPTLGAAAVAAAGNEKLRKKDPQHRRGSSAGNGDVDTEHFSWVGQLGEPKFVSSSDEPSPGSGTGSSMGRASMGRARPSEERNPWGWGYDSYMGGGEVVGEGVEIGRSKSGATRSTRSGGSAEALLEGREPHFFSVVLGPRRALRVVNGMEE

SEQ ID NO: 8077 - DNA, 1299 bp, Muscodor strobelii
  misc_feature: SGI cDNA ID NO. 562470
  misc_feature: Reduced expression when VOC is produced
  misc_feature: Encodes the peptide sequence at SEQ ID NO 8078
atggttgtccgaacgcccccgctcagctctctgaaaagagggtttctaccgcagattcaccaccctctgcccatgaccaaccgcgagtctcagcacctccttgacgccatcaccacctccttcagacgtaacctggatcaggaacatccgatatccgccaacgacgacccctctgcctctaccacgactacctctaccgcacccatatcgacccgactcgagacagccccagcgccaaaccgtcgtccgaccgaccgacatttacgcaccatcctggccaatcccttgtttgcccgccctcccgatgctcaagccaacccagccacggccaaggtcaagaatccattcgatgtctttgacttggccgtctccaagggcatgatgacaacgaggcgcgctgcaggtttcctggctacagtgcggtcccatctattggccgaagctcgggctgaatttccaacgaaatcgatgtctaacttacgctcccgcatgggagcttcgggcgctggtcgccacgtcgtcaggtggcttcgctcctccagcgccggcaataacttggcttttctccacgaccgcgtcttgataaatcatttactgcccttcctgtacgctgaagggttatctgagattgtgtggaactggctagctcagctcgctgctggtgctgccgagcttgaactcgcccacgatacagccagacccgacgcaaaatcgctttcgcatctcctagcgaccctaatcgccgagaatagcaatgccagctgggaagaacatacgaacttagatggttcatttgctgcattgaccaaggcaaacgacatgctaccgcgagaacacccgattattgctgcgtctattagaagtatatgggccaacctatcgtgggtctcaactgtggacgcatcgaaacggccgcctccgtcagtcaatcgcttcgagaacttctgtgaactgggtcgtccaatgggatttgccctggaccttgcccatctggacctacaccatccaacaaaaccaactcacttcgccgccatggaatatttgcgtttcaacagtgccatcgtcgacaatgtgtcccacatgaagcctcgattacagaagcggattctctgtctcgtgcttgacgcagccgagcagctaaagcagaccggtcacgatagcgaagcgtcctggatagaacgtgtgcagttgagtctatttgaaagactaaacctacccagcatgttaaaacttcaaactgtggatgctctagactctcatcgcccgcttcacccagaaactagtttccgaaaatattga

SEQ ID NO: 8078 - protein, 432 aa, Muscodor strobelii
  misc_feature: SGI Peptide ID NO. 562470
  misc_feature (2)..(389): NCBI GI: 164424390 Blast Desc: NCU07283 [Neurospora crassa OR74A] gi|157070492|gb|EAA32901.2| NCU07283 [Neurospora crassa OR74A]
  misc_feature (5)..(392): NCBI GI: 256734492 Blast Desc: [Nectria haematococca mpVI 77-13-4]
  misc_feature (5)..(404): NCBI GI: 39975457 Blast Desc: MGG_00125 [Magnaporthe grisea 70-15] gi|145019029|gb|EDK03308.1| MGG_00125 [Magnaporthe grisea 70-15]
  misc_feature (15)..(392): NCBI GI: 170940182 Blast Desc: protein product [Podospora anserina]
  misc_feature (5)..(392): NCBI GI: 46107416 Blast Desc: FG00591.1 [Gibberella zeae PH-1]
  misc_feature (18)..(412): NCBI GI: 154314805 Blast Desc: BC1G_04744 [Botryotinia fuckeliana B05.10] gi|150848282|gb|EDN23475.1| BC1G_04744 [Botryotinia fuckeliana B05.10]
  misc_feature (18)..(412): NCBI GI: 156052605 Blast Desc: SS1G_06469 [Sclerotinia sclerotiorum 1980] gi|154704248|gb|EDO03987.1| SS1G_06469 [Sclerotinia sclerotiorum 1980]
  misc_feature (4)..(348): NCBI GI: 116195640 Blast Desc: CHGG_04418 [Chaetomium globosum CBS 148.51] gi|88180331|gb|EAQ87799.1| CHGG_04418 [Chaetomium globosum CBS 148.51]
  misc_feature (18)..(372): NCBI GI: 238843080 Blast Desc: conserved [Microsporum canis CBS 113480]
  misc_feature (18)..(339): NCBI GI: 115396504 Blast Desc: ATEG_04713 [Aspergillus terreus NIH2624] gi|114193460|gb|EAU35160.1| ATEG_04713 [Aspergillus terreus NIH2624]
  misc_feature: Useful for introducing or modulating the production of volatile compounds
MVVRTPPLSSLKRGFLPQIHHPLPMTNRESQHLLDAITTSFRRNLDQEHPISANDDPSASTTTTSTAPISTRLETAPAPNRRPTDRHLRTILANPLFARPPDAQANPATAKVKNPFDVFDLAVSKGMMTTRRAAGFLATVRSHLLAEARAEFPTKSMSNLRSRMGASGAGRHVVRWLRSSSAGNNLAFLHDRVLINHLLPFLYAEGLSEIVWNWLAQLAAGAAELELAHDTARPDAKSLSHLLATLIAENSNASWEEHTNLDGSFAALTKANDMLPREHPIIAASIRSIWANLSWVSTVDASKRPPPSVNRFENFCELGRPMGFALDLAHLDLHHPTKPTHFAAMEYLRFNSAIVDNVSHMKPRLQKRILCLVLDAAEQLKQTGHDSEASWIERVQLSLFERLNLPSMLKLQTVDALDSHRPLHPETSFRKY

SEQ ID NO: 8079 - DNA, 1819 bp, Muscodor strobelii
  misc_feature: SGI EST ID NO. CUFF.19849.0
  misc_feature: Variant of the nucleotide sequence at SEQ ID NO 8077
cacgacgatgcaacttcaacggctgatggagtggggctgaaagatggggacattgatcaatcatcatcatcttggtacggcccgccggctccaggtgcgagtctcgcgacatccggtcaagtacatgccctgtgaacctcctaccaacacgcgagcgctggataccattgtccacggcctgtgctgtacgaacgctccgccatacggtgcaaaacgacatcccgttaatccaatcggcggagggagagtccgaggcggcggctctggtccaactccgccaaacccgcctttacttcgaccgtcaccagaactccgccgggaccacaagcaacgataactgaagatggttgtccgaacgcccccgctcagctctctgaaaagagggtttctaccgcagattcaccaccctctgcccatgaccaaccgcgagtctcagcacctccttgacgccatcaccacctccttcagacgtaacctggatcaggaacatccgatatccgccaacgacgacccctctgcctctaccacgactacctctaccgcacccatatcgacccgactcgagacagccccagcgccaaaccgtcgtccgaccgaccgacatttacgcaccatcctggccaatcccttgtttgcccgccctcccgatgctcaagccaacccagccacggccaaggtcaagaatccattcgatgtctttgacttggccgtctccaagggcatgatgacaacgaggcgcgctgcaggtttcctggctacagtgcggtcccatctattggccgaagctcgggctgaatttccaacgaaatcgatgtctaacttacgctcccgcatgggagcttcgggcgctggtcgccacgtcgtcaggtggcttcgctcctccagcgccggcaataacttggcttttctccacgaccgcgtcttgataaatcatttactgcccttcctgtacgctgaagggttatctgagattgtgtggaactggctagctcagctcgctgctggtgctgccgagcttgaactcgcccacgatacagccagacccgacgcaaaatcgctttcgcatctcctagcgaccctaatcgccgagaatagcaatgccagctgggaagaacatacgaacttagatggttcatttgctgcattgaccaaggcaaacgacatgctaccgcgagaacacccgattattgctgcgtctattagaagtatatgggccaacctatcgtgggtctcaactgtggacgcatcgaaacggccgcctccgtcagtcaatcgcttcgagaacttctgtgaactgggtcgtccaatgggatttgccctggaccttgcccatctggacctacaccatccaacaaaaccaactcacttcgccgccatggaatatttgcgtttcaacagtgccatcgtcgacaatgtgtcccacatgaagcctcgattacagaagcggattctctgtctcgtgcttgacgcagccgagcagctaaagcagaccggtcacgatagcgaagcgtcctggatagaacgtgtgcagttgagtctatttgaaagactaaacctacccagcatgttaaaacttcaaactgtggatgctctagactctcatcgcccgcttcacccagaaactagtttccgaaaatattgactggactgtcaacaacacagctccttttacgagtttctttcctgcatggttatttgtacgctattttggttgtgatatccgcattgggttggcgttagctgtatgctatgaaatctacctgaatacgtcttaaactcgggccatctaaaactgctcgtcacttgacacgtagctttc

SEQ ID NO: 8080 - DNA, 2889 bp, Muscodor strobelii
  misc_feature: SGI cDNA ID NO. 562471
  misc_feature: Reduced expression when VOC is produced
  misc_feature: Encodes the peptide sequence at SEQ ID NO 8081
atggcggaggtacaggctagatcccaagccacgaacggccgcggccggggtggtggtcgaggaggccgcggcggtttcgctggtcgcaacaccactgcgcgacgtgccaatggcgacaagacatcctcagattctcccgctttcgacgacgacagcgacattgccctcttgagaaagcaatacggcgacagcgtcaagcccatcaaagacatctttgcagactggtccgacgccgatgtcctctacgccctgaaggaaaccgatggcgacgtcgagctcacggctactcgcatcgctgaaggcaccatctcccagtggggcgaagtctccaaagcgaagaagcccaccaaaaccaaggagtccactccttcggctggtcccgctgagacgagcagcagacctacccgtggtggccgaccggacggcggccgaggcgctcgcgctcgcggcaatgacagaggtcgtggaagcggtcgtggtcgcgcagctacccacgcgaccacaaacggccaccgtgctaaggaggccccattgtctgttcccactgaagaagcttctgcctggggaaatgccatcaccaccgctgatgatgccgacgacttcgactctaccgctaccgctactgttactgatgcccctaccgcggctcctgcagccccagtcaccgccccggaacccgccatcgcgcccagtaccacgtcaccggctgcccccaagacctgggcgggcattcttagacaatcaaccgctgttcctaaacccgcccctcagcccaaaaaggttcctgcacctgaacctgcagagatcactgagccccccgctactgagcctgttgcacccgagcctgagaaggaagccgaagtcacgcccaaggagactcctgccgaacatattgtgcctgcggaatcagtgaagattgtcgagcctgaggttgccctgcccccgtctgaagacaatctcacgcaagtaaatctcgatctgctgcctgacgagtcgcacccccctgcgacagccaccgccgccagcactacggcagactcgtgggaccctcgccaggtgccacagccgagcgctgctgtcacgccgctctcagcctcgcaggctcaacaccaggtcagccgtacgccctctagcggctacgcagcaactgcactgaaagccaccgaacaacgacctgccccccgcatgcctagttaccagcgacgccttctcgaacaggaggaagctgttcgtatgcctggcaaccgcgaagtcgaccgcgctgccgtgcagttcggagccttcaacctaggtggagacgaggaggatattgacggcaaccgtgaagatccagagactcgggcccagcctcctgttgaatctccgatcgcccctcgggccgcactgcccgccgttgctttgcctccagttgcccagcctgcacctgtcccggatgcgttttccgcggctcagaagcctgctgcctcgcagcctcagcagtctactccaactggtaccgcttccccctcgtcttctcccatagctcgtgaggctaacattatatcagtagcacccgttgcacctccgaccggccctgctgccgccacggcatcgcaagcacctaccggcaaccagtcttacgggcggttcccgcagcccagcgcgcaggagccctccgccttcccccagaaaccatatgatacttttggtcagcagacggccaccacatctgctaccagcttcgataccttccccgcaaccacctctcaagcgccgggaccgcaaagcagcggcgctttcagctcgggacccaacgactattcttcttactaccctgaacagcagcgaggcaatgcctacggcgcatactacggttatggtcaacagcaaggtggacagaaccaccacagcgagtcgaacgcggccaaccgctcatttggcgcatacggctctcaaaatgacaacctggggcagtacccacaaagcgcatcgcaacagtctcgctatcccggggctacttctaccgaggctcataacagcgggcacaacacacctaacccagtcggtcaagctcaacagcagcagagcgcggctcaggcgaaccagcctcaatccaatctccaccagcagcaacagcagcatagtggtttcccaggttatcaacatccctactacactagtccttactacgctcaatatatgaatcaaccttatggatatggacaaggtggctatggcaatgctccctacggcaagggaggttatggccaaggacaccaatacaatatgaaccctcagggcccatttgagcatggctctaccaccgccagtggcggtttcagtcagagctctctcagtggtcgtgagagcactctaggctccagcatgaacgactatggtcgcggtggcgccggacaacaagggacaggacccagcagccttggcagcggtggattcggtggcgcccatgacacatatggccgcggttctggcttcccttcgcagggtggccagtcattcaacaattcaagtgcaccagccgcgaacgctggcagcggtgcagacgatctgaagccttacggcgattctaagattgctagtggtcccagcccttcgctcgcagctgcggctcgccctggatccacgaccaatgccacacccactgcttctggacttcctcccccgcagtctgctcagcaagggatgagtggctacggtggctatcccagccatttgtcccacaacctgcatggtaaccagactggaaccagcggctatggtcttagcggctctggcaaccaggcccacggcaacaccccgtacggaggcggatacggcggtaatcagggtttcgggaactactacggcggccgacagggccacggtggatggggcggcaattacaattag

SEQ ID NO: 8081 - protein, 962 aa, Muscodor strobelii
  misc_feature: SGI Peptide ID NO. 562471
  misc_feature (32)..(962): NCBI GI: 85068241 Blast Desc: NCU07282 [Neurospora crassa OR74A] gi|28923733|gb|EAA32900.1| [Neurospora crassa OR74A]
  misc_feature (37)..(961): NCBI GI: 46107418 Blast Desc: FG00592.1 [Gibberella zeae PH-1]
  misc_feature (37)..(962): NCBI GI: 116195638 Blast Desc: CHGG_04417 [Chaetomium globosum CBS 148.51] gi|88180330|gb|EAQ87798.1| CHGG_04417 [Chaetomium globosum CBS 148.51]
  misc_feature (35)..(962): NCBI GI: 145611780 Blast Desc: MGG_00124 [Magnaporthe grisea 70-15] gi|145019030|gb|EDK03309.1| MGG_00124 [Magnaporthe grisea 70-15]
  misc_feature (19)..(961): NCBI GI: 156052601 Blast Desc: SS1G_06467 [Sclerotinia sclerotiorum 1980] gi|154704246|gb|EDO03985.1| SS1G_06467 [Sclerotinia sclerotiorum 1980]
  misc_feature (1)..(859): NCBI GI: 154314809 Blast Desc: BC1G_04746 [Botryotinia fuckeliana B05.10] gi|150848284|gb|EDN23477.1| BC1G_04746 [Botryotinia fuckeliana B05.10]
  misc_feature (40)..(662): NCBI GI: 261357861 Blast Desc: conserved [Verticillium albo-atrum VaMs.102]
  misc_feature (1)..(961): NCBI GI: 189204378 Blast Desc: conserved [Pyrenophora tritici-repentis Pt-1C-BFP] gi|187985623|gb|EDU51111.1| conserved [Pyrenophora tritici-repentis Pt-1C-BFP]
  misc_feature (1)..(908): NCBI GI: 169610197 Blast Desc: SNOG_08195 [Phaeosphaeria nodorum SN15] gi|111063351|gb|EAT84471.1| SNOG_08195 [Phaeosphaeria nodorum SN15]
  misc_feature (1)..(941): NCBI GI: 240273608 Blast Desc: rnapii degradation factor def1 [Ajellomyces capsulatus H143]
  misc_feature: Useful for introducing or modulating the production of volatile compounds
MAEVQARSQATNGRGRGGGRGGRGGFAGRNTTARRANGDKTSSDSPAFDDDSDIALLRKQYGDSVKPIKDIFADWSDADVLYALKETDGDVELTATRIAEGTISQWGEVSKAKKPTKTKESTPSAGPAETSSRPTRGGRPDGGRGARARGNDRGRGSGRGRAATHATTNGHRAKEAPLSVPTEEASAWGNAITTADDADDFDSTATATVTDAPTAAPAAPVTAPEPAIAPSTTSPAAPKTWAGILRQSTAVPKPAPQPKKVPAPEPAEITEPPATEPVAPEPEKEAEVTPKETPAEHIVPAESVKIVEPEVALPPSEDNLTQVNLDLLPDESHPPATATAASTTADSWDPRQVPQPSAAVTPLSASQAQHQVSRTPSSGYAATALKATEQRPAPRMPSYQRRLLEQEEAVRMPGNREVDRAAVQFGAFNLGGDEEDIDGNREDPETRAQPPVESPIAPRAALPAVALPPVAQPAPVPDAFSAAQKPAASQPQQSTPTGTASPSSSPIAREANIISVAPVAPPTGPAAATASQAPTGNQSYGRFPQPSAQEPSAFPQKPYDTFGQQTATTSATSFDTFPATTSQAPGPQSSGAFSSGPNDYSSYYPEQQRGNAYGAYYGYGQQQGGQNHHSESNAANRSFGAYGSQNDNLGQYPQSASQQSRYPGATSTEAHNSGHNTPNPVGQAQQQQSAAQANQPQSNLHQQQQQHSGFPGYQHPYYTSPYYAQYMNQPYGYGQGGYGNAPYGKGGYGQGHQYNMNPQGPFEHGSTTASGGFSQSSLSGRESTLGSSMNDYGRGGAGQQGTGPSSLGSGGFGGAHDTYGRGSGFPSQGGQSFNNSSAPAANAGSGADDLKPYGDSKIASGPSPSLAAAARPGSTTNATPTASGLPPPQSAQQGMSGYGGYPSHLSHNLHGNQTGTSGYGLSGSGNQAHGNTPYGGGYGGNQGFGNYYGGRQGHGGWGGNYN

SEQ ID NO: 8082 - DNA, 3706 bp, Muscodor strobelii
  misc_feature: SGI EST ID NO. CUFF.20245.1
  misc_feature: Variant of the nucleotide sequence at SEQ ID NO 8080
gcccaaaaaagcatcattcctctccatcgcgctggagcgctgtcttgccatcgtgacggcctctcatccctcttgatttcccatccgatcgccgttgtcgcctggcaattggtcggtcctgctccctctgcatcacgccacgtcggaaaaactccgttgtactcattctcccgccgcgattcgacattcgcgcacatactgcctcgacttgcatctgcctgcgtgcatccagtcgcgatccacgcgtgtgcatagcgtctccgatctgacacaactcatctcttctcccccttcttgctaagggctgcatttccactctcaccctcacacatcacataccacacatcctcaccatagaaatggcggaggtacaggctagatcccaagccacgaacggccgcggccggggtggtggtcgaggaggccgcggcggtttcgctggtcgcaacaccactgcgcgacgtgccaatggcgacaagacatcctcagattctcccgctttcgacgacgacagcgacattgccctcttgagaaagcaatacggcgacagcgtcaagcccatcaaagacatctttgcagactggtccgacgccgatgtcctctacgccctgaaggaaaccgatggcgacgtcgagctcacggctactcgcatcgctgaaggcaccatctcccagtggggcgaagtctccaaagcgaagaagcccaccaaaaccaaggagtccactccttcggctggtcccgctgagacgagcagcagacctacccgtggtggccgaccggacggcggccgaggcgctcgcgctcgcggcaatgacagaggtcgtggaagcggtcgtggtcgcgcagctacccacgcgaccacaaacggccaccgtgctaaggaggccccattgtctgttcccactgaagaagcttctgcctggggaaatgccatcaccaccgctgatgatgccgacgacttcgactctaccgctaccgctactgttactgatgcccctaccgcggctcctgcagccccagtcaccgccccggaacccgccatcgcgcccagtaccacgtcaccggctgcccccaagacctgggcgggcattcttagacaatcaaccgctgttcctaaacccgcccctcagcccaaaaaggttcctgcacctgaacctgcagagatcactgagccccccgctactgagcctgttgcacccgagcctgagaaggaagccgaagtcacgcccaaggagactcctgccgaacatattgtgcctgcggaatcagtgaagattgtcgagcctgaggttgccctgcccccgtctgaagacaatctcacgcaagtaaatctcgatctgctgcctgacgagtcgcacccccctgcgacagccaccgccgccagcactacggcagactcgtgggaccctcgccaggtgccacagccgagcgctgctgtcacgccgctctcagcctcgcaggctcaacaccaggtcagccgtacgccctctagcggctacgcagcaactgcactgaaagccaccgaacaacgacctgccccccgcatgcctagttaccagcgacgccttctcgaacaggaggaagctgttcgtatgcctggcaaccgcgaagtcgaccgcgctgccgtgcagttcggagccttcaacctaggtggagacgaggaggatattgacggcaaccgtgaagatccagagactcgggcccagcctcctgttgaatctccgatcgcccctcgggccgcactgcccgccgttgctttgcctccagttgcccagcctgcacctgtcccggatgcgttttccgcggctcagaagcctgctgcctcgcagcctcagcagtctactccaactggtaccgcttccccctcgtcttctcccatagctcgtgaggctaacattatatcagtagcacccgttgcacctccgaccggccctgctgccgccacggcatcgcaagcacctaccggcaaccagtcttacgggcggttcccgcagcccagcgcgcaggagccctccgccttcccccagaaaccatatgatacttttggtcagcagacggccaccacatctgctaccagcttcgataccttccccgcaaccacctctcaagcgccgggaccgcaaagcagcggcgctttcagctcgggacccaacgactattcttcttactaccctgaacagcagcgaggcaatgcctacggcgcatactacggttatggtcaacagcaaggtggacagaaccaccacagcgagtcgaacgcggccaaccgctcatttggcgcatacggctctcaaaatgacaacctggggcagtacccacaaagcgcatcgcaacagtctcgctatcccggggctacttctaccgaggctcataacagcgggcacaacacacctaacccagtcggtcaagctcaacagcagcagagcgcggctcaggcgaaccagcctcaatccaatctccaccagcagcaacagcagcatagtggtttcccaggttatcaacatccctactacactagtccttactacgctcaatatatgaatcaaccttatggatatggacaaggtggctatggcaatgctccctacggcaagggaggttatggccaaggacaccaatacaatatgaaccctcagggcccatttgagcatggctctaccaccgccagtggcggtttcagtcagagctctctcagtggtcgtgagagcactctaggctccagcatgaacgactatggtcgcggtggcgccggacaacaagggacaggacccagcagccttggcagcggtggattcggtggcgcccatgacacatatggccgcggttctggcttcccttcgcagggtggccagtcattcaacaattcaagtgcaccagccgcgaacgctggcagcggtgcagacgatctgaagccttacggcgattctaagattgctagtggtcccagcccttcgctcgcagctgcggctcgccctggatccacgaccaatgccacacccactgcttctggacttcctcccccgcagtctgctcagcaagggatgagtggctacggtggctatcccagccatttgtcccacaacctgcatggtaaccagactggaaccagcggctatggtcttagcggctctggcaaccaggcccacggcaacaccccgtacggaggcggatacggcggtaatcagggtttcgggaactactacggcggccgacagggccacggtggatggggcggcaattacaattagaagtcggttctgtcacctaaccgcagaggccctcgtgccgggagatataagcgatacgcacgagacatggccatcgcctgagtttgaagattcacgatgtcgtggatgatcaaggcaatagttgtatttgatcctcgtttggttggcggtttcattgcatgggatgggtaaaaaagttcagctacgaccccggacggtgactctcacgtgtactatcgttttttctcaccaggaaaggtttgcgtcagtctggttgagcctgccacgccaggaaataggatggtacccaaaagcacagtttcatttagttgactgaatggcagggatcttatagtgtagtattgtacattaccacgaaattcaactctacacgttgccagcgtcagagatgttttacacacacggatgttcctaatccttcctctgtgattcgtctcatacttggatattcagtggga

SEQ ID NO: 8083 - DNA, 525 bp, Muscodor strobelii
  misc_feature: SGI cDNA ID NO. 562472
  misc_feature: Elevated expression when VOC is produced
  misc_feature: Encodes the peptide sequence at SEQ ID NO 8084
atgaacgactatggtcgcggtggcgccggacaacaagggacaggacccagcagccttggcagcggtggattcggtggcgcccatgacacatatggccgcggttctggcttcccttcgcagggtggccagtcattcaacaattcaagtgcaccagccgcgaacgctggcagcggtgcagacgatctgaagccttacggcgattctaagattgctagtggtcccagcccttcgctcgcagctgcggctcgccctggatccacgaccaatgccacacccactgcttctggacttcctcccccgcagtctgctcagcaagggatgagtggctacggtggctatcccagccatttgtcccacaacctgcatggtaaccagactggaaccagcggctatggtcttagcggctctggcaaccaggcccacggcaacaccccgtacggaggcggatacggcggtaatcagggtttcgggaactactacggcggccgacagggccacggtggatggggcggcaattacaattag

SEQ ID NO: 8084 - protein, 174 aa, Muscodor strobelii
  misc_feature: SGI Peptide ID NO. 562472
  misc_feature (1)..(174): NCBI GI: 116195638 Blast Desc: CHGG_04417 [Chaetomium globosum CBS 148.51] gi|88180330|gb|EAQ87798.1| CHGG_04417 [Chaetomium globosum CBS 148.51]
  misc_feature (1)..(174): NCBI GI: 85068241 Blast Desc: NCU07282 [Neurospora crassa OR74A] gi|28923733|gb|EAA32900.1| [Neurospora crassa OR74A]
  misc_feature (1)..(173): NCBI GI: 156052601 Blast Desc: SS1G_06467 [Sclerotinia sclerotiorum 1980] gi|154704246|gb|EDO03985.1| SS1G_06467 [Sclerotinia sclerotiorum 1980]
  misc_feature (1)..(147): NCBI GI: 256735207 Blast Desc: NECHADRAFT_123079 [Nectria haematococca mpVI 77-13-4]
  misc_feature (1)..(173): NCBI GI: 46107418 Blast Desc: FG00592.1 [Gibberella zeae PH-1]
  misc_feature (1)..(141): NCBI GI: 170940183 Blast Desc: protein product [Podospora anserina]
  misc_feature (5)..(122): NCBI GI: 261357861 Blast Desc: conserved [Verticillium albo-atrum VaMs.102]
  misc_feature (3)..(173): NCBI GI: 145611780 Blast Desc: MGG_00124 [Magnaporthe grisea 70-15] gi|145019030|gb|EDK03309.1| MGG_00124 [Magnaporthe grisea 70-15]
  misc_feature (4)..(117): NCBI GI: 258563790 Blast Desc: [Uncinocarpus reesii 1704] gi|237908147|gb|EEP82548.1| [Uncinocarpus reesii 1704]
  misc_feature (4)..(117): NCBI GI: 119187203 Blast Desc: CIMG_03649 [Coccidioides immitis RS]
  misc_feature: Useful for introducing or modulating the production of volatile compounds
MNDYGRGGAGQQGTGPSSLGSGGFGGAHDTYGRGSGFPSQGGQSFNNSSAPAANAGSGADDLKPYGDSKIASGPSPSLAAAARPGSTTNATPTASGLPPPQSAQQGMSGYGGYPSHLSHNLHGNQTGTSGYGLSGSGNQAHGNTPYGGGYGGNQGFGNYYGGRQGHGGWGGNYN

SEQ ID NO: 8085 - DNA, 3706 bp, Muscodor strobelii; identical to SEQ ID NO: 8082
  misc_feature: SGI EST ID NO. CUFF.20245.1
  misc_feature: Variant of the nucleotide sequence at SEQ ID NO 8083

SEQ ID NO: 8086 - DNA, 2835 bp, Muscodor strobelii
  misc_feature: SGI cDNA ID NO. 562473
  misc_feature: Reduced expression when VOC is produced
  misc_feature: Encodes the peptide sequence at SEQ ID NO 8087
atggcggaggtacaggctagatcccaagccacgaacggccgcggccggggtggtggtcgaggaggccgcggcggtttcgctggtcgcaacaccactgcgcgacgtgccaatggcgacaagacatcctcagattctcccgctttcgacgacgacagcgacattgccctcttgagaaagcaatacggcgacagcgtcaagcccatcaaagacatctttgcagactggtccgacgccgatgtcctctacgccctgaaggaaaccgatggcgacgtcgagctcacggctactcgcatcgctgaaggcaccatctcccagtggggcgaagtctccaaagcgaagaagcccaccaaaaccaaggagtccactccttcggctggtcccgctgagacgagcagcagacctacccgtggtggccgaccggacggcggccgaggcgctcgcgctcgcggcaatgacagaggtcgtggaagcggtcgtggtcgcgcagctacccacgcgaccacaaacggccaccgtgctaaggaggccccattgtctgttcccactgaagaagcttctgcctggggaaatgccatcaccaccgctgatgatgccgacgacttcgactctaccgctaccgctactgttactgatgcccctaccgcggctcctgcagccccagtcaccgccccggaacccgccatcgcgcccagtaccacgtcaccggctgcccccaagacctgggcgggcattcttagacaatcaaccgctgttcctaaacccgcccctcagcccaaaaaggttcctgcacctgaacctgcagagatcactgagccccccgctactgagcctgttgcacccgagcctgagaaggaagccgaagtcacgcccaaggagactcctgccgaacatattgtgcctgcggaatcagtgaagattgtcgagcctgaggttgccctgcccccgtctgaagacaatctcacgcaagtaaatctcgatctgctgcctgacgagtcgcacccccctgcgacagccaccgccgccagcactacggcagactcgtgggaccctcgccaggtgccacagccgagcgctgctgtcacgccgctctcagcctcgcaggctcaacaccaggtcagccgtacgccctctagcggctacgcagcaactgcactgaaagccaccgaacaacgacctgccccccgcatgcctagttaccagcgacgccttctcgaacaggaggaagctgttcgtatgcctggcaaccgcgaagtcgaccgcgctgccgtgcagttcggagccttcaacctaggtggagacgaggaggatattgacggcaaccgtgaagatccagagactcgggcccagcctcctgttgaatctccgatcgcccctcgggccgcactgcccgccgttgctttgcctccagttgcccagcctgcacctgtcccggatgcgttttccgcggctcagaagcctgctgcctcgcagcctcagcagtctactccaactgtagcacccgttgcacctccgaccggccctgctgccgccacggcatcgcaagcacctaccggcaaccagtcttacgggcggttcccgcagcccagcgcgcaggagccctccgccttcccccagaaaccatatgatacttttggtcagcagacggccaccacatctgctaccagcttcgataccttccccgcaaccacctctcaagcgccgggaccgcaaagcagcggcgctttcagctcgggacccaacgactattcttcttactaccctgaacagcagcgaggcaatgcctacggcgcatactacggttatggtcaacagcaaggtggacagaaccaccacagcgagtcgaacgcggccaaccgctcatttggcgcatacggctctcaaaatgacaacctggggcagtacccacaaagcgcatcgcaacagtctcgctatcccggggctacttctaccgaggctcataacagcgggcacaacacacctaacccagtcggtcaagctcaacagcagcagagcgcggctcaggcgaaccagcctcaatccaatctccaccagcagcaacagcagcatagtggtttcccaggttatcaacatccctactacactagtccttactacgctcaatatatgaatcaaccttatggatatggacaaggtggctatggcaatgctccctacggcaagggaggttatggccaaggacaccaatacaatatgaaccctcagggcccatttgagcatggctctaccaccgccagtggcggtttcagtcagagctctctcagtggtcgtgagagcactctaggctccagcatgaacgactatggtcgcggtggcgccggacaacaagggacaggacccagcagccttggcagcggtggattcggtggcgcccatgacacatatggccgcggttctggcttcccttcgcagggtggccagtcattcaacaattcaagtgcaccagccgcgaacgctggcagcggtgcagacgatctgaagccttacggcgattctaagattgctagtggtcccagcccttcgctcgcagctgcggctcgccctggatccacgaccaatgccacacccactgcttctggacttcctcccccgcagtctgctcagcaagggatgagtggctacggtggctatcccagccatttgtcccacaacctgcatggtaaccagactggaaccagcggctatggtcttagcggctctggcaaccaggcccacggcaacaccccgtacggaggcggatacggcggtaatcagggtttcgggaactactacggcggccgacagggccacggtggatggggcggcaattacaattag

SEQ ID NO: 8087 - protein, 944 aa, Muscodor strobelii
  misc_feature: SGI Peptide ID NO. 562473
  misc_feature (37)..(943): NCBI GI: 46107418 Blast Desc: FG00592.1 [Gibberella zeae PH-1]
  misc_feature (37)..(944): NCBI GI: 116195638 Blast Desc: CHGG_04417 [Chaetomium globosum CBS 148.51] gi|88180330|gb|EAQ87798.1| CHGG_04417 [Chaetomium globosum CBS 148.51]
  misc_feature (35)..(944): NCBI GI: 145611780 Blast Desc: MGG_00124 [Magnaporthe grisea 70-15] gi|145019030|gb|EDK03309.1| MGG_00124 [Magnaporthe grisea 70-15]
  misc_feature (19)..(943): NCBI GI: 156052601 Blast Desc: SS1G_06467 [Sclerotinia sclerotiorum 1980] gi|154704246|gb|EDO03985.1| SS1G_06467 [Sclerotinia sclerotiorum 1980]
  misc_feature (1)..(841): NCBI GI: 154314809 Blast Desc: BC1G_04746 [Botryotinia fuckeliana B05.10] gi|150848284|gb|EDN23477.1| BC1G_04746 [Botryotinia fuckeliana B05.10]
  misc_feature (40)..(644): NCBI GI: 261357861 Blast Desc: conserved [Verticillium albo-atrum VaMs.102]
  misc_feature (32)..(513): NCBI GI: 85068241 Blast Desc: NCU07282 [Neurospora crassa OR74A] gi|28923733|gb|EAA32900.1| [Neurospora crassa OR74A]
  misc_feature (1)..(943): NCBI GI: 189204378 Blast Desc: conserved [Pyrenophora tritici-repentis Pt-1C-BFP] gi|187985623|gb|EDU51111.1| conserved [Pyrenophora tritici-repentis Pt-1C-BFP]
  misc_feature (1)..(890): NCBI GI: 169610197 Blast Desc: SNOG_08195 [Phaeosphaeria nodorum SN15] gi|111063351|gb|EAT84471.1| SNOG_08195 [Phaeosphaeria nodorum SN15]
  misc_feature (36)..(923): NCBI GI: 240273608 Blast Desc: rnapii degradation factor def1 [Ajellomyces capsulatus H143]
  misc_feature: Useful for introducing or modulating the production of volatile compounds
MAEVQARSQATNGRGRGGGRGGRGGFAGRNTTARRANGDKTSSDSPAFDDDSDIALLRKQYGDSVKPIKDIFADWSDADVLYALKETDGDVELTATRIAEGTISQWGEVSKAKKPTKTKESTPSAGPAETSSRPTRGGRPDGGRGARARGNDRGRGSGRGRAATHATTNGHRAKEAPLSVPTEEASAWGNAITTADDADDFDSTATATVTDAPTAAPAAPVTAPEPAIAPSTTSPAAPKTWAGILRQSTAVPKPAPQPKKVPAPEPAEITEPPATEPVAPEPEKEAEVTPKETPAEHIVPAESVKIVEPEVALPPSEDNLTQVNLDLLPDESHPPATATAASTTADSWDPRQVPQPSAAVTPLSASQAQHQVSRTPSSGYAATALKATEQRPAPRMPSYQRRLLEQEEAVRMPGNREVDRAAVQFGAFNLGGDEEDIDGNREDPETRAQPPVESPIAPRAALPAVALPPVAQPAPVPDAFSAAQKPAASQPQQSTPTVAPVAPPTGPAAATASQAPTGNQSYGRFPQPSAQEPSAFPQKPYDTFGQQTATTSATSFDTFPATTSQAPGPQSSGAFSSGPNDYSSYYPEQQRGNAYGAYYGYGQQQGGQNHHSESNAANRSFGAYGSQNDNLGQYPQSASQQSRYPGATSTEAHNSGHNTPNPVGQAQQQQSAAQANQPQSNLHQQQQQHSGFPGYQHPYYTSPYYAQYMNQPYGYGQGGYGNAPYGKGGYGQGHQYNMNPQGPFEHGSTTASGGFSQSSLSGRESTLGSSMNDYGRGGAGQQGTGPSSLGSGGFGGAHDTYGRGSGFPSQGGQSFNNSSAPAANAGSGADDLKPYGDSKIASGPSPSLAAAARPGSTTNATPTASGLPPPQSAQQGMSGYGGYPSHLSHNLHGNQTGTSGYGLSGSGNQAHGNTPYGGGYGGNQGFGNYYGGRQGHGGWGGNYN

SEQ ID NO: 8088 - DNA, 3706 bp, Muscodor strobelii; identical to SEQ ID NO: 8082
  misc_feature: SGI EST ID NO. CUFF.20245.1
  misc_feature: Variant of the nucleotide sequence at SEQ ID NO 8086

SEQ ID NO: 8089 - DNA, 498 bp, Muscodor strobelii
  misc_feature: SGI cDNA ID NO. 562474
  misc_feature: Encodes the peptide sequence at SEQ ID NO 8090
atgagcacccgttggcgtgggcctgtaggtggtcgaaaccggctcgttatacttgattgggtatcggtaccagatgccgttggttggcttgtcgactcggtagaggatgtactagtctctggctgcggtagtggtaactcggctgacgagcttacacctgtctcagtactgaccgagctcgatgtcgatgtcgaggtcgaggaactagaagatgacgatgacgcaggagttcccggcgctggggacgtacacgacgtacactcaggcgtcacggttgtactcacggtcacgaccactgtttcagttggagtgaaagtaacagtcgaggtcgacgaaaactcagacgtcgaagtcaaaagactcgtccttgaagacgcaaatctgctcgcacgtgtctccttgttgtacgacgagggtcttgctgcagagcattggggatacgccgctagttgcgttctgatatgggatattccattggatgccttggctgacgcatag

SEQ ID NO: 8090 - protein, 165 aa, Muscodor strobelii
  misc_feature: SGI Peptide ID NO. 562474
MSTRWRGPVGGRNRLVILDWVSVPDAVGWLVDSVEDVLVSGCGSGNSADELTPVSVLTELDVDVEVEELEDDDDAGVPGAGDVHDVHSGVTVVLTVTTTVSVGVKVTVEVDENSDVEVKRLVLEDANLLARVSLLYDEGLAAEHWGYAASCVLIWDIPLDALADA

SEQ ID NO: 8091 - DNA, 1494 bp, Muscodor strobelii
  misc_feature: SGI cDNA ID NO. 562475
  misc_feature: Elevated expression when VOC is produced
  misc_feature: Encodes the peptide sequence at SEQ ID NO 8092
atggcgtcaagccaatctgacgacgcagtggaagaagtgcaagacgctgaatctcatgctagtagcagcaacctgcccgaacaattgagccttgactgcggcccgactcgtgtgctcattgaaggcggtagagaccttcggcttagtgccaatggagacggctcaattcaagccatcaaactgctccattttgagggagtcacgctggaaatacccaaggcaaagagtgcagataccccattcgggtacacccggcaacaatgttcgatgtttttaagcggcgcatctctagggtcgctgtcgtctgctgtgcataacgacagggatgcatactgcaacacccgatcagctcaagaagtggttctgaataacaccactcgctatcaacctcacgtcatgatcaaggaccttaggactcagtcacgactaatcaagatagctaattatatcgaatacctcgataatgggtttgcggaatacttccagtctgttggattccctgacaatcgtgaaacagttattcggcttctagccgatgcccgcaattccgtggaagtaaaatatccatctagcaattcgtacaccggagaactcggcaagttctgtgagtctgtcttggccacctgggagcggacagatgaaaagacggagtgggtagattatcgtcctcgaattaggaccaacgaagacaagattggatacctgcaagatgcaatggaaataccatactgggatttcatgatcaaatcattcatggactggagacgcggcaatcccagacacgtaggagcagatgggatactctacgtaatgaaccacattactgcaagttgtcggaagaaaatacgaaagatatacgaggagattcaacatctggatttgaaagagcaggcggcggtcaacacagtgattgacggtatcgagcagcggcttgagctcctcgatggtgtgcttcttggaacgacccttgaccctgacgacctagacggtatgtccacgagcaaatatccggataggattgaagcttgcagctcgggtgctgacagagacgcaatgagcaaaactagagagacatcaacgttaatcgccctcgttttcgggtttcttattctctcgaccacatttttctgtatgggctttgccgtttcgtggaaagagaacaagcccggtagtttttcggatgccgatttctggtttctttgccagagtaatgtgatgtctgtccttggcagcctggcaacggcgatgcctctgctgaagcaccatagcttcgagcgtgcacgaacgatcttttggatgactttcgtggtcagtttcattacggccgttattgctatcgcgatatatgtccacttcaacacctgctacagtgctctggtggcgttcctggggtcaatcgcatcagcggcatcgttacttgcgctcacgcaagccacgataccagggacacatttgcaagttactgccgagacgggcaaaatgaaacaagattaa

SEQ ID NO: 8092 - protein, 497 aa, Muscodor strobelii
  misc_feature: SGI Peptide ID NO. 562475
  misc_feature (110)..(428): NCBI GI: 46134213 Blast Desc: FG09246.1 [Gibberella zeae PH-1]
  misc_feature: Useful for introducing or modulating the production of volatile compounds
MASSQSDDAVEEVQDAESHASSSNLPEQLSLDCGPTRVLIEGGRDLRLSANGDGSIQAIKLLHFEGVTLEIPKAKSADTPFGYTRQQCSMFLSGASLGSLSSAVHNDRDAYCNTRSAQEVVLNNTTRYQPHVMIKDLRTQSRLIKIANYIEYLDNGFAEYFQSVGFPDNRETVIRLLADARNSVEVKYPSSNSYTGELGKFCESVLATWERTDEKTEWVDYRPRIRTNEDKIGYLQDAMEIPYWDFMIKSFMDWRRGNPRHVGADGILYVMNHITASCRKKIRKIYEEIQHLDLKEQAAVNTVIDGIEQRLELLDGVLLGTTLDPDDLDGMSTSKYPDRIEACSSGADRDAMSKTRETSTLIALVFGFLILSTTFFCMGFAVSWKENKPGSFSDADFWFLCQSNVMSVLGSLATAMPLLKHHSFERARTIFWMTFVVSFITAVIAIAIYVHFNTCYSALVAFLGSIASAASLLALTQATIPGTHLQVTAETGKMKQD

SEQ ID NO: 8093 - DNA, 1844 bp, Muscodor strobelii
  misc_feature: SGI EST ID NO. CUFF.19862.1
  misc_feature: Variant of the nucleotide sequence at SEQ ID NO 8091
ataaagtcgagcattcagccctgctaggtgctttagaaccctatttgatatttcagtcaactacttctttctcgaagcctatctctaatcacacacactatccttaagcaatcaacgacggaatggcgtcaagccaatctgacgacgcagtggaagaagtgcaagacgctgaatctcatgctagtagcagcaacctgcccgaacaattgagccttgactgcggcccgactcgtgtgctcattgaaggcggtagagaccttcggcttagtgccaatggagacggctcaattcaagccatcaaactgctccattttgagggagtcacgctggaaatacccaaggcaaagagtgcagataccccattcgggtacacccggcaacaatgttcgatgtttttaagcggcgcatctctagggtcgctgtcgtctgctgtgcataacgacagggatgcatactgcaacacccgatcagctcaagaagtggttctgaataacaccactcgctatcaacctcacgtcatgatcaaggaccttaggactcagtcacgactaatcaagatagctaattatatcgaatacctcgataatgggtttgcggaatacttccagtctgttggattccctgacaatcgtgaaacagttattcggcttctagccgatgcccgcaattccgtggaagtaaaatatccatctagcaattcgtacaccggagaactcggcaagttctgtgagtctgtcttggccacctgggagcggacagatgaaaagacggagtgggtagattatcgtcctcgaattaggaccaacgaagacaagattggatacctgcaagatgcaatggaaataccatactgggatttcatgatcaaatcattcatggactggagacgcggcaatcccagacacgtaggagcagatgggatactctacgtaatgaaccacattactgcaagttgtcggaagaaaatacgaaagatatacgaggagattcaacatctggatttgaaagagcaggcggcggtcaacacagtgattgacggtatcgagcagcggcttgagctcctcgatggtgtgcttcttggaacgacccttgaccctgacgacctagacggtatgtccacgagcaaatatccggataggattgaagcttgcagctcgggtgctgacagagacgcaatgagcaaaactagagagacatcaacgttaatcgccctcgttttcgggtttcttattctctcgaccacatttttctgtatgggctttgccgtttcgtggaaagagaacaagcccggtagtttttcggatgccgatttctggtttctttgccagagtaatgtgatgtctgtccttggcagcctggcaacggcgatgcctctgctgaagcaccatagcttcgagcgtgcacgaacgatcttttggatgactttcgtggtcagtttcattacggccgttattgctatcgcgatatatgtccacttcaacacctgctacagtgctctggtggcgttcctggggtcaatcgcatcagcggcatcgttacttgcgctcacgcaagccacgataccagggacacatttgcaagttactgccgagacgggcaaaatgaaacaagattaaacagtcttgaaatttgtgcaagtttttgcctaccctacaaaacggaatgattgtcagtctagcccgtactgttttctttctggggggctgctaggtatgaacatagtcgtattgtcctttcactcaaactaggtgttgttcatattccaaccatttcatagtagccctcgctaaatatatattaaatcattatgatcattattcaatgatcaggtggcttgctattct

SEQ ID NO: 8094 - DNA, 1413 bp, Muscodor strobelii
  misc_feature: SGI cDNA ID NO. 562476
  misc_feature: Reduced expression when VOC is produced
  misc_feature: Encodes the peptide sequence at SEQ ID NO 8095
atgtcgacgtcccgagccatgcggcctcttttgggagtcggctcgaggctaattgccgaccaattgcttccacgttccagtagaaatcaccagaggaagctcgtgtctagctattcgggaccttggacggcctcagttcggccggcgaagtcgatatgttggagctgtcgacacgatcatcatgccgcgaaacgccagcagctgcgcttctcatcgacctccaaaccaccagacgacgagaaacccagcgtgtctaccaccgcccaagacgaatctcccacccctcactcaatacccttagaaccgccgtcgccatcaccatcacaagaatcagaacccaaaacaccaccgcagcccccgcctttcacccccgatccgcacccaagcctcccctccgagcaaaactcccgacgctcagccctgaaccagtcattatcccaattcatggaccgcgcccaaaccaccctcttcgccgcctcccagcgcatcaacgacctgacaggctacagcggcatcgagtccctaaaatcccagatctccaccctcgaagcccagcttcgtaccgcgcaagcacacctcacctccacccgctccgcctacaaaagcaccgtcgccgcacggagcgccactcagcgcgagattaccactctactagcgaggcagaagacatggacgcccatagactttgaccgcttcacgacgctatacaaagaagactacgacctcgaggcctcggtcggggcccgggccaccgaactcgaagaggctgagcgcgaggcggagagactgaatagagatctaggatcgggtatactggcgaggtaccacgaggaacagatttggagtgataagatacggcgcatgagtacttggggtacgtggggtttaatgggtgtaaatgtctttctatttctgctattccagtttggcgccgaaccctggcggagaaggaggttggtaaagggcttcgaggagaaggttcgtgaggcccttgccgaggagcgggcggcaagagaggagtttgagagcgcctctcctgctgttgctgccgctgtagcgaccgtctcttctacggaggccgcggagatcgagaaggagggcgctattacggagagtgaagagccggtggtcatggttgcccccgatatcatacttcccgaatccgaggtcgcatctcctgcaactccaccagaccctactaccatcccgccggtccaaagttcgcctccggtgacctggcgcgagttcatcaaagacccgcagcgctggcgagccttcttcctggatctagctagcgaccgcctggtcgcgctgcgcatgcgcgacgtatctctcatcgtgttagagggcgtggcgaccggtattgccgttgccggaaccctcactatcctggtcttgcgtaattcgcgataa

SEQ ID NO: 8095 - protein, 470 aa, Muscodor strobelii
  misc_feature: SGI Peptide ID NO. 562476
  misc_feature (139)..(348): Pfam Id: PF05546 Pfam Desc: She9 / Mdm33 family
  misc_feature (139)..(333): Pfam Id: PF05546 Pfam Desc: She9 / Mdm33 family
  misc_feature (51)..(469): NCBI GI: 156059268 Blast Desc: SS1G_03646 [Sclerotinia sclerotiorum 1980] gi|206557749|sp|A7EEA6.1|SHE9_SCLS1 RecName: Full=Sensitive to high expression protein 9 homolog, mitochondrial; Flags: 1980]
  misc_feature (127)..(469): NCBI GI: 85106814 Blast Desc: NCU06546 [Neurospora crassa OR74A] gi|74616902|sp|Q7S9I1.1|SHE9_NEUCR RecName: Full=Sensitive to high expression protein 9 homolog, mitochondrial; Flags: crassa
  misc_feature (103)..(446): NCBI GI: 170940107 Blast Desc: protein product [Podospora anserina]
  misc_feature (45)..(467): NCBI GI: 46136287 Blast Desc: FG09659.1 [Gibberella zeae PH-1]
  misc_feature (103)..(468): NCBI GI: 39948471 Blast Desc: MGG_08688 [Magnaporthe grisea 70-15] gi|145009231|gb|EDJ93942.1| MGG_08688 [Magnaporthe grisea 70-15]
  misc_feature (51)..(467): NCBI GI: 212529792 Blast Desc: mitochondrion biogenesis protein (She9), [Penicillium marneffei ATCC 18224] gi|210074451|gb|EEA28538.1| mitochondrion biogenesis protein (She9), [Penicillium marneffei ATCC 18224]
  misc_feature (112)..(465): NCBI GI: 256727373 Blast Desc: NECHADRAFT_90802 [Nectria haematococca mpVI 77-13-4]
  misc_feature (51)..(467): NCBI GI: 242762242 Blast Desc: mitochondrion biogenesis protein (She9), [Talaromyces stipitatus ATCC 10500] gi|218723532|gb|EED22949.1| mitochondrion biogenesis protein (She9), [Talaromyces stipitatus ATCC 10500]
  misc_feature (39)..(465): NCBI GI: 119479199 Blast Desc: mitochondrion biogenesis protein (She9), [Neosartorya fischeri NRRL 181] gi|206558091|sp|A1DEC4.1|SHE9_NEOFI RecName: Full=Sensitive to high expression protein 9 homolog, Flags: NRRL
  misc_feature (51)..(467): NCBI GI: 240106017 Blast Desc: She9 / Mdm33 family protein [Coccidioides posadasii C735 delta SOWgp]
  misc_feature: Useful for introducing or modulating the production of volatile compounds
MSTSRAMRPLLGVGSRLIADQLLPRSSRNHQRKLVSSYSGPWTASVRPAKSICWSCRHDHHAAKRQQLRFSSTSKPPDDEKPSVSTTAQDESPTPHSIPLEPPSPSPSQESEPKTPPQPPPFTPDPHPSLPSEQNSRRSALNQSLSQFMDRAQTTLFAASQRINDLTGYSGIESLKSQISTLEAQLRTAQAHLTSTRSAYKSTVAARSATQREITTLLARQKTWTPIDFDRFTTLYKEDYDLEASVGARATELEEAEREAERLNRDLGSGILARYHEEQIWSDKIRRMSTWGTWGLMGVNVFLFLLFQFGAEPWRRRRLVKGFEEKVREALAEERAAREEFESASPAVAAAVATVSSTEAAEIEKEGAITESEEPVVMVAPDIILPESEVASPATPPDPTTIPPVQSSPPVTWREFIKDPQRWRAFFLDLASDRLVALRMRDVSLIVLEGVATGIAVAGTLTILVLRNSR

SEQ ID NO: 8096 - DNA, 1926 bp, Muscodor strobelii
  misc_feature: SGI EST ID NO. CUFF.19865.0
  misc_feature: Variant of the nucleotide sequence at SEQ ID NO 8094
cagagttttagctagtagcagttgcagggtaggcctaatgaaacaggagtcgttgaataccgagctaagtgaagcttagctaaaatagaaatgtgctgcaccccacgtttgcgccattccgcttcgggtagtatatcaatggttcccaccggcccgatctccaaccgggttctcacgtctttgctttctttcatggcgatgctttccgaggctgttgggcgacggcaagctcgattttaaacgacgttcatcgctaatccgtcaatgtcgacgtcccgagccatgcggcctcttttgggagtcggctcgaggctaattgccgaccaattgcttccacgttccagtagaaatcaccagaggaagctcgtgtctagctattcgggaccttggacggcctcagttcggccggcgaagtcgatatgttggagctgtcgacacgatcatcatgccgcgaaacgccagcagctgcgcttctcatcgacctccaaaccaccagacgacgagaaacccagcgtgtctaccaccgcccaagacgaatctcccacccctcactcaatacccttagaaccgccgtcgccatcaccatcacaagaatcagaacccaaaacaccaccgcagcccccgcctttcacccccgatccgcacccaagcctcccctccgagcaaaactcccgacgctcagccctgaaccagtcattatcccaattcatggaccgcgcccaaaccaccctcttcgccgcctcccagcgcatcaacgacctgacaggctacagcggcatcgagtccctaaaatcccagatctccaccctcgaagcccagcttcgtaccgcgcaagcacacctcacctccacccgctccgcctacaaaagcaccgtcgccgcacggagcgccactcagcgcgagattaccactctactagcgaggcagaagacatggacgcccatagactttgaccgcttcacgacgctatacaaagaagactacgacctcgaggcctcggtcggggcccgggccaccgaactcgaagaggctgagcgcgaggcggagagactgaatagagatctaggatcgggtatactggcgaggtaccacgaggaacagatttggagtgataagatacggcgcatgagtacttggggtacgtggggtttaatgggtgtaaatgtctttctatttctgctattccagtttggcgccgaaccctggcggagaaggaggttggtaaagggcttcgaggagaaggttcgtgaggcccttgccgaggagcgggcggcaagagaggagtttgagagcgcctctcctgctgttgctgccgctgtagcgaccgtctcttctacggaggccgcggagatcgagaaggagggcgctattacggagagtgaagagccggtggtcatggttgcccccgatatcatacttcccgaatccgaggtcgcatctcctgcaactccaccagaccctactaccatcccgccggtccaaagttcgcctccggtgacctggcgcgagttcatcaaagacccgcagcgctggcgagccttcttcctggatctagctagcgaccgcctggtcgcgctgcgcatgcgcgacgtatctctcatcgtgttagagggcgtggcgaccggtattgccgttgccggaaccctcactatcctggtcttgcgtaattcgcgataagatttgtatcatataaaaggcctacaggtaaagcgaggaaaagctcgaattcacgcttagaaacctaagagacggggtagaaacctgctatactggtgtctatagaaagacggacagacagacatacatgacaggaaatgtataaaaagaacttatgtctatatttatggttacctacacaaccgggctgggcaaggacatagacataatgataatctgcccgcttagtttccagctcactcatatagc

SEQ ID NO: 8097 - DNA, 3459 bp, Muscodor strobelii
  misc_feature: SGI cDNA ID NO. 562477
  misc_feature: Encodes the peptide sequence at SEQ ID NO 8098
atggaagacgacgaagccatcaagaacatccagagcaagatcgaccgcgagaaggcctacctaaatggcgccaatactatgcgacgccagaccaacaatgacgacgtccgctctcgcctcgacgacaagatcaaggccgcacggcgcaacatcgagttcttcgaggagaagctcggccagctgcagctcaagcgcctcaaccagggcgtcgatagcatgaacctcggttctggctccaacatgggcgacccacgaggcgacgccgacgctcctcccccacccccgaaagacgccggccagtggtctggagaccgaggctcatatggctccatgcagtacagccagatcgggggccacggtgaaacgatgcctccgcgcggtccttatgcgccccctgaacctggagcctctgtgccacatccacggcccaacttcaccaaactagacttgatcaaatatgatactcctcatcttggtccccgtatccagctcatgctgtctcaaatccagttcaagctcaatgtcgaagaacaatatctcaagggcgtggagaagatggtccagctctatggtatggaaggtgaccgcaaaagcaaggctgatgccgctgctaggcgtgtagagagcaagcaaaagattcatcttctgaggcaggcactcaaaagatacgaacagctgcacgtcgatgatttggattcccctgattctccagacgatgatagtatcaacatgccgaatctacggaagcccctcactggccaactttccattcgagtacagcagatccgggatgttgaccatgcctcgactgggcgattttcacgaggacccgagacttttcttgctatcaaagttgaagacaatgtagtggcaagaacccgagtatcccgcaatgatcggtgggaaagcgagtttcacaatatcgaggtcgataaagcaaacgagattgagcttaccgtctacgacaaacctggcgagcacgcgctccccatcggacttctgtgggtgagaatatcagatattgtagaagagcttcggcgaaagaagattgaggcagaaaatagcaactcaggttgggtttccgccgacaggatgggctcgaacgctccaccatctcaatttcccatgagtccccagtcccagcaattcggtgctcccccaggcgcaacaggtccagccggtcagcagtttggagcgctcggagcgcctgcgcttgtctctacccccatcgatggctggtttaacctggagccaaccggtgccatacatctctcactaaacttcatcaagcagaataaagaccgcaggccggtcgacatggctggccttggccgaaaaggtgctattcggcaaaggaaggaagaagtgcatgagatgtacggacataagttcgtgcagcaccaattctacaacatcatgcgctgtgcattatgtggtgatttcctcaaatactcagctggcatgcaatgtgaagactgcaaatacacgtgccacaccaaatgttatccaagtgttgtcacaaaatgtatcagcaagagcaatgccgaggacaacccagacgaggagaagatcaaccaccggattcctcatcgcttcaatccgttttcgaatgttaccgccaactggtgctgccattgtggctacattctaccgttcggcaaaaagaactgtaggaagtgcaatgaatgtggacttaccgcacatgcgtcctgtgtgcatctcgttcctgatttttgcggcatgagcatggcagtcgccaatcaaatcctagagggaattcgagcaggcaaacagaggcagagcaagggcacttctttaagcgaaaaaacattgaggtctgggaagatgagtccctccagcatgggcagtacagcatccccttttcctaccccgacaccatcctatcagccgagtattgcctcgcaggaggccaccgatgccgccaaggctatgtacacaagccagacatcgccgacaagacccgttcaacctgaccgaacttcttcgagatctaacgctgcggctgctgccgcatcggcagccatgggcggaacaatgtcttctcaaagccataggccaagtgctcaatccgattacccatctggtcgaccaagcggttacggaagttcttcagactctcacaacgacccctacgcttcgaaccagccatcgtacaacatgccgtcacagccaaagtacaatccagctctatacgccaacgtgaacacttatcctagccaaccaccactgcaaacccagcaacaccagcagatgcctcaacaaactatgccttcgccgcagcagggcccaggccaaggggcaatgttccctccaaacccggcgcctcaacatataaagccacagcctacgcaggagatcccgtcgctcacaacgggatctggcttacctccaccttcacgaaggccgttaccactagcaacagatccaggaaccggccagcggatcggtctagatcacttcaacttccttgctgtgctcggaaaaggtaatttcggcaaggtcatgcttgcagagaccaaaaagtcacgacgcctttatgccattaaggtgctcaaaaaggaatttatcattgaaaatgacgaagttgagagcatacgatcagagaagagggttttcttgattgcgaacagggagcgtcaccctttcttaaccaatcttcatgcttgtttccaaaccgagacgcgagtgtactttgtgatggaatacattagcggaggtgacctgatgctccacattcagcgtggcatgtttggcaccaaacgtgctcagttctatgctgccgaggtctgcttggcactcaagtatttccatgagaatggtgtcatttaccgcgatctcaagcttgacaacattttgcttacgctagatggacatatcaagattgcagactacggtctgtgcaaagaagacatgtggtacaagtcaacgacaagcacattttgtggcacacccgagtttatggcccccgagattctcctagataagaaatatggcagagcagtggactggtgggcattcggtgttctcatctaccaaatgcttctccagcaatccccattccgaggagaagacgaggacgagatttacgacgcgattctagctgatgagccgctttaccccattcatatgcaccgggattcggtttccatactccagaagctactcacccgagagcctgaccaacgattaggcagcgggcctacagatgcacaggagatcatgagccaacctttcttccggaacattgtgtgggatgacatatacaacaagagagtcgcaccgcctttcttgcccgtcatcaaaaacgcaactgatactagcaacttcgactccgagtttaccagtgtcacgccggttctcacgccagtaaattccgtgttgtctcaagcgatgcaagaagaattccgcggcttctcgtacacggcggactttgattag

SEQ ID NO: 8098 - protein, 1152 aa, Muscodor strobelii
  misc_feature: SGI Peptide ID NO. 562477
  misc_feature (462)..(512): Pfam Id: PF00130 Pfam Desc: Phorbol esters/diacylglycerol binding domain (C1 domain)
  misc_feature (530)..(582): Pfam Id: PF00130 Pfam Desc: Phorbol esters/diacylglycerol binding domain (C1 domain)
  misc_feature (1106)..(1151): Pfam Id: PF00433 Pfam Desc: Protein kinase C terminal domain
  misc_feature (164)..(239): Pfam Id: PF02185 Pfam Desc: Hr1 repeat
  misc_feature (5)..(77): Pfam Id: PF02185 Pfam Desc: Hr1 repeat
  misc_feature (827)..(1086): Pfam Id: PF00069 Pfam Desc: Protein kinase domain
  misc_feature (827)..(1018): Pfam Id: PF07714 Pfam Desc: Protein tyrosine kinase
  misc_feature (1)..(1152): NCBI GI: 46136289 Blast Desc: FG09660.1 [Gibberella zeae PH-1]
  misc_feature (4)..(1152): NCBI GI: 39948480 Blast Desc: MGG_08689 [Magnaporthe grisea 70-15] gi|145009232|gb|EDJ93943.1| MGG_08689 [Magnaporthe grisea 70-15]
  misc_feature (1)..(1152): NCBI GI: 256727372 Blast Desc: [Nectria haematococca mpVI 77-13-4]
  misc_feature (4)..(1152): NCBI GI: 4928705 Blast Desc: AF136600_1 protein kinase C [Magnaporthe grisea]
  misc_feature (1)..(1152): NCBI GI: 85106805 Blast Desc: NCU06544 [Neurospora crassa OR74A] gi|67476858|sp|P87253.2|KPC1_NEUCR RecName: Full=Protein kinase C-like gi|28923852|gb|EAA33015.1| NCU06544 [Neurospora crassa
  misc_feature (1)..(1152): NCBI GI: 2222775 Blast Desc: protein kinase C homologue [Neurospora crassa]
  misc_feature (1)..(1152): NCBI GI: 116195066 Blast Desc: conserved [Chaetomium globosum CBS 148.51] gi|88180044|gb|EAQ87512.1| conserved [Chaetomium globosum CBS 148.51]
  misc_feature (3)..(1151): NCBI GI: 154309167 Blast Desc: BC1G_07478 [Botryotinia fuckeliana B05.10] gi|150852521|gb|EDN27713.1| BC1G_07478 [Botryotinia fuckeliana B05.10]
  misc_feature (3)..(1151): NCBI GI: 6102720 Blast Desc: protein kinase C [Botryotinia fuckeliana]
  misc_feature (1)..(1151): NCBI GI: 4558499 Blast Desc: AF124792_1 protein kinase C [Sporothrix schenckii]
  misc_feature (1)..(1152): SWISSPROT Homolog: EC 2.7.11.13 Protein kinase C
MEDDEAIKNIQSKIDREKAYLNGANTMRRQTNNDDVRSRLDDKIKAARRNIEFFEEKLGQLQLKRLNQGVDSMNLGSGSNMGDPRGDADAPPPPPKDAGQWSGDRGSYGSMQYSQIGGHGETMPPRGPYAPPEPGASVPHPRPNFTKLDLIKYDTPHLGPRIQLMLSQIQFKLNVEEQYLKGVEKMVQLYGMEGDRKSKADAAARRVESKQKIHLLRQALKRYEQLHVDDLDSPDSPDDDSINMPNLRKPLTGQLSIRVQQIRDVDHASTGRFSRGPETFLAIKVEDNVVARTRVSRNDRWESEFHNIEVDKANEIELTVYDKPGEHALPIGLLWVRISDIVEELRRKKIEAENSNSGWVSADRMGSNAPPSQFPMSPQSQQFGAPPGATGPAGQQFGALGAPALVSTPIDGWFNLEPTGAIHLSLNFIKQNKDRRPVDMAGLGRKGAIRQRKEEVHEMYGHKFVQHQFYNIMRCALCGDFLKYSAGMQCEDCKYTCHTKCYPSVVTKCISKSNAEDNPDEEKINHRIPHRFNPFSNVTANWCCHCGYILPFGKKNCRKCNECGLTAHASCVHLVPDFCGMSMAVANQILEGIRAGKQRQSKGTSLSEKTLRSGKMSPSSMGSTASPFPTPTPSYQPSIASQEATDAAKAMYTSQTSPTRPVQPDRTSSRSNAAAAAASAAMGGTMSSQSHRPSAQSDYPSGRPSGYGSSSDSHNDPYASNQPSYNMPSQPKYNPALYANVNTYPSQPPLQTQQHQQMPQQTMPSPQQGPGQGAMFPPNPAPQHIKPQPTQEIPSLTTGSGLPPPSRRPLPLATDPGTGQRIGLDHFNFLAVLGKGNFGKVMLAETKKSRRLYAIKVLKKEFIIENDEVESIRSEKRVFLIANRERHPFLTNLHACFQTETRVYFVMEYISGGDLMLHIQRGMFGTKRAQFYAAEVCLALKYFHENGVIYRDLKLDNILLTLDGHIKIADYGLCKEDMWYKSTTSTFCGTPEFMAPEILLDKKYGRAVDWWAFGVLIYQMLLQQSPFRGEDEDEIYDAILADEPLYPIHMHRDSVSILQKLLTREPDQRLGSGPTDAQEIMSQPFFRNIVWDDIYNKRVAPPFLPVIKNATDTSNFDSEFTSVTPVLTPVNSVLSQAMQEEFRGFSYTADFD

SEQ ID NO: 8099 - DNA, 4692 bp, Muscodor strobelii
  misc_feature: SGI EST ID NO. CUFF.19884.0
  misc_feature: Variant of the nucleotide sequence at SEQ ID NO 8097
gggcacgcaacttacgccgcatggttggttacctcatcgcattggatctctttgtttcccttcaagtcattgcacgtcaagtgctttaagtgtggtgatagcgcacgagccaccaagtacccctctctccactctcccctttcgtgtgcttttgtccggctgcagtgtacaaaaccccgccatggtgggttgctgaacatgcatgattgtaggaggggaatgctgctagtaaaaaggcaaagcagaggtacaaccggacaacccagttaagtgacaataaggcaggcagcaccgggctctggaggctttgggagaagcggccgtctctccaaccacactgacgccattgcccatcccccgtcctacacaacaacaacaacgaccgggcctgcacaacttccacggctgcacaaccggagaccctggctgccttggccccgttttcctgtcctttggaggtagctactcgaagcactctttctgcttctgtgacgttttagcactttgtccattgccgtgacctccccaccgaagcatccttatctgcctcccttcctcccaccttatcttcggtattgctcaggccgttgtcgtgctttcctgtccatagcaagccagcctgcgtgttgtttgtgtgtgtgagcgtgtgagtgtgagtgcgcgtgcgtcagagttgcgaggggactttaagagtggttgaaaaagaaagaatgtgttgcaactgcgtaaagacagtcacagcaatattccactactgatcctcactggccattaagcttcgccgttacactgcacacttcacgccgccgccgttgccgctctacctgtcctgaccacccgctaccaaacacaacacaaccatcgccgactcttggtacgccgcgccaccctgcggcatatcttgcccgccatggaagacgacgaagccatcaagaacatccagagcaagatcgaccgcgagaaggcctacctaaatggcgccaatactatgcgacgccagaccaacaatgacgacgtccgctctcgcctcgacgacaagatcaaggccgcacggcgcaacatcgagttcttcgaggagaagctcggccagctgcagctcaagcgcctcaaccagggcgtcgatagcatgaacctcggttctggctccaacatgggcgacccacgaggcgacgccgacgctcctcccccacccccgaaagacgccggccagtggtctggagaccgaggctcatatggctccatgcagtacagccagatcgggggccacggtgaaacgatgcctccgcgcggtccttatgcgccccctgaacctggagcctctgtgccacatccacggcccaacttcaccaaactagacttgatcaaatatgatactcctcatcttggtccccgtatccagctcatgctgtctcaaatccagttcaagctcaatgtcgaagaacaatatctcaagggcgtggagaagatggtccagctctatggtatggaaggtgaccgcaaaagcaaggctgatgccgctgctaggcgtgtagagagcaagcaaaagattcatcttctgaggcaggcactcaaaagatacgaacagctgcacgtcgatgatttggattcccctgattctccagacgatgatagtatcaacatgccgaatctacggaagcccctcactggccaactttccattcgagtacagcagatccgggatgttgaccatgcctcgactgggcgattttcacgaggacccgagacttttcttgctatcaaagttgaagacaatgtagtggcaagaacccgagtatcccgcaatgatcggtgggaaagcgagtttcacaatatcgaggtcgataaagcaaacgagattgagcttaccgtctacgacaaacctggcgagcacgcgctccccatcggacttctgtgggtgagaatatcagatattgtagaagagcttcggcgaaagaagattgaggcagaaaatagcaactcaggttgggtttccgccgacaggatgggctcgaacgctccaccatctcaatttcccatgagtccccagtcccagcaattcggtgctcccccaggcgcaacaggtccagccggtcagcagtttggagcgctcggagcgcctgcgcttgtctctacccccatcgatggctggtttaacctggagccaaccggtgccatacatctctcactaaacttcatcaagcagaataaagaccgcaggccggtcgacatggctggccttggccgaaaaggtgctattcggcaaaggaaggaagaagtgcatgagatgtacggacataagttcgtgcagcaccaattctacaacatcatgcgctgtgcattatgtggtgatttcctcaaatactcagctggcatgcaatgtgaagactgcaaatacacgtgccacaccaaatgttatccaagtgttgtcacaaaatgtatcagcaagagcaatgccgaggacaacccagacgaggagaagatcaaccaccggattcctcatcgcttcaatccgttttcgaatgttaccgccaactggtgctgccattgtggctacattctaccgttcggcaaaaagaactgtaggaagtgcaatgaatgtggacttaccgcacatgcgtcctgtgtgcatctcgttcctgatttttgcggcatgagcatggcagtcgccaatcaaatcctagagggaattcgagcaggcaaacagaggcagagcaagggcacttctttaagcgaaaaaacattgaggtctgggaagatgagtccctccagcatgggcagtacagcatccccttttcctaccccgacaccatcctatcagccgagtattgcctcgcaggaggccaccgatgccgccaaggctatgtacacaagccagacatcgccgacaagacccgttcaacctgaccgaacttcttcgagatctaacgctgcggctgctgccgcatcggcagccatgggcggaacaatgtcttctcaaagccataggccaagtgctcaatccgattacccatctggtcgaccaagcggttacggaagttcttcagactctcacaacgacccctacgcttcgaaccagccatcgtacaacatgccgtcacagccaaagtacaatccagctctatacgccaacgtgaacacttatcctagccaaccaccactgcaaacccagcaacaccagcagatgcctcaacaaactatgccttcgccgcagcagggcccaggccaaggggcaatgttccctccaaacccggcgcctcaacatataaagccacagcctacgcaggagatcccgtcgctcacaacgggatctggcttacctccaccttcacgaaggccgttaccactagcaacagatccaggaaccggccagcggatcggtctagatcacttcaacttccttgctgtgctcggaaaaggtaatttcggcaaggtcatgcttgcagagaccaaaaagtcacgacgcctttatgccattaaggtgctcaaaaaggaatttatcattgaaaatgacgaagttgagagcatacgatcagagaagagggttttcttgattgcgaacagggagcgtcaccctttcttaaccaatcttcatgcttgtttccaaaccgagacgcgagtgtactttgtgatggaatacattagcggaggtgacctgatgctccacattcagcgtggcatgtttggcaccaaacgtgctcagttctatgctgccgaggtctgcttggcactcaagtatttccatgagaatggtgtcatttaccgcgatctcaagcttgacaacattttgcttacgctagatggacatatcaagattgcagactacggtctgtgcaaagaagacatgtggtacaagtcaacgacaagcacattttgtggcacacccgagtttatggcccccgagattctcctagataagaaatatggcagagcagtggactggtgggcattcggtgttctcatctaccaaatgcttctccagcaatccccattccgaggagaagacgaggacgagatttacgacgcgattctagctgatgagccgctttaccccattcatatgcaccgggattcggtttccatactccagaagctactcacccgagagcctgaccaacgattaggcagcgggcctacagatgcacaggagatcatgagccaacctttcttccggaacattgtgtgggatgacatatacaacaagagagtcgcaccgcctttcttgcccgtcatcaaaaacgcaactgatactagcaacttcgactccgagtttaccagtgtcacgccggttctcacgccagtaaattccgtgttgtctcaagcgatgcaagaagaattccgcggcttctcgtacacggcggactttgattagagataatgtctcgtgacggcgaggtccggaccagctgatgggcaaagtcgacgacgggtagcctaatagaacaacaaaaagcaatgagttggaagaattggatggtcccgcacgtaccgttttatgcagccagccaatgacatggtctccaagaccaatcacatacttgacttctatagtagcgtgcggaaaagcattttctgagctcggctgtcattctctgacgagtgatgttttgtctgcaatgaatcgcagttccattcttgagaccagactattcaatggtgtgtgtgttgcatagtcgcactctcgttgacttgttg

SEQ ID NO: 8100 - DNA, 1305 bp, Muscodor strobelii
  misc_feature: SGI cDNA ID NO. 562478
  misc_feature: Encodes the peptide sequence at SEQ ID NO 8101
atggcgttctcatcaggtccacctgtccaagaaagcgagaagatggtcgctgcattcccggatcccgctttcccatacggggggccaattgacataccaaaggaagatatcaagagttctagagatgcctttacaaagcagaaagattcagttcaattggaatcgttggtgtggtgccctcctgcgggacaacatgacatgacaagacgcagttctatagtcgacacgcagtttgaccatcatactaatggaaagagctattggtcagccgtactgcagatacatccgccgaagccttggattaatgttagtctacttctgaagtatctagcagcgatcccaccatataaacaaccatcccaagtacgggtatgggcaagggcgaggaagtggctacaagaagctctaaagcttggggcacttcgtcagtggaacgatagatccgcgttcgatagcttgcctccgactgatcctgagtgctgggaggctatcagaatcgcgggcggtgcggaagggctgggaaaattcccacagtcacttgagcaacaagtgaagttcactggatgtgggtggctctttgttgatcccgcaatgcgcgtggttccagactgttgggagaagtatgctcaggatcacaatcttccttatctcaagacacaattgccggaatcactcctcactcctaaaaccgagcgtatttctcctggtccgtccgtgtcgaatatttctctcgagggagtctccgtcgcacgtgcttctcgtgcaacagacatccacgaagtcaatgaacatgtgccggtgaccacgaacttagatgcggagaatgccagacgaaagtttctcgagaatggagccgacttctatgacaaagcccaggagcttcgaccccgctggaagttccgagagccttccgaccccaatagtctgcttcaaatcaccgcagctacagactcgaacattaatagcctcagcaatgctctctcgaccacggaagattatattctgaatctcagccgcttcacgatttttcagagtacattcaatggtcccatcgagggatttgttcgaaaaatcgttcaggaagcacaggcgtccacagcagcatcgctcgaagacaccaagtctctttgcgaagacttccgaaaagaaatcgatactctcaaaacagagatcaagagccaagcatctctgaacgagggactccaaggccaagtgagctctttgaaaacagaactggaagaaacaagtacacttgcaacacagcaccgtaacaacactaagcacagaattagagatccaacgtag

SEQ ID NO: 8101 - protein, 434 aa, Muscodor strobelii
  misc_feature: SGI Peptide ID NO. 562478
MAFSSGPPVQESEKMVAAFPDPAFPYGGPIDIPKEDIKSSRDAFTKQKDSVQLESLVWCPPAGQHDMTRRSSIVDTQFDHHTNGKSYWSAVLQIHPPKPWINVSLLLKYLAAIPPYKQPSQVRVWARARKWLQEALKLGALRQWNDRSAFDSLPPTDPECWEAIRIAGGAEGLGKFPQSLEQQVKFTGCGWLFVDPAMRVVPDCWEKYAQDHNLPYLKTQLPESLLTPKTERISPGPSVSNISLEGVSVARASRATDIHEVNEHVPVTTNLDAENARRKFLENGADFYDKAQELRPRWKFREPSDPNSLLQITAATDSNINSLSNALSTTEDYILNLSRFTIFQSTFNGPIEGFVRKIVQEAQASTAASLEDTKSLCEDFRKEIDTLKTEIKSQASLNEGLQGQVSSLKTELEETSTLATQHRNNTKHRIRDPT

SEQ ID NO: 8102 - DNA, 1446 bp, Muscodor strobelii
  misc_feature: SGI EST ID NO. CUFF.19868.0
  misc_feature: Variant of the nucleotide sequence at SEQ ID NO 8100
gaaaattcccacagtcacttgagcaacaagtgaagttcactggatgtgggtggctctttgttgatcccgcaatgcgcgtggttccagactgttgggagaagtatgctcaggatcacaatcttccttatctcaagacacaattgccggaatcactcctcactcctaaaaccgagcgtatttctcctggtccgtccgtgtcgaatatttctctcgagggagtctccgtcgcacgtgcttctcgtgcaacagacatccacgaagtcaatgaacatgtgccggtgaccacgaacttagatgcggagaatgccagacgaaagtttctcgagaatggagccgacttctatgacaaagcccaggagcttcgaccccgctggaagttccgagagccttccgaccccaatagtctgcttcaaatcaccgcagctacagactcgaacattaatagcctcagcaatgctctctcgaccacggaagattatattctgaatctcagccgcttcacgatttttcagagtacattcaatggtcccatcgagggatttgttcgaaaaatcgttcaggaagcacaggcgtccacagcagcatcgctcgaagacaccaagtctctttgcgaagacttccgaaaagaaatcgatactctcaaaacagagatcaagagccaagcatctctgaacgagggactccaaggccaagtgagctctttgaaaacagaactggaagaaacaagtacacttgcaacacagcaccgtaacaacactaagcacagaattagagatccaacgtagagcgtctttgaatctggggttaaatagttaccagaaagatccaactggagtaagacaaacaagtcgcaattttttgcctgcagaagatctccatatgcatccaaaaacggactatgatcactccttcaacgaggactctcagatcgctcgaatggctcggtttgaacagtctggtgaagctgcagcacctttctggtctgcatcagtaacagcaaggtcagaggggcctcctccaagcaaacgccaaaaatcctactcatcatctgcagagtcatctgagacttctctacagctcgcaagtcgtgcatctaaaggctccgacgtagctccagagtcaacagatatgacctctcactggtatcattgatacatactaactgatgaagcatcacttctggtggggaaacactcacctggcgaaaggtgatatgcactgtttaaggtttcaaattagatgagagtagagaaagcatgtcactgacaagctagtggtctgctgagaaaagattttacgtctagagatatggaagatgaacgggctgtggtgggttgttcacttagatgacaacgaagcaattatttgcgatgcattcttagcaaagtcacttattcacaataattacactatttaaacaacgttgtggttcctgttgaaaatttg

SEQ ID NO: 8103 - DNA, 897 bp, Muscodor strobelii
  misc_feature: SGI cDNA ID NO. 562479
  misc_feature: Encodes the peptide sequence at SEQ ID NO 8104
atgtctgagactttgaaaggtcttctcacagccgagctgtacgctctcatggttgagacatggattccctacggcaagagagaagttttcaatgtcggcgattccgtcgggcaagtattgtttggtccaggagatcagggggccaaagacaaagcaagacggatgctatggcccgtactgcggtctcttagccaacttggccgtgataacatacccgatatgatgtccttcttaccgcccatctcaagtaatgatttcccatcgcaggcactaggtttgctggtactcgatcagggctcaagggcatgtctgaaaggcgtagacgtacgatggacggatacgtatttcggggaaatagcacttgatttcgcaaaaaagctacaggcacttccggaggaagtgagaccatcgtcgtggactcgatggaaagagagcgccactattgaatatttcttctgggcacgcctatggttctctgctcctataattcatcatgagaagatgggagagactgctgtagcctttacggaggagacgcgtatcttcatcgaacagcattacaaagcacacgacggatttcgtgacaaccctgaattgcattgggatctatatgggtttccgcggatgctgactgaagctggacccaaaaccccgtgcagcagcgccgaaggctgtttctgggtactatgtctgatggatgtacacaagccacctcttgacaagtatggacggtatccatatcagaattggcggcaaggacgcacttcgactgcagatgaacaagaatggcttgaaaaagcaaaagtgtttgatccgcctgcacgagaaatagttgataagattcactacgacgttcaacatgatatctggacaccgcttggggagaatcctctttga

SEQ ID NO: 8104 - protein, 298 aa, Muscodor strobelii
  misc_feature: SGI Peptide ID NO. 562479
  misc_feature (3)..(296): NCBI GI: 46126661 Blast Desc: FG07708.1 [Gibberella zeae PH-1]
  misc_feature (74)..(293): NCBI GI: 154301598 Blast Desc: BC1G_10126 [Botryotinia fuckeliana B05.10] gi|150855788|gb|EDN30980.1| BC1G_10126 [Botryotinia fuckeliana B05.10]
  misc_feature (230)..(294): NCBI GI: 171678487 Blast Desc: protein product [Podospora anserina] gi|170937313|emb|CAP61970.1| protein product [Podospora anserina]
  misc_feature (73)..(267): NCBI GI: 255936263 Blast Desc: Pc13g07270 [Penicillium chrysogenum Wisconsin 54-1255] gi|211583778|emb|CAP91796.1| Pc13g07270 [Penicillium chrysogenum Wisconsin 54-1255]
MSETLKGLLTAELYALMVETWIPYGKREVFNVGDSVGQVLFGPGDQGAKDKARRMLWPVLRSLSQLGRDNIPDMMSFLPPISSNDFPSQALGLLVLDQGSRACLKGVDVRWTDTYFGEIALDFAKKLQALPEEVRPSSWTRWKESATIEYFFWARLWFSAPIIHHEKMGETAVAFTEETRIFIEQHYKAHDGFRDNPELHWDLYGFPRMLTEAGPKTPCSSAEGCFWVLCLMDVHKPPLDKYGRYPYQNWRQGRTSTADEQEWLEKAKVFDPPAREIVDKIHYDVQHDIWTPLGENPL

SEQ ID NO: 8105 - DNA, 897 bp, Muscodor strobelii
  misc_feature: SGI cDNA ID NO. 562480
  misc_feature: Reduced expression when VOC is produced
  misc_feature: Encodes the peptide sequence at SEQ ID NO 8106
atgggtctcggagcaaaaataaaggatgcccttcatggggataaggatcgtaaggacacacaacagtatagtaaggaaactcagcaagcaccaggtgcttatccctcagacgaagttcctcgctacaacgactccaatgagcgatggtatggcactgagtcaaactcgggctatgatacatacgacctgaatgagcctctttctcaagaccaggagtatacatacggccatggctcggagagtctggacgcagttgatcaggacaacgaagctttggcttcacgtcatggtcctcgccagccggcgcgaacatctccgacctcgaacaacccaactagtcaccgcaaatcactgagcaaggattccacgcgggcgaaggatggaaagacgaccacggcaaccccttactggggcgatgcctcagcttctgcggcctcgcagcgcaagaaaggttcctccgacgtgtacaacgaccgcgtacatgaccgccttccagacggatctctggaagcacgtcgagacgcgatgaacaagaatagcaacgatacttatgacatgtatcaacccgacggaacacatgagcaacttcggggcctcccaagagacgaacgtagagcaatgatgggtagtaataaccgcgatcttcagttttccactcgtggaaatactggtgccggcacagatcctgtacacaacattgcggacagaactcgtcgcagcccagacatgagtggaaactcgagcgcagcttcgtctgctatgagggctggtatgggtgacgaccattttggaccgggtcactcgggcgcgagagttgtgcatcgatgcgagcatggcggaaacgatagtgatattagtcggtatttccggaaggatgttacatatcgtatggattag

SEQ ID NO: 8106 - protein, 298 aa, Muscodor strobelii
  misc_feature: SGI Peptide ID NO. 562480
  misc_feature (258)..(297): NCBI GI: 261353798 Blast Desc: conserved [Verticillium albo-atrum VaMs.102]
  misc_feature: Useful for introducing or modulating the production of volatile compounds
MGLGAKIKDALHGDKDRKDTQQYSKETQQAPGAYPSDEVPRYNDSNERWYGTESNSGYDTYDLNEPLSQDQEYTYGHGSESLDAVDQDNEALASRHGPRQPARTSPTSNNPTSHRKSLSKDSTRAKDGKTTTATPYWGDASASAASQRKKGSSDVYNDRVHDRLPDGSLEARRDAMNKNSNDTYDMYQPDGTHEQLRGLPRDERRAMMGSNNRDLQFSTRGNTGAGTDPVHNIADRTRRSPDMSGNSSAASSAMRAGMGDDHFGPGHSGARVVHRCEHGGNDSDISRYFRKDVTYRMD

SEQ ID NO: 8107 - DNA, 3518 bp, Muscodor strobelii
  misc_feature: SGI EST ID NO. CUFF.19871.0
  misc_feature: Variant of the nucleotide sequence at SEQ ID NO 8105
caaatgtctgagactttgaaaggtcttctcacagccgagctgtacgctctcatggttgagacatggattccctacggcaagagagaagttttcaatgtcggcgattccgtcgggcaagtattgtttggtccaggagatcagggggccaaagacaaagcaagacggatgctatggcccgtactgcggtctcttagccaacttggccgtgataacatacccgatatgatgtccttcttaccgcccatctcaagtaatgatttcccatcgcaggcactaggtttggtacgtccgaaaccgtcgttttcttgaagaatctacactaacatatgtcacaagtaagtgaatctgcgtcggggaaaagacttggcactgggccagaatattctacagcatgaatatttagcaaactgactgaagttctttaactcatcagacagctggtactcgatcagggctcaagggcatgtctgaaaggcgtagacgtacgatggacggatacgtatttcggggaaatagcacttgatttcgcaaaaaagctacaggcacttccggaggaagtgagaccatcgtcgtggactcgatggaaagagagcgccactattgaatatttcttctgggcacgcctatggttctctgctcctataattcatcatgagaagatgggagagactgctgtagcctttacggaggagacgcgtatcttcatcgaacagcattacaaagcacacgacggatttcgtgacaaccctgaattgcattgggatctatatgggtttccgcggatgctgactgaagctggacccaaaaccccgtgcagcagcgccgaaggctgtttctgggtactatgtctgatggatgtacacaagccacctcttgacaagtatggacggtatccatatcagaattggcggcaaggacgcacttcgactgcagatgaacaagaatggcttgaaaaagcaaaagtgtttgatccgcctgcacgagaaatagttgataagattcactacgacgttcaacatgatatctggacaccgcttggggagaatcctctttgatcgcaactgcaaaaacggtttagggttgaacgaaaccatattcgggaaagggtactgatagggtcagtggtcttttgacaacgcagttcaatctataacgctttgattatagagcccatgagatttcattgcgatcgtggagctatgtactcgtgagaatgattgagattattgcaacaactacggctattggcttcagggctgttcaggggtctcgaaatcgtcgaaacaagttattggtgtgcaccaaagataatgatcttccgccccgcatgacgcaacatagacccttgagaccctggcagccctggaccctggaattacctgcccagacccaggaactaggtggttgacagcactgccaatcggtacttacctgattatctatttcaattgccttgttttacgctttctagtcccctgggcttgatgtcacaaagatgtcttcccaggaatttgggtcggtgctctctttgaatgacgcaggaaaattgttcgctattgacgacatcgacggatcagtatccgatataagttagggatactgtcccacatgctgtgtatgaaacgatattcaactttcatgtccatagtcattactatgcggtccagtggaaaccatatctgatatcccttaaaccatccaaaagccgttacagcttacaaagcaattaccaacatgggtctcggagcaaaaataaaggatgcccttcatggggataaggatcgtaaggacacacaacagtatagtaaggaaactcagcaagcaccaggtgcttatccctcagacgaagttcctcgctacaacgactccaatgagcgatggtatggcactgagtcaaactcgggctatgatacatacgacctgaatgagcctctttctcaagaccaggagtatacatacggccatggctcggagagtctggacgcagttgatcaggacaacgaagctttggcttcacgtcatggtcctcgccagccggcgcgaacatctccgacctcgaacaacccaactagtcaccgcaaatcactgagcaaggattccacgcgggcgaaggatggaaagacgaccacggcaaccccttactggggcgatgcctcagcttctgcggcctcgcagcgcaagaaaggttcctccgacgtgtacaacgaccgcgtacatgaccgccttccagacggatctctggaagcacgtcgagacgcgatgaacaagaatagcaacgatacttatgacatgtatcaacccgacggaacacatgagcaacttcggggcctcccaagagacgaacgtagagcaatgatgggtagtaataaccgcgatcttcagttttccactcgtggaaatactggtgccggcacagatcctgtacacaacattgcggacagaactcgtcgcagcccagacatgagtggaaactcgagcgcagcttcgtctgctatgagggctggtatgggtgacgaccattttggaccgggtcactcgggcgcgagagttgtgcatcgatgcgagcatggcggaaacgatagtgatattagtcggtatttccggaaggatgttacatatcgtatggattagagccggatgtttggaatttgtaaggccaatgtacctaataatacatgatgtctcatcgcatagctcttgatgattggatatttgtaccataattgcatttttgtaattcatggatcttcgagtagcgacggaaagcctcatattgtttctcgtacagacctaggtacatataataactgaaattatgttcatcagccactcggaaaaaactgaaaaaggaacttacttacgaattgttactccagccaaaaagtctcttcttttcttccctcccaaaaactatcatcaaatttctcgtgatgaaaggtaccggatagaaccgcacaatgccccaaaagagtaaatcgatctccatgtccagacggtcgcagaagagttgggaaggttgcgcctttgaagatacaaacaatatcccccatggcaacatcaacctcctctctcgaaatagatattatggtgccgtcctccagcattaataggggttgacagattgtcagcgcaaccgaatattctttgccgaatctatccatggttcgagccctctttttctgtgaaacccaagttccgtaacgatctgaatgcccccggaggtctgtataagtcttccgaattcccttttccgcaccttctgggaacaatgtgcggcacttttccaagaaatcatctactatactgtctgaagagacacatctgatttgagctgctggcttaaagatgcgtccttcaacatgtcggattcgatagtgtaaacctggtggtacgccatttgcatatctacttggtttatcccattcaccaacttgatcgcatataggtgccatctgtatgcccgatgaaaacatcaatcttttgtcttcggtaacccttacaatcctcttcgagcaccc

SEQ ID NO: 8108 - DNA, 1185 bp, Muscodor strobelii
  misc_feature: SGI cDNA ID NO. 562481
  misc_feature: Encodes the peptide sequence at SEQ ID NO 8109
atggacggggaggaagaatacgcagccgcccaaaattcctgtgatttgccagcctatccttacaggcagctcgtcgatcatgacattcgtctccttctgattcttccaggctcagggcgtctcgaatgcgtcgtccatcaaatgcccttatcaaaagatgtcatgtattacgcactatcatacgtatggggcgatacgaatgagagacgagaaatatacatcggcaatcagtcttttcatgtcactaaaaatctttatgaggctatgcaacatctcagagatatgcaacttctcagagacaaatacgatccagaagactatttttggatcgatgccatctgtgtgaatcaggacgatatcgaagagaaatcattccagattccccgcatgatgaaaatttatcatactgctttgaaggtcatcatttggttaggtccaaatatgacagctgatcatccggatttaaagacatcagcaaaggtcgctgatccctctgagcttctctggcgcgatggttcaagcatggatggcgcagttgcattgttatttgaaaaggcagagtcactatggtcagagtgggagcttcctgatgatttcgaaggagaaggaccggtccttcgttctgttttcggcgaattatacccagcagttgttcgagcagcaagcgagttactattgcgaccgtggtttgaaagggtgtggacagtgcaggagtgtagtctggaggcaaacaccgcagtaatggctggtcatcatgaagtatggctcgaccgattcactaagatggttatggtcttaatgcatcatcaccgattactcgccatgaacccaggaacggccagaattcaagctgtggaacagcttgaaatcaaatggcgcagagactggttgaattaccatggagaaagagtcgaaatgggtacggctcattgtcttttggagatcctgacacaagttggaaaggcagaagcaacagatccacgtgatcagctgtacggaatattaagtctcgtattgtattttgctaaagacgagctgccaaaggaactacagccagactattctttgcccgttgaacacgtatactggaattatgcagcacacctgcttgaagaaacaggagacctgcgactactccaggtcacccgtcgtaggatacgaagacgttccatcttgggtacctga

SEQ ID NO: 8109 - protein, 394 aa, Muscodor strobelii
  misc_feature: SGI Peptide ID NO. 562481
  misc_feature (56)..(238): Pfam Id: PF06985 Pfam Desc: Heterokaryon incompatibility protein (HET)
  misc_feature (56)..(152): Pfam Id: PF06985 Pfam Desc: Heterokaryon incompatibility protein (HET)
  misc_feature (29)..(384): NCBI GI: 256721799 Blast Desc: NECHADRAFT_53281 [Nectria haematococca mpVI 77-13-4]
  misc_feature (18)..(381): NCBI GI: 256728196 Blast Desc: [Nectria haematococca mpVI 77-13-4]
  misc_feature (18)..(379): NCBI GI: 256722184 Blast Desc: NECHADRAFT_86801 [Nectria haematococca mpVI 77-13-4]
  misc_feature (28)..(380): NCBI GI: 154292443 Blast Desc: BC1G_14540 [Botryotinia fuckeliana B05.10] gi|150846126|gb|EDN21319.1| BC1G_14540 [Botryotinia fuckeliana B05.10]
  misc_feature (27)..(388): NCBI GI: 256722665 Blast Desc: NECHADRAFT_87188 [Nectria haematococca mpVI 77-13-4]
  misc_feature (21)..(392): NCBI GI: 39976385 Blast Desc: MGG_05881 [Magnaporthe grisea 70-15] gi|145011873|gb|EDJ96529.1| MGG_05881 [Magnaporthe grisea 70-15]
  misc_feature (19)..(379): NCBI GI: 189203425 Blast Desc: conserved [Pyrenophora tritici-repentis Pt-1C-BFP] gi|187985147|gb|EDU50635.1| conserved [Pyrenophora tritici-repentis Pt-1C-BFP]
  misc_feature (19)..(384): NCBI GI: 256728200 Blast Desc: NECHADRAFT_102164 [Nectria haematococca mpVI 77-13-4]
  misc_feature (21)..(384): NCBI GI: 261355475 Blast Desc: heterokaryon incompatibility protein [Verticillium albo-atrum VaMs.102]
  misc_feature (16)..(379): NCBI GI: 238508078 Blast Desc: AFLA_009950 [Aspergillus flavus NRRL3357] gi|220688759|gb|EED45111.1| AFLA_009950 [Aspergillus flavus NRRL3357]
MDGEEEYAAAQNSCDLPAYPYRQLVDHDIRLLLILPGSGRLECVVHQMPLSKDVMYYALSYVWGDTNERREIYIGNQSFHVTKNLYEAMQHLRDMQLLRDKYDPEDYFWIDAICVNQDDIEEKSFQIPRMMKIYHTALKVIIWLGPNMTADHPDLKTSAKVADPSELLWRDGSSMDGAVALLFEKAESLWSEWELPDDFEGEGPVLRSVFGELYPAVVRAASELLLRPWFERVWTVQECSLEANTAVMAGHHEVWLDRFTKMVMVLMHHHRLLAMNPGTARIQAVEQLEIKWRRDWLNYHGERVEMGTAHCLLEILTQVGKAEATDPRDQLYGILSLVLYFAKDELPKELQPDYSLPVEHVYWNYAAHLLEETGDLRLLQVTRRRIRRRSILGT

SEQ ID NO: 8110 - DNA, 669 bp, Muscodor strobelii
  misc_feature: SGI cDNA ID NO. 562482
  misc_feature: Elevated expression when VOC is produced
  misc_feature: Encodes the peptide sequence at SEQ ID NO 8111
atgggcggcaaaaaaggagctgctgaaggcagcaagaaggcagcaggtcaggctcgaaaagccgacgcagctgccgctaaagttgctgctgaggaggcaaaaaaggctgcagctgaagacaaagaatggcaaaagggagccaagagtaataataaaaaagaggcagaagctgagaagaaggccgaacaagctcgcaaaaaagccgaacgagatgcactcctcgccgacgaagaaaaaaacacacctggccgagcccagcccaaaaacaagaagacagcagagaaaaagaccagtcgtgggctcgacttatcacagctgtcgctggatgatgggaaagagaaacaggaattctccgcctccggcttggaaaatgtcctcgcatttgccgacgtgctcgaccctgcgggaagcgctcaagtgatgaaacatcccgaaaagaaaaagcgcgccgcgtttaaagccttctccgatcgcagagaagaagaaatgaagaaggagaatcctgggcttacttatagtcaaaggaagcaacggatcgcagaggaatttgagaagagcccggagaacccaatgaatcaagcgtcagttgcctacaatgcaacgaaagaggagagacaagcggcgatgcatgcagaaagggagaaattagaggccaccttttccaagtaa

SEQ ID NO: 8111 - protein, 222 aa, Muscodor strobelii
  misc_feature: SGI Peptide ID NO. 562482
  misc_feature (4)..(195): Pfam Id: PF06244 Pfam Desc: Domain of function (DUF1014)
  misc_feature (142)..(195): Pfam Id: PF06244 Pfam Desc: Domain of function (DUF1014)
  misc_feature (1)..(221): NCBI GI: 258563270 Blast Desc: conserved [Uncinocarpus reesii 1704] gi|237907887|gb|EEP82288.1| conserved [Uncinocarpus reesii 1704]
  misc_feature (1)..(204): NCBI GI: 119186551 Blast Desc: CIMG_03323 [Coccidioides immitis RS]
  misc_feature (1)..(204): NCBI GI: 240108530 Blast Desc: coiled-coil domain-containing protein, [Coccidioides posadasii C735 delta SOWgp]
  misc_feature (1)..(221): NCBI GI: 225561448 Blast Desc: DUF1014 domain-containing protein [Ajellomyces capsulatus G186AR]
  misc_feature (1)..(221): NCBI GI: 154282659 Blast Desc: [Ajellomyces capsulatus NAm1] gi|150410305|gb|EDN05693.1| [Ajellomyces capsulatus NAm1]
  misc_feature (1)..(220): NCBI GI: 121700901 Blast Desc: DUF1014 domain protein [Aspergillus clavatus NRRL 1] gi|119396858|gb|EAW07289.1| DUF1014 domain protein [Aspergillus clavatus NRRL 1]
  misc_feature (9)..(221): NCBI GI: 39951683 Blast Desc: MGG_01484 [Magnaporthe grisea 70-15] gi|145020673|gb|EDK04802.1| MGG_01484 [Magnaporthe grisea 70-15]
  misc_feature (1)..(222): NCBI GI: 67517203 Blast Desc: AN0879.2 [Aspergillus nidulans FGSC A4] gi|40746752|gb|EAA65908.1| AN0879.2 [Aspergillus nidulans FGSC A4] gi|259488835|tpe|CBF88603.1| TPA: DUF1014 domain protein FGSC
  misc_feature (1)..(217): NCBI GI: 261352517 Blast Desc: conserved [Verticillium albo-atrum VaMs.102]
  misc_feature (4)..(222): NCBI GI: 212533559 Blast Desc: DUF1014 domain protein [Penicillium marneffei ATCC 18224] gi|210072300|gb|EEA26389.1| DUF1014 domain protein [Penicillium marneffei ATCC 18224]
  misc_feature: Useful for introducing or modulating the production of volatile compounds
MGGKKGAAEGSKKAAGQARKADAAAAKVAAEEAKKAAAEDKEWQKGAKSNNKKEAEAEKKAEQARKKAERDALLADEEKNTPGRAQPKNKKTAEKKTSRGLDLSQLSLDDGKEKQEFSASGLENVLAFADVLDPAGSAQVMKHPEKKKRAAFKAFSDRREEEMKKENPGLTYSQRKQRIAEEFEKSPENPMNQASVAYNATKEERQAAMHAEREKLEATFSK

SEQ ID NO: 8112 - DNA, 1692 bp, Muscodor strobelii
  misc_feature: SGI EST ID NO. CUFF.19931.0
  misc_feature: Variant of the nucleotide sequence at SEQ ID NO 8110
atctgcttgggagctaaactcaggtcgacaggaatatccacttcgcccgactttggttcgtagcaagataaattgagctcgctttctaattacattaggatcagggtgtcacggaaagaagaaatcaatccattgatctttttactaggcgttgatctaaccgatgttcgattcacaagaccataactaggataatctggggcagcttcagagttagaatggggcttccagcctcatgggaaccgaatgtagcctttcaatcgcaaggaagattaaggcattgatagaaacgagtcttatctcactccaaagtcaggaactagaccatacaatcagccaagataccctacctacctaattaccccgccaaagccatacgcaatagccccgcctcttctaccaataccttatgcctgctgagcattttgatgactcggatgagtcaaagcccatattctctctcaacgctgtgaatcacccccaaatatcttttcaatcttagtttggccgattataaattaaacgagtcgagtcttctacatacctgaagttccccggaggagatgggcggcaaaaaaggagctgctgaaggcagcaagaaggcagcaggtcaggctcgaaaagccgacgcagctgccgctaaagttgctgctgaggaggcaaaaaaggctgcagctgaagacaaagaatggcaaaagggagccaagagtaataataaaaaagaggcagaagctgagaagaaggccgaacaagctcgcaaaaaagccgaacgagatgcactcctcgccgacgaagaaaaaaacacacctggccgagcccagcccaaaaacaagaagacagcagagaaaaagaccagtcgtgggctcgacttatcacagctgtcgctggatgatgggaaagagaaacaggaattctccgcctccggcttggaaaatgtcctcgcatttgccgacgtgctcgaccctgcgggaagcgctcaagtgatgaaacatcccgaaaagaaaaagcgcgccgcgtttaaagccttctccgatcgcagagaagaagaaatgaagaaggagaatcctgggcttacttatagtcaaaggaagcaacggatcgcagaggaatttgagaagagcccggagaacccaatgaatcaagcgtcagttgcctacaatgcaacgaaagaggagagacaagcggcgatgcatgcagaaagggagaaattagaggccaccttttccaagtaaggcaatagagccacttggagcaccttgcatccgtgacgctcgatattccaagaagaaaagctttgattacgacgccgaggatagatatactgcctggccctgggaattctgactggtcgtacaactgaaagcgccgacattggccccaatgcgcgccgcagaaggtcgataggaacatcgcactaccgaaagcatcggtcagatatcttctaggacaatatcttgtctaagctcatgcgctgaaagatgtctaactgcgagaaatcggaatcttagcactgtatatagtttcggggtgggaaatttcagtaacgggagcaaagctcaagacgtgggaggcagctgcatgtaacgggtaagagaagaagggccaagctgagcccatacatcacatatgtgatcgttatattgactagaccgaatggaaaagaatcaacagcgaagaagatcgtgttctgtt

SEQ ID NO: 8113 - DNA, 1212 bp, Muscodor strobelii
  misc_feature: SGI cDNA ID NO. 562483
  misc_feature: Reduced expression when VOC is produced
  misc_feature: Encodes the peptide sequence at SEQ ID NO 8114
atggtccggtctctgaggtcccgcccgcgcgagaagcaaacaccgagattctcgtcggcaagatggacggggtcctcaggaaggcaggggaccgccgtcactgccggcgccgaaaagaatacgagcccaccagcatctgccgagatcagcgcggtgtcagagaatcgtagaaagcccaacaagcacagcatggattatatagtgcggtcctttgtcgccggaggcttcgccggatgcgcagcgaaaactgctgttgcccctctcgatcgagtcaagattctcttccagacgaataatccgcagtttgctaaatacaccgggtcatgggctggactgggccgggcgctgggcgatatctacacccagcatggtgtcgttgggcttttccgcgggcattcggccacgctcctgaagatttacccctacgcagctataaagttcgtcgcgtacgagcaatatcgcgcgctgataatccacggcaaacatcacgagacatggttccgacgcttcactgtcggcgcactcgccggcgttacttcggttctgttcacatatccgctcgaggtcattcgcgtgagattggcgttcgaaacgaaagtcaggagctcatctctcgccgatatttgcaggaagatctactacgaacatcccttgtccaagccgacgacaccaacacccgcagccgctggaggctcaagtatcgctggcagtgttgcagcagcagcctctggtacggttcaagctgcaacaccccaatccggaataataaatttctacaggggattctcaacgaccctcctcggcatgctgccatatgccggtgtttcattcctaacacacgacacgataggcgacatatttcgatcgtctgcgttacgggaacacgctaccctgccccaaccagctaatgcaccgaaagataagccggcaccgttgcgcgcatgggccgaactaacttctggtggcatttcaggagccatcgcacaaactgtgtcctacccgctcgaagtagtacgacggcgcatgcaggttggcggtgcagttggagacggccatcgtctccgcattggtgagacggttggtatgatcttcaaacaacgtggtctcccaggtttttttgtgggcttgacgatcggttacgtcaaggtcttcccaatgtccgcagtcagcttctacacatatgagcgcatgaagaccatcctgagcatatag

SEQ ID NO: 8114 - protein, 403 aa, Muscodor strobelii
  misc_feature: SGI Peptide ID NO. 562483
  misc_feature (66)..(161): Pfam Id: PF00153 Pfam Desc: Mitochondrial carrier protein
  misc_feature (313)..(402): Pfam Id: PF00153 Pfam Desc: Mitochondrial carrier protein
  misc_feature (165)..(291): Pfam Id: PF00153 Pfam Desc: Mitochondrial carrier protein
  misc_feature (36)..(403): NCBI GI: 39951701 Blast Desc: MGG_01493 [Magnaporthe grisea 70-15] gi|145020663|gb|EDK04792.1| MGG_01493 [Magnaporthe grisea 70-15]
  misc_feature (58)..(403): NCBI GI: 46123697 Blast Desc: FG06226.1 [Gibberella zeae PH-1]
  misc_feature (60)..(403): NCBI GI: 154294481 Blast Desc: BC1G_13843 [Botryotinia fuckeliana B05.10] gi|150844683|gb|EDN19876.1| BC1G_13843 [Botryotinia fuckeliana B05.10]
  misc_feature (64)..(403): NCBI GI: 164423516 Blast Desc: mitochondrial carrier protein LEU5 [Neurospora crassa OR74A] gi|157070127|gb|EAA33303.2| mitochondrial carrier protein LEU5 [Neurospora crassa OR74A]
  misc_feature (25)..(403): NCBI GI: 171690490 Blast Desc: protein product [Podospora anserina] gi|170945193|emb|CAP71304.1| protein product [Podospora anserina]
  misc_feature (19)..(403): NCBI GI: 116196142 Blast Desc: CHGG_04669 [Chaetomium globosum CBS 148.51] gi|88180582|gb|EAQ88050.1| CHGG_04669 [Chaetomium globosum CBS 148.51]
  misc_feature (60)..(403): NCBI GI: 156032940 Blast Desc: SS1G_13876 [Sclerotinia sclerotiorum 1980] gi|154699278|gb|EDN99016.1| SS1G_13876 [Sclerotinia sclerotiorum 1980]
  misc_feature (58)..(403): NCBI GI: 242817489 Blast Desc: mitochondrial carrier protein (Leu5), [Talaromyces stipitatus ATCC 10500] gi|218713431|gb|EED12855.1| mitochondrial carrier protein (Leu5), [Talaromyces stipitatus ATCC 10500]
  misc_feature (38)..(398): NCBI GI: 212530808 Blast Desc: mitochondrial carrier protein (Leu5), [Penicillium marneffei ATCC 18224] gi|210074959|gb|EEA29046.1| mitochondrial carrier protein (Leu5), [Penicillium marneffei ATCC 18224]
  misc_feature (42)..(403): NCBI GI: 169607289 Blast Desc: SNOG_06701 [Phaeosphaeria nodorum SN15] gi|111064232|gb|EAT85352.1| SNOG_06701 [Phaeosphaeria nodorum SN15]
  misc_feature: Useful for introducing or modulating the production of volatile compounds
MVRSLRSRPREKQTPRFSSARWTGSSGRQGTAVTAGAEKNTSPPASAEISAVSENRRKPNKHSMDYIVRSFVAGGFAGCAAKTAVAPLDRVKILFQTNNPQFAKYTGSWAGLGRALGDIYTQHGVVGLFRGHSATLLKIYPYAAIKFVAYEQYRALIIHGKHHETWFRRFTVGALAGVTSVLFTYPLEVIRVRLAFETKVRSSSLADICRKIYYEHPLSKPTTPTPAAAGGSSIAGSVAAAASGTVQAATPQSGIINFYRGFSTTLLGMLPYAGVSFLTHDTIGDIFRSSALREHATLPQPANAPKDKPAPLRAWAELTSGGISGAIAQTVSYPLEVVRRRMQVGGAVGDGHRLRIGETVGMIFKQRGLPGFFVGLTIGYVKVFPMSAVSFYTYERMKTILSI

SEQ ID NO: 8115 - DNA, 2023 bp, Muscodor strobelii
  misc_feature: SGI EST ID NO. CUFF.20011.0
  misc_feature: Variant of the nucleotide sequence at SEQ ID NO 8113
cctcggtctacacgagaacgctccggatccgcattcttccctctctttattcccttcttagccaatgaatgattctgcaattgcgatgcatttctttccttcgttttgagtcctccgatcctcctcagaaacatctcgacccgacacagacaagttgcgacaccctgatacctttttgctactcattgctcagcaatcggacttcgcgtctatctcccactgctatcctattcgaccgtctctagtgcgtggcgtgaagaaccggacgagtcggtggcgcaggaatgccatcggctcttgtagaccatggtccggtctctgaggtcccgcccgcgcgagaagcaaacaccgagattctcgtcggcaagatggacggggtcctcaggaaggcaggggaccgccgtcactgccggcgccgaaaagaatacgagcccaccagcatctgccgagatcagcgcggtgtcagagaatcgtagaaagcccaacaagcacagcatggattatatagtgcggtcctttgtcgccggaggcttcgccggatgcgcagcgaaaactgctgttgcccctctcgatcgagtcaagattctcttccagacgaataatccgcagtttgctaaatacaccgggtcatgggctggactgggccgggcgctgggcgatatctacacccagcatggtgtcgttgggcttttccgcgggcattcggccacgctcctgaagatttacccctacgcagctataaagttcgtcgcgtacgagcaatatcgcgcgctgataatccacggcaaacatcacgagacatggttccgacgcttcactgtcggcgcactcgccggcgttacttcggttctgttcacatatccgctcgaggtcattcgcgtgagattggcgttcgaaacgaaagtcaggagctcatctctcgccgatatttgcaggaagatctactacgaacatcccttgtccaagccgacgacaccaacacccgcagccgctggaggctcaagtatcgctggcagtgttgcagcagcagcctctggtacggttcaagctgcaacaccccaatccggaataataaatttctacaggggattctcaacgaccctcctcggcatgctgccatatgccggtgtttcattcctaacacacgacacgataggcgacatatttcgatcgtctgcgttacgggaacacgctaccctgccccaaccagctaatgcaccgaaagataagccggcaccgttgcgcgcatgggccgaactaacttctggtggcatttcaggagccatcgcacaaactgtgtcctacccgctcgaagtagtacgacggcgcatgcaggttggcggtgcagttggagacggccatcgtctccgcattggtgagacggttggtatgatcttcaaacaacgtggtctcccaggtttttttgtgggcttgacgatcggttacgtcaaggtcttcccaatgtccgcagtcagcttctacacatatgagcgcatgaagaccatcctgagcatatagatgacggtcgatctcagcatttgatgagcttgttttcttgctgctattttacctgcatggctggcgtattcggcgtttggaacaagtttgatttgaaataccacgagaacattgcagggcgattgggaagtggatcgcctcgccgacatgatcaattttgatagatgagccgtcatacagacagagctgcagtgttgcggctaagtaagaagaacgcggactagaagatgggaatagaccctatccacgcatgaaaacatcagacggccatgagtatcccaaagtataattcttctgacgggtacaaagaaggtggcagtatgttgttggtgtatatctaatacttagatggaaaagctacctctgcattttggagatttgctctaagaaatagatgtttcaatagacatcgctcagcataccaccttacgtgaatatgaattcttagacataggtcgttgcaagcctcatcctgagtgtattcagttcatataccacatcaaat

SEQ ID NO: 8116 - DNA, 621 bp, Muscodor strobelii
  misc_feature: SGI cDNA ID NO. 562484
  misc_feature: Encodes the peptide sequence at SEQ ID NO 8117
atgagttcctcatccaccccaaaaccaggcgtaaaaccacactccgcaccagaagaccacaaccaagcagtgcccgacccaatcgcacacttcaaatccatccccctggtgttcatcactgctgaccgccggtccccccacaatcctcgacataatctaaaagcctgcgtaacattcttcggcgctctcccccggaacccacaaaaacgcgcactcgtctccaaatcccccggtctcctatcgggcggcggttcagaaaacggcgaagatcccaaaaacccctttttgttattgaatgccctggcagacataggcgtcgacctgatgagtttcgcggggactatgcacggcggtatgttccccgtgctcatggacgaggtcatgggtacggcggcgaatttccaggcgcctaatggtgcttacactgcgagtttcaccaccgagtacagacaggcgattaagttgccccagattgttctgatacggggccgtgtcacgaagaaagttggccgcaagatttatgcgcatggtactattgaggataaagatggcaatatattgtgcgaagggaacggcatgtggttagcgatggggaaggatatcggccgaagtcagttgtag

SEQ ID NO: 8117 - protein, 206 aa, Muscodor strobelii
  misc_feature: SGI Peptide ID NO. 562484
  misc_feature (112)..(188): Pfam Id: PF03061 Pfam Desc: Thioesterase superfamily
  misc_feature (8)..(206): NCBI GI: 171690492 Blast Desc: protein product [Podospora anserina] gi|170945194|emb|CAP71305.1| protein product [Podospora anserina]
  misc_feature (8)..(202): NCBI GI: 238494434 Blast Desc: conserved [Aspergillus flavus NRRL3357] gi|220695103|gb|EED51446.1| conserved [Aspergillus flavus NRRL3357]
  misc_feature (8)..(190): NCBI GI: 169777305 Blast Desc: [Aspergillus oryzae RIB40] gi|83771855|dbj|BAE61985.1| protein product [Aspergillus oryzae]
  misc_feature (90)..(197): NCBI GI: 169610399 Blast Desc: SNOG_08299 [Phaeosphaeria nodorum SN15] gi|111063455|gb|EAT84575.1| SNOG_08299 [Phaeosphaeria nodorum SN15]
  misc_feature (70)..(197): NCBI GI: 255937037 Blast Desc: Pc13g11270 [Penicillium chrysogenum Wisconsin 54-1255] gi|211584165|emb|CAP92196.1| Pc13g11270 [Penicillium chrysogenum Wisconsin 54-1255]
  misc_feature (104)..(195): NCBI GI: 242212878 Blast Desc: [Postia placenta Mad-698-R] gi|220728637|gb|EED82527.1| [Postia placenta Mad-698-R]
  misc_feature (94)..(199): NCBI GI: 156053293 Blast Desc: SS1G_06814 [Sclerotinia sclerotiorum 1980] gi|154704592|gb|EDO04331.1| SS1G_06814 [Sclerotinia sclerotiorum 1980]
  misc_feature (95)..(197): NCBI GI: 145610400 Blast Desc: MGG_11096 [Magnaporthe grisea 70-15] gi|149209495|ref|XP_001522122.1| MGCH7_ch7g231 [Magnaporthe grisea 70-15] gi|86196186|gb|EAQ70824.1| MGCH7_ch7g231 grisea
  misc_feature (104)..(195): NCBI GI: 169843010 Blast Desc: CC1G_02817 [Coprinopsis cinerea okayama7#130] gi|116510692|gb|EAU93587.1| CC1G_02817 [Coprinopsis cinerea okayama7#130]
  misc_feature (115)..(193): NCBI GI: 254823344 Blast Desc: MintA_25674 [Mycobacterium intracellulare ATCC 13950]
MSSSSTPKPGVKPHSAPEDHNQAVPDPIAHFKSIPLVFITADRRSPHNPRHNLKACVTFFGALPRNPQKRALVSKSPGLLSGGGSENGEDPKNPFLLLNALADIGVDLMSFAGTMHGGMFPVLMDEVMGTAANFQAPNGAYTASFTTEYRQAIKLPQIVLIRGRVTKKVGRKIYAHGTIEDKDGNILCEGNGMWLAMGKDIGRSQL

SEQ ID NO: 8118 - DNA, 2106 bp, Muscodor strobelii
  misc_feature: SGI cDNA ID NO. 562485
  misc_feature: Encodes the peptide sequence at SEQ ID NO 8119
atggttggaacaacgcgaaacggcctgagatggctgttaaccgcactcgtcttgtcacaggtcgacgcattctacatcccgggatggtcgatcaagagctatcaagaaggcgagcatattccgctgatggtgaacaaggtatattcagacaatactcagctgcaatacgcctactacgacctgccctttgtctgcccacctacaggcaagactcgagcgtcaggtcttctgagcggacagagcatatctctcaacctcggtgaggttctccgtggagatcgcatcgtcacctccgacatagacctaaccgtcggccatgacaacgaatgcagcttcttgtgcggccaggaagtgacgaggagagacttgaggcgcgccagagacctagtcaaggatggctacgtcgtggaatggatcgtagacaacctaccgggcgccaccagcttcgtcaccgttgacaagacccgaaagtactacgccgctgggtttaagcttggctttaccgactactcttcaggcaccggcaaacctcgctatttcttgaacaaccaccacaccattgtcattcgcttccgatccgccccaggtcgagctggtgagaaaggcggcaaagtcgtggttggcttcgaggtgtacacaaagagcatcggccccaacatagagcggcaagatggctgtcctgccgacctgcaggaaatccaagatcacttcgaaatagccatgcacccgaaccgaaccggtgacctcctggcccaggagcccatgtcgtcgaatcatctagacaacttagacgaaggcgatgatgatgaaacgatggtaataccgtattcatactccgtgtatttccgtgaagacgactcgatcgaatgggatagacgctgggatctctacttcgtgaaccaggaggaaggcgcacgcatccattggcttgccatcagcaattctctcattatatgcggtttgcttagcgggcttgtcgtcatgattttgtccaagacgattcggaccgatatcaagggctacaaggaaaacgcgtcgcccgaagctggcaggaaacccaaggccgagaagaaaagtctgggattgctggagcaggctagctctggagatgctcagcctgacgatgcatctgatgatgaggcactcgaagatgtgacaggatggaagcttctccacggagacgtcttccggcgacctcagtacggtcatctactcgcgccactcgtcgggtccggcatgcagcttttgtttatggccgtcggcttgattcttctgagcgctattggggttctgaaccccagcttccgaggtggtttcctgagcttcggatttggtctcttcgttttcgcaggtgttttctcaggctatttctcagccaaggtgtacaaggggttcgggggtgtcaattttggcaaaaacgctctgatcaccgcatgtttcttcccaggtcttctctttggactcatcttcatgctcaatctgttcgtctgggcacaagcctcgagcacagcaatcccatttggcaccctgattgctatcgctcttctttggctttgcatccaggtaccccttgtgtatcttggatcttggtacggacatgccaagtcaagcgagtgggacaatccgaccaagacgagcgcgattcctcgccaagttccacgacaggcttggtacataaagagcttgcaatcgattctgttggcaggtctcattccctttaccgtcatttttattgagctgctgtttgtgttccaatcggtttggcaggataaaagtggtttctattacgtgttcggcttcttaggagttgtatctctaatcctcattgtgacggtcgccgaggtcaccatcgtcacgatttacgtccagctgggctccgagaactaccactggtggtggcagtcgtttgccgttggcggcggcagcgccgtttgggtgttcgtctacagcatctggtactacatgtttaaattgcatatcaccggctttgtcagctctatgctatttttcgtatacagctttattgcttgctgtgtctacggcctgcttacgggaactgtcgggttcctatctgcttacgcttttatccgcagattatacgggtga

SEQ ID NO: 8119 - protein, 701 aa, Muscodor strobelii
  misc_feature: SGI Peptide ID NO. 562485
  misc_feature (54)..(664): Pfam Id: PF02990 Pfam Desc: Endomembrane protein 70
  misc_feature (378)..(664): Pfam Id: PF02990 Pfam Desc: Endomembrane protein 70
  misc_feature (54)..(216): Pfam Id: PF02990 Pfam Desc: Endomembrane protein 70
  misc_feature (263)..(343): Pfam Id: PF02990 Pfam Desc: Endomembrane protein 70
  misc_feature (8)..(701): NCBI GI: 85107590 Blast Desc: NCU06374 [Neurospora crassa OR74A] gi|28924013|gb|EAA33172.1| NCU06374 [Neurospora crassa OR74A]
  misc_feature (11)..(701): NCBI GI: 154301546 Blast Desc: BC1G_10100 [Botryotinia fuckeliana B05.10] gi|150855762|gb|EDN30954.1| BC1G_10100 [Botryotinia fuckeliana B05.10]
  misc_feature (11)..(701): NCBI GI: 156032680 Blast Desc: SS1G_13745 [Sclerotinia sclerotiorum 1980] gi|154699148|gb|EDN98886.1| SS1G_13745 [Sclerotinia sclerotiorum 1980]
  misc_feature (10)..(700): NCBI GI: 115390124 Blast Desc: conserved [Aspergillus terreus NIH2624] gi|114194963|gb|EAU36663.1| conserved [Aspergillus terreus NIH2624]
  misc_feature (10)..(700): NCBI GI: 159130326 Blast Desc: multispanning membrane protein, [Aspergillus fumigatus A1163]
  misc_feature (10)..(700): NCBI GI: 146324530 Blast Desc: multispanning membrane protein [Aspergillus fumigatus Af293] gi|129557292|gb|EAL89181.2| multispanning membrane protein, [Aspergillus fumigatus Af293]
  misc_feature (9)..(700): NCBI GI: 121700266 Blast Desc: multispanning membrane protein, [Aspergillus clavatus NRRL 1] gi|119396540|gb|EAW06972.1| multispanning membrane protein, [Aspergillus clavatus NRRL 1]
  misc_feature (28)..(700): NCBI GI: 226278018 Blast Desc: transmembrane 9 superfamily member 4 [Paracoccidioides brasiliensis Pb01]
  misc_feature (9)..(700): NCBI GI: 212531299 Blast Desc: multispanning membrane protein, [Penicillium marneffei ATCC 18224] gi|210071170|gb|EEA25259.1| multispanning membrane protein, [Penicillium marneffei ATCC 18224]
  misc_feature (20)..(701): NCBI GI: 145603428 Blast Desc: MGG_06057 [Magnaporthe grisea 70-15] gi|145011661|gb|EDJ96317.1| MGG_06057 [Magnaporthe grisea 70-15]
MVGTTRNGLRWLLTALVLSQVDAFYIPGWSIKSYQEGEHIPLMVNKVYSDNTQLQYAYYDLPFVCPPTGKTRASGLLSGQSISLNLGEVLRGDRIVTSDIDLTVGHDNECSFLCGQEVTRRDLRRARDLVKDGYVVEWIVDNLPGATSFVTVDKTRKYYAAGFKLGFTDYSSGTGKPRYFLNNHHTIVIRFRSAPGRAGEKGGKVVVGFEVYTKSIGPNIERQDGCPADLQEIQDHFEIAMHPNRTGDLLAQEPMSSNHLDNLDEGDDDETMVIPYSYSVYFREDDSIEWDRRWDLYFVNQEEGARIHWLAISNSLIICGLLSGLVVMILSKTIRTDIKGYKENASPEAGRKPKAEKKSLGLLEQASSGDAQPDDASDDEALEDVTGWKLLHGDVFRRPQYGHLLAPLVGSGMQLLFMAVGLILLSAIGVLNPSFRGGFLSFGFGLFVFAGVFSGYFSAKVYKGFGGVNFGKNALITACFFPGLLFGLIFMLNLFVWAQASSTAIPFGTLIAIALLWLCIQVPLVYLGSWYGHAKSSEWDNPTKTSAIPRQVPRQAWYIKSLQSILLAGLIPFTVIFIELLFVFQSVWQDKSGFYYVFGFLGVVSLILIVTVAEVTIVTIYVQLGSENYHWWWQSFAVGGGSAVWVFVYSIWYYMFKLHITGFVSSMLFFVYSFIACCVYGLLTGTVGFLSAYAFIRRLYG

SEQ ID NO: 8120 - DNA, 3277 bp, Muscodor strobelii
  misc_feature: SGI EST ID NO. CUFF.19896.0
  misc_feature: Variant of the nucleotide sequence at SEQ ID NO 8118
aacaatatcactcgcttctgagtgaagtgtcatgtgtctttctgtcctggcgtgaaagcggccacatcgatctcgtctgtcgtgtctccttgccatcttccagcacacaaactgcaagggcccgacatcgcgcccctgcagcgccgtctcgcagcatcgaacccaatcatccatgtcgcagtatcggtgatcgtcagcatctgacgtcctccccgatctaccccaagttcagtcgagcccctagtccgagcgagccatctcctctgtgttggcttcatcttggtactacgtaccgattccactcgtttaccaacctcgaaaccctgccctcgactctcctgtcgttgtatacagatcgtcccaacagcgtgccagggcgcgactggccgcaggccgtgactcaattgagcggtgctttcgatatcgtcaccctatcccccgcttcagttcctgcaagagcgactaggacctgacgaagatggttggaacaacgcgaaacggcctgagatggctgttaaccgcactcgtcttgtcacaggtcgacgcattctacatcccgggatggtcgatcaagagctatcaagaaggcgagcatattccgctgatggtgaacaaggtatattcagacaatactcagctgcaatacgcctactacgacctgccctttgtctgcccacctacaggcaagactcgagcgtcaggtcttctgagcggacagagcatatctctcaacctcggtgaggttctccgtggagatcgcatcgtcacctccgacatagacctaaccgtcggccatgacaacgaatgcagcttcttgtgcggccaggaagtgacgaggagagacttgaggcgcgccagagacctagtcaaggatggctacgtcgtggaatggatcgtagacaacctaccgggcgccaccagcttcgtcaccgttgacaagacccgaaagtactacgccgctgggtttaagcttggctttaccgactactcttcaggcaccggcaaacctcgctatttcttgaacaaccaccacaccattgtcattcgcttccgatccgccccaggtcgagctggtgagaaaggcggcaaagtcgtggttggcttcgaggtgtacacaaagagcatcggccccaacatagagcggcaagatggctgtcctgccgacctgcaggaaatccaagatcacttcgaaatagccatgcacccgaaccgaaccggtgacctcctggcccaggagcccatgtcgtcgaatcatctagacaacttagacgaaggcgatgatgatgaaacgatggtaataccgtattcatactccgtgtatttccgtgaagacgactcgatcgaatgggatagacgctgggatctctacttcgtgaaccaggaggaaggcgcacgcatccattggcttgccatcagcaattctctcattatatgcggtttgcttagcgggcttgtcgtcatgattttgtccaagacgattcggaccgatatcaagggctacaaggaaaacgcgtcgcccgaagctggcaggaaacccaaggccgagaagaaaagtctgggattgctggagcaggctagctctggagatgctcagcctgacgatgcatctgatgatgaggcactcgaagatgtgacaggatggaagcttctccacggagacgtcttccggcgacctcagtacggtcatctactcgcgccactcgtcgggtccggcatgcagcttttgtttatggccgtcggcttgattcttctgagcgctattggggttctgaaccccagcttccgaggtggtttcctgagcttcggatttggtctcttcgttttcgcaggtgttttctcaggctatttctcagccaaggtgtacaaggggttcgggggtgtcaattttggcaaaaacgctctgatcaccgcatgtttcttcccaggtcttctctttggactcatcttcatgctcaatctgttcgtctgggcacaagcctcgagcacagcaatcccatttggcaccctgattgctatcgctcttctttggctttgcatccaggtaccccttgtgtatcttggatcttggtacggacatgccaagtcaagcgagtgggacaatccgaccaagacgagcgcgattcctcgccaagttccacgacaggcttggtacataaagagcttgcaatcgattctgttggcaggtctcattccctttaccgtcatttttattgagctgctgtttgtgttccaatcggtttggcaggataaaagtggtttctattacgtgttcggcttcttaggagttgtatctctaatcctcattgtgacggtcgccgaggtcaccatcgtcacgatttacgtccagctgggctccgagaactaccactggtggtggcagtcgtttgccgttggcggcggcagcgccgtttgggtgttcgtctacagcatctggtactacatgtttaaattgcatatcaccggctttgtcagctctatgctatttttcgtatacagctttattgcttgctgtgtctacggcctgcttacgggaactgtcgggttcctatctgcttacgcttttatccgcagattatacggggcaataaaaatcgattgatctgcctcctcctagcgggctccaccatagtcgaagcattgtctcaaaggcgtaggaagagccacgacgtagaaattatgggtgacaggcgtttacgggaaggatatttttgttattggtaaaatgcataggcttgctcaaagacgatgagaaagtcgaatctagacgggaatttgctgcaaacggtttgtatataccatccacctcctccaatcgtggttaagcttccatgattttgaagtctccaatggcatttaaaaagttccaacttgtttgtgatgtatcttctctcttattgattgtctctataaatccgagcttctgttgatatatgcaggcagcgtcgagggaaaatgtatggtccgtggccatctatctacttggacagtcatagtatcggatggaaagatgtcaaaatatgcgatctacaactgacttcggccgatatccttccccatcgctaaccacatgccgttcccttcgcacaatatattgcctaaaagaatgcgttaattagtcacacatataatcccaagacaagggggggcactcaccatctttatcctcaatagtaccatgcgcataaatcttgcggccaactttcttcgtgacacggccccgtatcagaacaatctggggcaacttaatcgcctgtctgtactcggtggtgaaactcgc

SEQ ID NO: 8121 - DNA, 2121 bp, Muscodor strobelii
  misc_feature: SGI cDNA ID NO. 562486
  misc_feature: Encodes the peptide sequence at SEQ ID NO 8122
atggttggaacaacgcgaaacggcctgagatggctgttaaccgcactcgtcttgtcacaggtcgacgcattctacatcccgggatggtcgatcaagagctatcaagaaggcgagcatattccgctgatggtgaacaaggtatattcagacaatactcagctgcaatacgcctactacgacctgccctttgtctgcccacctacaggcaagactcgagcgtcaggtcttctgagcggacagagcatatctctcaacctcggtgaggttctccgtggagatcgcatcgtcacctccgacatagacctaaccgtcggccatgacaacgaatgcagcttcttgtgcggccaggaagtgacgaggagagacttgaggcgcgccagagacctagtcaaggatggctacgtcgtggaatggatcgtagacaacctaccgggcgccaccagcttcgtcaccgttgacaagacccgaaagtactacgccgctgggtttaagcttggctttaccgactactcttcaggcaccggcaaacctcgctatttcttgaacaaccaccacaccattgtcattcgcttccgatccgccccaggtcgagctggtgagaaaggcggcaaagtcgtggttggcttcgaggtgtacacaaagagcatcggccccaacatagagcggcaagatggctgtcctgccgacctgcaggaaatccaagatcacttcgaaatagccatgcacccgaaccgaaccggtgacctcctggcccaggagcccatgtcgtcgaatcatctagacaacttagacgaaggcgatgatgatgaaacgatggtaataccgtattcatactccgtgtatttccgtgaagacgactcgatcgaatgggatagacgctgggatctctacttcgtgaaccaggaggaaggcgcacgcatccattggcttgccatcagcaattctctcattatatgcggtttgcttagcgggcttgtcgtcatgattttgtccaagacgattcggaccgatatcaagggctacaaggaaaacgcgtcgcccgaagctggcaggaaacccaaggccgagaagaaaagtctgggattgctggagcaggctagctctggagatgctcagcctgacgatgcatctgatgatgaggcactcgaagatgtgacaggatggaagcttctccacggagacgtcttccggcgacctcagtacggtcatctactcgcgccactcgtcgggtccggcatgcagcttttgtttatggccgtcggcttgattcttctgagcgctattggggttctgaaccccagcttccgaggtggtttcctgagcttcggatttggtctcttcgttttcgcaggtgttttctcaggctatttctcagccaaggtgtacaaggggttcgggggtgtcaattttggcaaaaacgctctgatcaccgcatgtttcttcccaggtcttctctttggactcatcttcatgctcaatctgttcgtctgggcacaagcctcgagcacagcaatcccatttggcaccctgattgctatcgctcttctttggctttgcatccaggtaccccttgtgtatcttggatcttggtacggacatgccaagtcaagcgagtgggacaatccgaccaagacgagcgcgattcctcgccaagttccacgacaggcttggtacataaagagcttgcaatcgattctgttggcaggtctcattccctttaccgtcatttttattgagctgctgtttgtgttccaatcggtttggcaggataaaagtggtttctattacgtgttcggcttcttaggagttgtatctctaatcctcattgtgacggtcgccgaggtcaccatcgtcacgatttacgtccagctgggctccgagaactaccactggtggtggcagtcgtttgccgttggcggcggcagcgccgtttgggtgttcgtctacagcatctggtactacatgtttaaattgcatatcaccggctttgtcagctctatgctatttttcgtatacagctttattgcttgctgtgtctacggcctgcttacgggaactgtcgggttcctatctgcttacgcttttatccgcagattatacggggcaataaaaatcgattga

SEQ ID NO: 8122 - protein, 706 aa, Muscodor strobelii
  misc_feature: SGI Peptide ID NO. 562486
  misc_feature (54)..(664): Pfam Id: PF02990 Pfam Desc: Endomembrane protein 70
  misc_feature (378)..(664): Pfam Id: PF02990 Pfam Desc: Endomembrane protein 70
  misc_feature (54)..(216): Pfam Id: PF02990 Pfam Desc: Endomembrane protein 70
  misc_feature (263)..(343): Pfam Id: PF02990 Pfam Desc: Endomembrane protein 70
  misc_feature (8)..(706): NCBI GI: 85107590 Blast Desc: NCU06374 [Neurospora crassa OR74A] gi|28924013|gb|EAA33172.1| NCU06374 [Neurospora crassa OR74A]
  misc_feature (11)..(706): NCBI GI: 154301546 Blast Desc: BC1G_10100 [Botryotinia fuckeliana B05.10] gi|150855762|gb|EDN30954.1| BC1G_10100 [Botryotinia fuckeliana B05.10]
  misc_feature (11)..(701): NCBI GI: 156032680 Blast Desc: SS1G_13745 [Sclerotinia sclerotiorum 1980] gi|154699148|gb|EDN98886.1| SS1G_13745 [Sclerotinia sclerotiorum 1980]
  misc_feature (10)..(706): NCBI GI: 159130326 Blast Desc: multispanning membrane protein, [Aspergillus fumigatus A1163]
  misc_feature (10)..(706): NCBI GI: 146324530 Blast Desc: multispanning membrane protein [Aspergillus fumigatus Af293] gi|129557292|gb|EAL89181.2| multispanning membrane protein, [Aspergillus fumigatus Af293]
  misc_feature (10)..(700): NCBI GI: 115390124 Blast Desc: conserved [Aspergillus terreus NIH2624] gi|114194963|gb|EAU36663.1| conserved [Aspergillus terreus NIH2624]
  misc_feature (9)..(706): NCBI GI: 121700266 Blast Desc: multispanning membrane protein, [Aspergillus clavatus NRRL 1] gi|119396540|gb|EAW06972.1| multispanning membrane protein, [Aspergillus clavatus NRRL 1]
  misc_feature (20)..(706): NCBI GI: 145603428 Blast Desc: MGG_06057 [Magnaporthe grisea 70-15] gi|145011661|gb|EDJ96317.1| MGG_06057 [Magnaporthe grisea 70-15]
  misc_feature (28)..(706): NCBI GI: 226278018 Blast Desc: transmembrane 9 superfamily member 4 [Paracoccidioides brasiliensis Pb01]
  misc_feature (9)..(706): NCBI GI: 212531299 Blast Desc: multispanning membrane protein, [Penicillium marneffei ATCC 18224] gi|210071170|gb|EEA25259.1| multispanning membrane protein, [Penicillium marneffei ATCC 18224]
MVGTTRNGLRWLLTALVLSQVDAFYIPGWSIKSYQEGEHIPLMVNKVYSDNTQLQYAYYDLPFVCPPTGKTRASGLLSGQSISLNLGEVLRGDRIVTSDIDLTVGHDNECSFLCGQEVTRRDLRRARDLVKDGYVVEWIVDNLPGATSFVTVDKTRKYYAAGFKLGFTDYSSGTGKPRYFLNNHHTIVIRFRSAPGRAGEKGGKVVVGFEVYTKSIGPNIERQDGCPADLQEIQDHFEIAMHPNRTGDLLAQEPMSSNHLDNLDEGDDDETMVIPYSYSVYFREDDSIEWDRRWDLYFVNQEEGARIHWLAISNSLIICGLLSGLVVMILSKTIRTDIKGYKENASPEAGRKPKAEKKSLGLLEQASSGDAQPDDASDDEALEDVTGWKLLHGDVFRRPQYGHLLAPLVGSGMQLLFMAVGLILLSAIGVLNPSFRGGFLSFGFGLFVFAGVFSGYFSAKVYKGFGGVNFGKNALITACFFPGLLFGLIFMLNLFVWAQASSTAIPFGTLIAIALLWLCIQVPLVYLGSWYGHAKSSEWDNPTKTSAIPRQVPRQAWYIKSLQSILLAGLIPFTVIFIELLFVFQSVWQDKSGFYYVFGFLGVVSLILIVTVAEVTIVTIYVQLGSENYHWWWQSFAVGGGSAVWVFVYSIWYYMFKLHITGFVSSMLFFVYSFIACCVYGLLTGTVGFLSAYAFIRRLYGAIKID

SEQ ID NO: 8123 - DNA, 3277 bp, Muscodor strobelii; identical to SEQ ID NO: 8120
  misc_feature: SGI EST ID NO. CUFF.19896.0
  misc_feature: Variant of the nucleotide sequence at SEQ ID NO 8121

SEQ ID NO: 8124 - DNA, 1125 bp, Muscodor strobelii
  misc_feature: SGI cDNA ID NO. 562487
  misc_feature: Encodes the peptide sequence at SEQ ID NO 8125
atgattttgtccaagacgattcggaccgatatcaagggctacaaggaaaacgcgtcgcccgaagctggcaggaaacccaaggccgagaagaaaagtctgggattgctggagcaggctagctctggagatgctcagcctgacgatgcatctgatgatgaggcactcgaagatgtgacaggatggaagcttctccacggagacgtcttccggcgacctcagtacggtcatctactcgcgccactcgtcgggtccggcatgcagcttttgtttatggccgtcggcttgattcttctgagcgctattggggttctgaaccccagcttccgaggtggtttcctgagcttcggatttggtctcttcgttttcgcaggtgttttctcaggctatttctcagccaaggtgtacaaggggttcgggggtgtcaattttggcaaaaacgctctgatcaccgcatgtttcttcccaggtcttctctttggactcatcttcatgctcaatctgttcgtctgggcacaagcctcgagcacagcaatcccatttggcaccctgattgctatcgctcttctttggctttgcatccaggtaccccttgtgtatcttggatcttggtacggacatgccaagtcaagcgagtgggacaatccgaccaagacgagcgcgattcctcgccaagttccacgacaggcttggtacataaagagcttgcaatcgattctgttggcaggtctcattccctttaccgtcatttttattgagctgctgtttgtgttccaatcggtttggcaggataaaagtggtttctattacgtgttcggcttcttaggagttgtatctctaatcctcattgtgacggtcgccgaggtcaccatcgtcacgatttacgtccagctgggctccgagaactaccactggtggtggcagtcgtttgccgttggcggcggcagcgccgtttgggtgttcgtctacagcatctggtactacatgtttaaattgcatatcaccggctttgtcagctctatgctatttttcgtatacagctttattgcttgctgtgtctacggcctgcttacgggaactgtcgggttcctatctgcttacgcttttatccgcagattatacgggtga

SEQ ID NO: 8125 - protein, 374 aa, Muscodor strobelii
  misc_feature: SGI Peptide ID NO. 562487
  misc_feature (3)..(337): Pfam Id: PF02990 Pfam Desc: Endomembrane protein 70
  misc_feature (51)..(337): Pfam Id: PF02990 Pfam Desc: Endomembrane protein 70
  misc_feature (1)..(374): NCBI GI: 85107590 Blast Desc: NCU06374 [Neurospora crassa OR74A] gi|28924013|gb|EAA33172.1| NCU06374 [Neurospora crassa OR74A]
  misc_feature (1)..(374): NCBI GI: 145603428 Blast Desc: MGG_06057 [Magnaporthe grisea 70-15] gi|145011661|gb|EDJ96317.1| MGG_06057 [Magnaporthe grisea 70-15]
  misc_feature (1)..(373): NCBI GI: 119473058 Blast Desc: multispanning membrane protein, [Neosartorya fischeri NRRL 181] gi|119406635|gb|EAW16586.1| multispanning membrane protein, [Neosartorya fischeri NRRL 181]
  misc_feature (1)..(373): NCBI GI: 115390124 Blast Desc: conserved [Aspergillus terreus NIH2624] gi|114194963|gb|EAU36663.1| conserved [Aspergillus terreus NIH2624]
  misc_feature (1)..(373): NCBI GI: 159130326 Blast Desc: multispanning membrane protein, [Aspergillus fumigatus A1163]
  misc_feature (1)..(373): NCBI GI: 146324530 Blast Desc: multispanning membrane protein [Aspergillus fumigatus Af293] gi|129557292|gb|EAL89181.2| multispanning membrane protein, [Aspergillus fumigatus Af293]
  misc_feature (1)..(374): NCBI GI: 154301546 Blast Desc: BC1G_10100 [Botryotinia fuckeliana B05.10] gi|150855762|gb|EDN30954.1| BC1G_10100 [Botryotinia fuckeliana B05.10]
  misc_feature (1)..(374): NCBI GI: 156032680 Blast Desc: SS1G_13745 [Sclerotinia sclerotiorum 1980] gi|154699148|gb|EDN98886.1| SS1G_13745 [Sclerotinia sclerotiorum 1980]
  misc_feature (1)..(373): NCBI GI: 121700266 Blast Desc: multispanning membrane protein, [Aspergillus clavatus NRRL 1] gi|119396540|gb|EAW06972.1| multispanning membrane protein, [Aspergillus clavatus NRRL 1]
  misc_feature (1)..(373): NCBI GI: 242772624 Blast Desc: multispanning membrane protein, [Talaromyces stipitatus ATCC 10500] gi|218721692|gb|EED21110.1| multispanning membrane protein, [Talaromyces stipitatus ATCC 10500]
MILSKTIRTDIKGYKENASPEAGRKPKAEKKSLGLLEQASSGDAQPDDASDDEALEDVTGWKLLHGDVFRRPQYGHLLAPLVGSGMQLLFMAVGLILLSAIGVLNPSFRGGFLSFGFGLFVFAGVFSGYFSAKVYKGFGGVNFGKNALITACFFPGLLFGLIFMLNLFVWAQASSTAIPFGTLIAIALLWLCIQVPLVYLGSWYGHAKSSEWDNPTKTSAIPRQVPRQAWYIKSLQSILLAGLIPFTVIFIELLFVFQSVWQDKSGFYYVFGFLGVVSLILIVTVAEVTIVTIYVQLGSENYHWWWQSFAVGGGSAVWVFVYSIWYYMFKLHITGFVSSMLFFVYSFIACCVYGLLTGTVGFLSAYAFIRRLYG

SEQ ID NO: 8126 - DNA, 3277 bp, Muscodor strobelii; identical to SEQ ID NO: 8120
  misc_feature: SGI EST ID NO. CUFF.19896.0
  misc_feature: Variant of the nucleotide sequence at SEQ ID NO 8124

SEQ ID NO: 8127 - DNA, 3738 bp, Muscodor strobelii
  misc_feature: SGI cDNA ID NO. 562488
  misc_feature: Reduced expression when VOC is produced
  misc_feature: Encodes the peptide sequence at SEQ ID NO 8128
atgtctgacggtgcagacggcacggcttcggcctcccaagacacgggcatcggcctggtaggatttatcaccgcgttgactacttcgttggtcgtctttggagtccagacaggcgctttcttgctgttgcgcaataagctcgccagaatcttgtacgacactaaaccgaagactttcctcgtacccgaacgtgagcgaacagaaccgccgccgagtagtccatggggcctttttatatccttgtttcaagtgcgagaccgagagatcatcaacaaatgtggcctcgatgcgtacttcttcctccgctatctgcagaccttgcttattatattcatacctatagctactatcatcattcctatcctcatccccatcaactatgtgggtgggaaaagtcacagtgttgtaaccaattcctcagacgagactgctaaggaccaatacggcagaaccataaccggattggatgccttggcctggaacaacgtgaaagaggagcatacgaatcgatactgggcacaccttgttctagctgttctcgttgttctctgggtttgtggtgtgttctttttcgaactcagagtgtacatcaaggttcggcaggattggctcaccacagccgaacatcgtcttcgtgcttcagctactactgtcttagttagcggcattcctgagaaatggctgagcgaagaagctctccggggcttgttcgatgtatttccaggtggtattcgaaacgtctggctcactcgtgacctgacgcacctgctggagaagattacgaaaagagacgagattcacaagcagctggaaggggcccaaaccgagctgattagattggcgaaggagaaagaattggagaaaaaacaaaaggaggagaagcaagcacgcagggcatcgaattcccaccgtccaacaaagaaagagaagacagagcagaagaaacaagaagacgaggcggcgagacagcgcgctgaacaggaccagggcattagtagtggcgatcagcacgaggtgccccataacatccacgatgctgaagatgagattaagcatcacgaagagcacgaagagcacgaagaacccgagcaacaagacaattcggcttttacaggaatgaagacaggattttccaagatcacaggtgggctgggtaagggtgttgacgggctctttgggggcgccaaaaatgtcacacacaacattgatggtcagatcgagacaaccaacggttttatggcgataggatcaccgcaaagtcgatcggagtctcgtactactcaaaagaggcatgtccttttcgacgacgatgagaaagtcagaccctcgactcaaggccccgcccattcgaacatacccgaaaatgaagagcgtgtcatgggttcttccgctactcaacctaagcacgctcgtcattctgccacatcagaggatgaggctcttaataaagaaaccatcgaaatgagagagttcggaaatactactcgcaagctggaaaatatcgacgacatgtacaaccacgagaaagctaggtggtatcaattctggaagccgcccgccggtggctttgcttctcctgttcctcaaggagcgcaaagcctcgagtttcccttcgaaaaggagaagaaaacatttggagaaaaattgaaagctttcattccattcatgggaggcgacggggttgagctgatcgaatacacggcggcttacagcggcgagggtgatgatgctgaggataaagacggcggagccgagtgggagaaatgggtcaagcgatcggatcggccgactcataggcttgcaaatttcgaatggacacccagctggctccccggactaccgttgctaaacaagaagaccgatacaatttattggtgtagacgggaacttgcacgtcttaaccttgaaattgaggccgaccagaagaatccagaacgctacccgctcatgcgagcagcttttatacagttcaaccatcaagttgctgctcatatggcttgccagagcatcatccaccatgttcctaaacagatggccccgagaatggtcgaaatctcgccgaatgacgtcgagtgggacaatatggccgtcagctggtggtcagcatggcttcgcactttcattgcagtggctgttgtcgttggtatgataatcctttgggctatccctgtagcattcactggatcactctcccaacttgacaaactcattgcggccttcccatttctgagcttcctcaacaagagtgaaacgatacagaacgtagcgacagctgtagcaggtgttcttccagccttgttgcttgctctattgcttttcttagtaccgatcatcatgaatatccttgctggctttaagggagccaagacgggaaccgaaaagagcgaaacggtgcaaaagttctactttgctttcctgttcatccaggttttcctcattgtctctctatctgccagcgcgctcactattgtctcagatctggtcaacaacccggggagcatcacacagacactggctaggaatatcccctccgctgccaattatttcttctcttacatgattcttcaggcacttagtgtgagctccggtactctcctccagattggaagtctactcaaatggtacatcatctcaaggatcctaaacagcaccgccagaagcaagtggaagacaaacacgactctccctgatgttaaatggggccagatctttcccgtttataccaattttgcctgcattggtctcatatactgtatcattgctcccatcatttcgatcttcgccatcatcaccttcagtctgctttggtttgcccagaggtatgcgatgatctacgtcaatcgactgactctggatacgggcggcgtcctatatccaagagccattaatcagacgttcacgggtctgtatgtcatggagctcgctcttatcagccttttcttccttcagaatgatgaacatggcaatcatccatgtgtacctcaggctatcatcatgattgttgtgactgccttgaccgccttgtaccagctattactgaacatgcagttctcgcccatgttccgatacttaccgattacctttgaagatgaggcggtgctgcgcgacgaagccttccagcgcgcccaagaccaacgcttaggacttgtcgatgacgatgttaagacgtcgctggactcggccggcctgccatcgcacgcgcatggaccctcagactcaggtccttctgagggcgccccggacatggaaggtcgcggcggtaagttcagaaacttcaaaccagtcaaagggattgtccatgcgggcacgtgggcagtgcgcggcggcaaggagacatatggtcgcacggttggtcgcacagtagacaaagcggagcagggcattagaaacgccaataagtacagagacgagcgcaagcagaaggatttagaagcgcaaagagctatcggtgaggcgctgtatggtggattccacgatgaaatcgaagacctgacgcccgaggagcgcgacgtgctcgtcagacgcgcattcatgcactcggcactccgggcacgacggccaacattgtggatcccgcgagacgacttgggtgtcagcgatgacgaaatcaagcggacgcgggaattcagcaagcatatctggatttccaacgaagggacagcattggacagcaaagtacgagtcgtttacggccgtgcgccgccggacttttccgaactggatatcatccaattgtaa

SEQ ID NO: 8128 - protein, 1245 aa, Muscodor strobelii
  misc_feature: SGI Peptide ID NO. 562488
  misc_feature (637)..(1074): Pfam Id: PF02714 Pfam Desc: Domain of function DUF221
  misc_feature (637)..(983): Pfam Id: PF02714 Pfam Desc: Domain of function DUF221
  misc_feature (6)..(1245): NCBI GI: 85108205 Blast Desc: NCU08316 [Neurospora crassa OR74A] gi|28924137|gb|EAA33293.1| conserved [Neurospora crassa OR74A]
  misc_feature (2)..(1245): NCBI GI: 171690478 Blast Desc: protein product [Podospora anserina] gi|170945187|emb|CAP71298.1| protein product [Podospora anserina]
  misc_feature (13)..(1245): NCBI GI: 256727491 Blast Desc: NECHADRAFT_286 [Nectria haematococca mpVI 77-13-4]
  misc_feature (2)..(1245): NCBI GI: 145607317 Blast Desc: MGG_04165 [Magnaporthe grisea 70-15] gi|145014898|gb|EDJ99466.1| MGG_04165 [Magnaporthe grisea 70-15]
  misc_feature (16)..(1245): NCBI GI: 154293442 Blast Desc: BC1G_14347 [Botryotinia fuckeliana B05.10] gi|150845328|gb|EDN20521.1| BC1G_14347 [Botryotinia fuckeliana B05.10]
  misc_feature (16)..(1245): NCBI GI: 156035661 Blast Desc: SS1G_13034 [Sclerotinia sclerotiorum 1980] gi|154698439|gb|EDN98177.1| SS1G_13034 [Sclerotinia sclerotiorum 1980]
  misc_feature (9)..(1245): NCBI GI: 145246588 Blast Desc: An12g04730 [Aspergillus niger] gi|134080261|emb|CAK97164.1| protein product [Aspergillus niger]
  misc_feature (7)..(1245): NCBI GI: 242765220 Blast Desc: DUF221 domain protein, [Talaromyces stipitatus ATCC 10500] gi|218724126|gb|EED23543.1| DUF221 domain protein, [Talaromyces stipitatus ATCC 10500]
  misc_feature (6)..(1245): NCBI GI: 154281529 Blast Desc: conserved [Ajellomyces capsulatus NAm1] gi|150411756|gb|EDN07144.1| conserved [Ajellomyces capsulatus NAm1]
  misc_feature (6)..(1245): NCBI GI: 240275720 Blast Desc: phosphate metabolism protein [Ajellomyces capsulatus H143]
  misc_feature: Useful for introducing or modulating the production of volatile compounds
MSDGADGTASASQDTGIGLVGFITALTTSLVVFGVQTGAFLLLRNKLARILYDTKPKTFLVPERERTEPPPSSPWGLFISLFQVRDREIINKCGLDAYFFLRYLQTLLIIFIPIATIIIPILIPINYVGGKSHSVVTNSSDETAKDQYGRTITGLDALAWNNVKEEHTNRYWAHLVLAVLVVLWVCGVFFFELRVYIKVRQDWLTTAEHRLRASATTVLVSGIPEKWLSEEALRGLFDVFPGGIRNVWLTRDLTHLLEKITKRDEIHKQLEGAQTELIRLAKEKELEKKQKEEKQARRASNSHRPTKKEKTEQKKQEDEAARQRAEQDQGISSGDQHEVPHNIHDAEDEIKHHEEHEEHEEPEQQDNSAFTGMKTGFSKITGGLGKGVDGLFGGAKNVTHNIDGQIETTNGFMAIGSPQSRSESRTTQKRHVLFDDDEKVRPSTQGPAHSNIPENEERVMGSSATQPKHARHSATSEDEALNKETIEMREFGNTTRKLENIDDMYNHEKARWYQFWKPPAGGFASPVPQGAQSLEFPFEKEKKTFGEKLKAFIPFMGGDGVELIEYTAAYSGEGDDAEDKDGGAEWEKWVKRSDRPTHRLANFEWTPSWLPGLPLLNKKTDTIYWCRRELARLNLEIEADQKNPERYPLMRAAFIQFNHQVAAHMACQSIIHHVPKQMAPRMVEISPNDVEWDNMAVSWWSAWLRTFIAVAVVVGMIILWAIPVAFTGSLSQLDKLIAAFPFLSFLNKSETIQNVATAVAGVLPALLLALLLFLVPIIMNILAGFKGAKTGTEKSETVQKFYFAFLFIQVFLIVSLSASALTIVSDLVNNPGSITQTLARNIPSAANYFFSYMILQALSVSSGTLLQIGSLLKWYIISRILNSTARSKWKTNTTLPDVKWGQIFPVYTNFACIGLIYCIIAPIISIFAIITFSLLWFAQRYAMIYVNRLTLDTGGVLYPRAINQTFTGLYVMELALISLFFLQNDEHGNHPCVPQAIIMIVVTALTALYQLLLNMQFSPMFRYLPITFEDEAVLRDEAFQRAQDQRLGLVDDDVKTSLDSAGLPSHAHGPSDSGPSEGAPDMEGRGGKFRNFKPVKGIVHAGTWAVRGGKETYGRTVGRTVDKAEQGIRNANKYRDERKQKDLEAQRAIGEALYGGFHDEIEDLTPEERDVLVRRAFMHSALRARRPTLWIPRDDLGVSDDEIKRTREFSKHIWISNEGTALDSKVRVVYGRAPPDFSELDIIQL

SEQ ID NO: 8129 - DNA, 4688 bp, Muscodor strobelii
  misc_feature: SGI EST ID NO. CUFF.19961.1
  misc_feature: Variant of the nucleotide sequence at SEQ ID NO 8127
gggcgcctctgacatcagggtgcagacagccggacagcgcgctatggtagatgcagctagctcgtgacgctttcctggttttgagtggatgcgagttaatctcgagcgaatctacatgcgaatcatctagaccaggggctcccgtcacccatctgatcccccacagcgtctttgaccacgttcctatgataaaccgccagggcagtccactcgtttcaactttggacgctttcgactcgtcaattgtgcctctgcggcctcctacactgatcattcttaactccctattagagctcactcccttcatggtgagagtgcaaaacgacggaacggcatgttcgtctcttcaggtctagattgcctcacccatgaataaccataaatccacttgattgccctattcacaacgacaccttctaccacttcagaccactggaacggtctgattgcattcgagggaattggcccctaaaagtctctcaacacagagaagacgcgcagctcgaactctattagactccgcgcgcacactcttcgtttttgtcgccaataacttggtatggatgcctaaggagaggctaagtacgactacttaatcaccatgtctgacggtgcagacggcacggcttcggcctcccaagacacgggcatcggcctggtaggatttatcaccgcgttgactacttcgttggtcgtctttggagtccagacaggcgctttcttgctgttgcgcaataagctcgccagaatcttgtacgacacgtctcctgcctcagttcgtggtatgtccccgatccatgctgactcgcttgcgctatagtaaaccgaagactttcctcgtacccgaacgtgagcgaacagaaccgccgccgagtagtccatggggcctttttatatccttgtttcaagtgcgagaccgagagatcatcaacaaatgtggcctcgatgcgtacttcttcctccgctatctgcagaccttgcttattatattcatacctatagctactatcatcattcctatcctcatccccatcaactatgtgggtgggaaaagtcacagtgttgtaaccaattcctcagacgagactgctaaggaccaatacggcagaaccataaccggattggatgccttggcctggaacaacgtgaaagaggagcatacgaatcgatactgggcacaccttgttctagctgttctcgttgttctctgggtttgtggtgtgttctttttcgaactcagagtgtacatcaaggttcggcaggattggctcaccacagccgaacatcgtcttcgtgcttcagctactactgtcttagttagcggcattcctgagaaatggctgagcgaagaagctctccggggcttgttcgatgtatttccaggtggtattcgaaacgtctggctcactcgtgacctgacgcacctgctggagaagattacgaaaagagacgagattcacaagcagctggaaggggcccaaaccgagctgattagattggcgaaggagaaagaattggagaaaaaacaaaaggaggagaagcaagcacgcagggcatcgaattcccaccgtccaacaaagaaagagaagacagagcagaagaaacaagaagacgaggcggcgagacagcgcgctgaacaggaccagggcattagtagtggcgatcagcacgaggtgccccataacatccacgatgctgaagatgagattaagcatcacgaagagcacgaagagcacgaagaacccgagcaacaagacaattcggcttttacaggaatgaagacaggattttccaagatcacaggtgggctgggtaagggtgttgacgggctctttgggggcgccaaaaatgtcacacacaacattgatggtcagatcgagacaaccaacggttttatggcgataggatcaccgcaaagtcgatcggagtctcgtactactcaaaagaggcatgtccttttcgacgacgatgagaaagtcagaccctcgactcaaggccccgcccattcgaacatacccgaaaatgaagagcgtgtcatgggttcttccgctactcaacctaagcacgctcgtcattctgccacatcagaggatgaggctcttaataaagaaaccatcgaaatgagagagttcggaaatactactcgcaagctggaaaatatcgacgacatgtacaaccacgagaaagctaggtggtatcaattctggaagccgcccgccggtggctttgcttctcctgttcctcaaggagcgcaaagcctcgagtttcccttcgaaaaggagaagaaaacatttggagaaaaattgaaagctttcattccattcatgggaggcgacggggttgagctgatcgaatacacggcggcttacagcggcgagggtgatgatgctgaggataaagacggcggagccgagtgggagaaatgggtcaagcgatcggatcggccgactcataggcttgcaaatttcgaatggacacccagctggctccccggactaccgttgctaaacaagaagaccgatacaatttattggtgtagacgggaacttgcacgtcttaaccttgaaattgaggccgaccagaagaatccagaacgctacccgctcatgcgagcagcttttatacagttcaaccatcaagttgctgctcatatggcttgccagagcatcatccaccatgttcctaaacagatggccccgagaatggtcgaaatctcgccgaatgacgtcgagtgggacaatatggccgtcagctggtggtcagcatggcttcgcactttcattgcagtggctgttgtcgttggtatgataatcctttgggctatccctgtagcattcactggatcactctcccaacttgacaaactcattgcggccttcccatttctgagcttcctcaacaagagtgaaacgatacagaacgtagcgacagctgtagcaggtgttcttccagccttgttgcttgctctattgcttttcttagtaccgatcatcatgaatatccttgctggctttaagggagccaagacgggaaccgaaaagagcgaaacggtgcaaaagttctactttgctttcctgttcatccaggttttcctcattgtctctctatctgccagcgcgctcactattgtctcagatctggtcaacaacccggggagcatcacacagacactggctaggaatatcccctccgctgccaattatttcttctcttacatgattcttcaggcacttagtgtgagctccggtactctcctccagattggaagtctactcaaatggtacatcatctcaaggatcctaaacagcaccgccagaagcaagtggaagacaaacacgactctccctgatgttaaatggggccagatctttcccgtttataccaattttgcctgcattggtctcatatactgtatcattgctcccatcatttcgatcttcgccatcatcaccttcagtctgctttggtttgcccagaggtatgcgatgatctacgtcaatcgactgactctggatacgggcggcgtcctatatccaagagccattaatcagacgttcacgggtctgtatgtcatggagctcgctcttatcagccttttcttccttcagaatgatgaacatggcaatcatccatgtgtacctcaggctatcatcatgattgttgtgactgccttgaccgccttgtaccagctattactgaacatgcagttctcgcccatgttccgatacttaccgattacctttgaagatgaggcggtgctgcgcgacgaagccttccagcgcgcccaagaccaacgcttaggacttgtcgatgacgatgttaagacgtcgctggactcggccggcctgccatcgcacgcgcatggaccctcagactcaggtccttctgagggcgccccggacatggaaggtcgcggcggtaagttcagaaacttcaaaccagtcaaagggattgtccatgcgggcacgtgggcagtgcgcggcggcaaggagacatatggtcgcacggttggtcgcacagtagacaaagcggagcagggcattagaaacgccaataagtacagagacgagcgcaagcagaaggatttagaagcgcaaagagctatcggtgaggcgctgtatggtggattccacgatgaaatcgaagacctgacgcccgaggagcgcgacgtgctcgtcagacgcgcattcatgcactcggcactccgggcacgacggccaacattgtggatcccgcgagacgacttgggtgtcagcgatgacgaaatcaagcggacgcgggaattcagcaagcatatctggatttccaacgaagggacagcattggacagcaaagtacgagtcgtttacggccgtgcgccgccggacttttccgaactggatatcatccaattgtaagacgacagacgaggctgaaaacccaattgtacatatgcagacgggagggattgaatgcccatcgtctttatctttttccggtttcatcttttcgcttcgattgcatcaggcggcagcagccatacatctctcggggttcgagagcaaaggcttcgaggcgtagattataccgacaactgcatctgcatcggctggagcatacaaaggaagcatagagcggtacctagctataaatgaacaaaaacatcttcaaattgcctactttccccgtgttgctctactgactgacga

SEQ ID NO: 8130 - DNA, 1122 bp, Muscodor strobelii
  misc_feature: SGI cDNA ID NO. 562489
  misc_feature: Encodes the peptide sequence at SEQ ID NO 8131
atgcagtcctccatattattcgagagccaagacgggtccgtcgtcgtcatcgacctaccacggtccgtagaagaagcccaagtactgccaggcaaaatcatcacgagacaaattgtcccaacggagccaatagccacaccgtggtcattaccagaacccaaggaacacaatgcgaaacccgtgtcacattccgctgcgattgccgatttgatgactacggagaccgtcaagtcggctcttgaaacagccgtaactagtcacactggtccatggtgtctggcacgtgtaatcagaccagaagaagcagatgctacccagaccacaatcaggaatggttcacagtcacacaagcgcaagaggaagcacaaagcagctcccaccactcctcgatcatcaaatacggatgacgtgactacgatagtgacagaggaccaatcgcctccattcattcccgaacagtcacagcatctactgggcaccatagaatgccagcgagacacgttcctgagaacggcgccgcagtttgatctcatggttattgaccccccttggccaagtcgctcggtgaagcgtaagatagacgggtattcgacctttcatggtatggatgaggcgagtgctttgctctcacagattccagtagcggcgcacctcaagcccgacggtctagtggctgtgtggattaccaacaaagccgcaataatggacctactgacttcatcgagcggtatcttcgatcaatgggggctcgaacctataggggagtatatatggctgaaaatcacgacatctggggcacccatttttgacgtcgaatccgcgtggcggaagccctgggagcgacttttgattacgaggaggaaaggcagtctcgtcagattgcctgtcagtccaaaggtgatacttgccgtcccggatgtacattcacgcaagcctaatctgaggggcttatttggacatgttctacctcaccattatcaaggccttgagatatttgcaaggagtctcactgcaggttggtggagttggggagtcgagactcttctctttcaacagaggcttcattggatcgaaatatctgatgcacgtacggatagtgaacaagacgatggcgattcttga

SEQ ID NO: 8131 - protein, 373 aa, Muscodor strobelii
  misc_feature: SGI Peptide ID NO. 562489
  misc_feature (175)..(346): Pfam Id: PF05063 Pfam Desc: MT-A70
  misc_feature (2)..(359): NCBI GI: 46123695 Blast Desc: FG06225.1 [Gibberella zeae PH-1]
  misc_feature (2)..(364): NCBI GI: 261352360 Blast Desc: MT-A70 family [Verticillium albo-atrum VaMs.102]
  misc_feature (3)..(358): NCBI GI: 256726854 Blast Desc: NECHADRAFT_33914 [Nectria haematococca mpVI 77-13-4]
  misc_feature (1)..(357): NCBI GI: 39951699 Blast Desc: MGG_01492 [Magnaporthe grisea 70-15] gi|145020664|gb|EDK04793.1| MGG_01492 [Magnaporthe grisea 70-15]
  misc_feature (1)..(268): NCBI GI: 85108254 Blast Desc: NCU08328 [Neurospora crassa OR74A] gi|28924149|gb|EAA33305.1| [Neurospora crassa OR74A]
  misc_feature (173)..(370): NCBI GI: 154294469 Blast Desc: BC1G_13837 [Botryotinia fuckeliana B05.10] gi|150844677|gb|EDN19870.1| BC1G_13837 [Botryotinia fuckeliana B05.10]
  misc_feature (174)..(356): NCBI GI: 169607291 Blast Desc: SNOG_06702 [Phaeosphaeria nodorum SN15] gi|111064233|gb|EAT85353.1| SNOG_06702 [Phaeosphaeria nodorum SN15]
  misc_feature (106)..(356): NCBI GI: 19113968 Blast Desc: mRNA (N6-adenosine)-methyltransferase () [Schizosaccharomyces pombe] gi|1175468|sp|Q09800.1|YAA7_SCHPO RecName: Full=Uncharacterized protein C22G7.07c mRNA () pombe]
  misc_feature (38)..(287): NCBI GI: 156032946 Blast Desc: SS1G_13879 [Sclerotinia sclerotiorum 1980] gi|154699281|gb|EDN99019.1| SS1G_13879 [Sclerotinia sclerotiorum 1980]
  misc_feature (226)..(358): NCBI GI: 171690488 Blast Desc: protein product [Podospora anserina] gi|170945192|emb|CAP71303.1| protein product [Podospora anserina]
MQSSILFESQDGSVVVIDLPRSVEEAQVLPGKIITRQIVPTEPIATPWSLPEPKEHNAKPVSHSAAIADLMTTETVKSALETAVTSHTGPWCLARVIRPEEADATQTTIRNGSQSHKRKRKHKAAPTTPRSSNTDDVTTIVTEDQSPPFIPEQSQHLLGTIECQRDTFLRTAPQFDLMVIDPPWPSRSVKRKIDGYSTFHGMDEASALLSQIPVAAHLKPDGLVAVWITNKAAIMDLLTSSSGIFDQWGLEPIGEYIWLKITTSGAPIFDVESAWRKPWERLLITRRKGSLVRLPVSPKVILAVPDVHSRKPNLRGLFGHVLPHHYQGLEIFARSLTAGWWSWGVETLLFQQRLHWIEISDARTDSEQDDGDS

SEQ ID NO: 8132 - DNA, 321 bp, Muscodor strobelii
  misc_feature: SGI EST ID NO. CUFF.19904.0
  misc_feature: Variant of the nucleotide sequence at SEQ ID NO 8130
atcagaccagaagaagcagatgctacccagaccacaatcaggaatggttcacagtcacacaagcgcaagaggaagcacaaagcagctcccaccactcctcgatcatcaaatacggatgacgtgactacgatagtgacagaggaccaatcgcctccattcattcccgaacagtcacagcatctactgggcaccatagaatgccagcgagacacgttcctgagaacggcgccgcagtttgatctcatggttattgaccccccttggccaagtcgctcggtgaagcgtaagatagacgggtattcgacctttcatggtatggat

SEQ ID NO: 8133 - DNA, 729 bp, Muscodor strobelii
  misc_feature: SGI cDNA ID NO. 562490
  misc_feature: Reduced expression when VOC is produced
  misc_feature: Encodes the peptide sequence at SEQ ID NO 8134
atggcggccccgacggcagaggcgttgtccaagacgtttaggataggacagaagcaggtctttatgccggcgtacaccatcacatttgttcgaccgaaaccgaaacagccatcaaattgggcgacattcaaagtcccgatgaaattcaacaagcttgacatgcgagactacctcctacacgcatacaaagtacccgtcgtcgccgtgcggtcccaagtgaaggcgcagcaattgcgacactccaacatcaccgggcggaaagagcgcaagccatctgtcaagaccatgaccgtcgagctgaaggaacccttcgtctggcccgaaccaccttccgagaaggacatggcgccctggacatcgcctgctgctaagttgcatgcgcgacagaccaaagaacagcacaaaatgagggtgaagctgtggaagaagggcactatgcctttgcgtgttcatcagaagaggtcgtctgaattcactaatctgcgtattgaagccaagagactgatgagagagggtggctgggataacaagaggacgattgaccccaagttcgttacgtccgagggcaaggagagacaagagcagagtaagaaagacaagaaggtcaagggcaaaaacactatgcctagggctagatggggaaggggcgggtcttcactcggctacggcggaaccagtaagaaatctctggtcattgctgagacggaaaagactcgactgtacgactag

SEQ ID NO: 8134 - protein, 242 aa, Muscodor strobelii
  misc_feature: SGI Peptide ID NO. 562490
  misc_feature (20)..(112): Pfam Id: PF00276 Pfam Desc: Ribosomal protein L23
  misc_feature (38)..(112): Pfam Id: PF00276 Pfam Desc: Ribosomal protein L23
  misc_feature (3)..(181): NCBI GI: 116196140 Blast Desc: CHGG_04668 [Chaetomium globosum CBS 148.51] gi|88180581|gb|EAQ88049.1| CHGG_04668 [Chaetomium globosum CBS 148.51]
  misc_feature (1)..(118): NCBI GI: 85108257 Blast Desc: NCU08329 [Neurospora crassa OR74A] gi|28924150|gb|EAA33306.1| [Neurospora crassa OR74A]
  misc_feature (13)..(184): NCBI GI: 46123693 Blast Desc: FG06224.1 [Gibberella zeae PH-1]
  misc_feature (1)..(119): NCBI GI: 261352361 Blast Desc: conserved [Verticillium albo-atrum VaMs.102]
  misc_feature (5)..(172): NCBI GI: 171690486 Blast Desc: protein product [Podospora anserina] gi|170945191|emb|CAP71302.1| protein product [Podospora anserina]
  misc_feature (13)..(184): NCBI GI: 256727423 Blast Desc: [Nectria haematococca mpVI 77-13-4]
  misc_feature (17)..(118): NCBI GI: 145254802 Blast Desc: An18g02990 [Aspergillus niger] gi|134084343|emb|CAK48683.1| protein product [Aspergillus niger]
  misc_feature (2)..(181): NCBI GI: 145613606 Blast Desc: MGG_01491 [Magnaporthe grisea 70-15] gi|145020665|gb|EDK04794.1| MGG_01491 [Magnaporthe grisea 70-15]
  misc_feature (13)..(144): NCBI GI: 254581922 Blast Desc: ZYRO0D11792p [Zygosaccharomyces rouxii] gi|238939838|emb|CAR28013.1| ZYRO0D11792p [Zygosaccharomyces rouxii]
  misc_feature (17)..(118): NCBI GI: 70997457 Blast Desc: mitochondrial ribosomal protein L23, [Aspergillus fumigatus Af293] gi|66851112|gb|EAL91438.1| mitochondrial ribosomal protein L23, [Aspergillus fumigatus Af293] ribosomal
  misc_feature: Useful for introducing or modulating the production of volatile compounds
MAAPTAEALSKTFRIGQKQVFMPAYTITFVRPKPKQPSNWATFKVPMKFNKLDMRDYLLHAYKVPVVAVRSQVKAQQLRHSNITGRKERKPSVKTMTVELKEPFVWPEPPSEKDMAPWTSPAAKLHARQTKEQHKMRVKLWKKGTMPLRVHQKRSSEFTNLRIEAKRLMREGGWDNKRTIDPKFVTSEGKERQEQSKKDKKVKGKNTMPRARWGRGGSSLGYGGTSKKSLVIAETEKTRLYD

SEQ ID NO: 8135 - DNA, 1419 bp, Muscodor strobelii
  misc_feature: SGI EST ID NO. CUFF.19908.0
  misc_feature: Variant of the nucleotide sequence at SEQ ID NO 8133
gactgatgcagacctccaaggtagacagctcaactgattccagttaatacacgattgcagatttcggaccccattgccaccacgcgtggcagagcttcctggatagtcaattgagcggaggaaagtttctcgagtgctattggaatcagtgccatcgccaaaatggcggccccgacggcagaggcgttgtccaagacgtttaggataggacagaagcaggtctttatgccggcgtacaccatcacatttgttcgaccgaaaccgaaacagccatcaaattgggcgacattcaaagtcccgatgaaattcaacaagcttgacatgcgagactacctcctacacgcatacaaagtacccgtcgtcgccgtgcggtcccaagtgaaggcgcagcaattgcgacactccaacatcaccgggcggaaagagcgcaagccatctgtcaagaccatgaccgtcgagctgaaggaacccttcgtctggcccgaaccaccttccgagaaggacatggcgccctggacatcgcctgctgctaagttgcatgcgcgacagaccaaagaacagcacaaaatgagggtgaagctgtggaagaagggcactatgcctttgcgtgttcatcagaagaggtcgtctgaattcactaatctgcgtattgaagccaagagactgatgagagagggtggctgggataacaagaggacgattgaccccaagttcgttacgtccgagggcaaggagagacaagagcagagtaagaaagacaagaaggtcaagggcaaaaacactatgcctagggctagatggggaaggggcggggtgagagcggggatcattgagtaggctttgaagttcaactgtatatcaaaacagtcttcactcggctacggcggaaccagtaagaaatctctggtcattgctgagacggaaaagactcgactgtacgactaggcgccctccacggatggtggaatgtatatcatcacacatataacacagagtgtctgaaatttgggagagcatacgaatttctttctcaagaatcgccatcgtcttgttcactatccgtacgtgcatcagatatttcgatccaatgaagcctctgttgaaagagaagagtctcgactccccaactccaccaacctgcagtgagactccttgcaaatatctcaaggccttgataatggtgaggtagaacatgtccaaataagcccctcagattaggcttgcgtgaatgtacatccgggacggcaagtatcacctttggactgacaggcaatctgacgagactgcctttcctcctcgtaatcaaaagtcgctcccagggcttccgccacgcggattcgacgtcaaaaatgggtgccccagatgtcgtgattttcagccatatatactcccctataggttcgagcccccattgatcga

SEQ ID NO: 8136 - DNA, 870 bp, Muscodor strobelii
  misc_feature: SGI cDNA ID NO. 562491
  misc_feature: Encodes the peptide sequence at SEQ ID NO 8137
atggcaaccaaagcatctcccgaggagcccatcgaggtcctcttcgtccttcaagacaagttcaatctgatggactttgccggtcccctcgaggtccttgccagcgctctccacgacaaggacgacgagaataccaaagcattcgagtgcactgttgctgctgccgagcccaaggtgatttctgagcagggcatcattatcggctcccaaattgccttcaaggaggcccacgagcgcctcagcgacttcgatgtacttgttgttgttggcggtgactcggacggtgtcctgaaaggcaagaaggagcctcttcccctcatcaacgccttcgccgaactccagaagcaagattcatcccgcgagcgcacactcatgtccatctgcactggctccctcttccttgcagaggccggtatcctttctggtctctctgctacctgccaccccgactatatgaccaaattcgagaacctgtgcagccactctgcccagcgtgatcttcaggagagaaccgacgtgatcgaggatgcccgatacgtcgtcaacaacctgcgctttgaccttggtgatgaggacgagaatccctacatccgtcgcaagtctgacaatggcgatcgccgcccgtccaatgctcgcaaaggaagcatctcattcaacgcctccaatgctcgccgtgagtccattgcccgccgcgctgccatgcgcctcggtggtcttcgagtgattacaagtgggggagtgactgctggcctagatgctgctttgtatctggtcagcattctggtggacgacggcgctgccaacgaggtcgcccgcctcatgcagcatgagtgggtcaagggcactgttgttgatggtcttgatgtctag

SEQ ID NO: 8137 - protein, 289 aa, Muscodor strobelii
  misc_feature: SGI Peptide ID NO. 562491
  misc_feature (1)..(289): NCBI GI: 39951695 Blast Desc: MGG_01490 [Magnaporthe grisea 70-15] gi|145020666|gb|EDK04795.1| MGG_01490 [Magnaporthe grisea 70-15]
  misc_feature (1)..(289): NCBI GI: 261352362 Blast Desc: conserved [Verticillium albo-atrum VaMs.102]
  misc_feature (1)..(289): NCBI GI: 85108261 Blast Desc: NCU08330 [Neurospora crassa OR74A] gi|28924151|gb|EAA33307.1| conserved [Neurospora crassa OR74A]
  misc_feature (3)..(289): NCBI GI: 116196138 Blast Desc: CHGG_04667 [Chaetomium globosum CBS 148.51] gi|88180580|gb|EAQ88048.1| CHGG_04667 [Chaetomium globosum CBS 148.51]
  misc_feature (1)..(289): NCBI GI: 171690484 Blast Desc: protein product [Podospora anserina] gi|170945190|emb|CAP71301.1| protein product [Podospora anserina]
  misc_feature (3)..(289): NCBI GI: 256727000 Blast Desc: NECHADRAFT_58288 [Nectria haematococca mpVI 77-13-4]
  misc_feature (8)..(289): NCBI GI: 46136073 Blast Desc: FG09552.1 [Gibberella zeae PH-1]
  misc_feature (5)..(289): NCBI GI: 156044863 Blast Desc: SS1G_09620 [Sclerotinia sclerotiorum 1980] gi|154694015|gb|EDN93753.1| SS1G_09620 [Sclerotinia sclerotiorum 1980]
  misc_feature (5)..(289): NCBI GI: 154318778 Blast Desc: BC1G_02778 [Botryotinia fuckeliana B05.10] gi|150857908|gb|EDN33100.1| BC1G_02778 [Botryotinia fuckeliana B05.10]
  misc_feature (2)..(289): NCBI GI: 169595922 Blast Desc: SNOG_00708 [Phaeosphaeria nodorum SN15] gi|111071083|gb|EAT92203.1| SNOG_00708 [Phaeosphaeria nodorum SN15]
MATKASPEEPIEVLFVLQDKFNLMDFAGPLEVLASALHDKDDENTKAFECTVAAAEPKVISEQGIIIGSQIAFKEAHERLSDFDVLVVVGGDSDGVLKGKKEPLPLINAFAELQKQDSSRERTLMSICTGSLFLAEAGILSGLSATCHPDYMTKFENLCSHSAQRDLQERTDVIEDARYVVNNLRFDLGDEDENPYIRRKSDNGDRRPSNARKGSISFNASNARRESIARRAAMRLGGLRVITSGGVTAGLDAALYLVSILVDDGAANEVARLMQHEWVKGTVVDGLDV

SEQ ID NO: 8138 - DNA, 1644 bp, Muscodor strobelii
  misc_feature: SGI EST ID NO. CUFF.19917.0
  misc_feature: Variant of the nucleotide sequence at SEQ ID NO 8136
cgggaatcgaatggttatgcatggttacatacatccccctcatgagctgcctcctagtagccgtcaggccataggtcataaggtcagggtttacgcgtagagagacatgatgggagctgatcagccttcattcaacccctcgactacccctcgatttctgactcaattccttccatctctgccacctcacccttatattccccctccccctccctcctctctccccaacctgtcttcctgtcatcttcctttcagagaagccttccagaacctttcccaagccctcctcttatacccgcgacagagcaattgtcgtttgttcaatacttttcaagacctatctcgtctcaattggcaatcttgctccttcggttgtgctttggcctaacaacgtgaccttctgtacaaacaccatctccttggtacttaccccgccaagcattacttcagtcctcatctcacatcaattcacggtatatcatctgcaaccatggcaaccaaagcatctcccgaggagcccatcgaggtcctcttcgtccttcaagacaagttcaatctgatggactttgccggtcccctcgaggtccttgccagcgctctccacgacaaggacgacgagaataccaaagcattcgagtgcactgttgctgctgccgagcccaaggtgatttctgagcagggcatcattatcggctcccaaattgccttcaaggaggcccacgagcgcctcagcgacttcgatgtacttgttgttgttggcggtgactcggacggtgtcctgaaaggcaagaaggagcctcttcccctcatcaacgccttcgccgaactccagaagcaagattcatcccgcgagcgcacactcatgtccatctgcactggctccctcttccttgcagaggccggtatcctttctggtctctctgctacctgccaccccgactatatgaccaaattcgagaacctgtgcagccactctgcccagcgtgatcttcaggagagaaccgacgtgatcgaggatgcccgatacgtcgtcaacaacctgcgctttgaccttggtgatgaggacgagaatccctacatccgtcgcaagtctgacaatggcgatcgccgcccgtccaatgctcgcaaaggaagcatctcattcaacgcctccaatgctcgccgtgagtccattgcccgccgcgctgccatgcgcctcggtggtcttcgagtgattacaagtgggggagtgactgctggcctagatgctgctttgtatctggtcagcattctggtggacgacggcgctgccaacgaggtcgcccgcctcatgcagcatgagtgggtcaagggcactgttgttgatggtcttgatgtctagatctgatttcgcctagataatacatggtcactggggatcatgtttgcttgttgtacactagcattactccacatgagcgtcgtatagcgccggtgccagcaaccaggtcaagacggcgacctgctgagacgttattcagaaaagccaatgtaaaaaagtaaaaagctctactggagcatgtaaatcgtccacatttccttcccattggtgaggagtatctaaagtgtttgtttagcggattgtcatcgaccccatttaacaaacaagagctggttagctattcc

SEQ ID NO: 8139 - DNA, 2427 bp, Muscodor strobelii
  misc_feature: SGI cDNA ID NO. 562492
  misc_feature: Encodes the peptide sequence at SEQ ID NO 8140
atgtctcaagcaccgacagttaaagagctcactaaatctattgcgagctttgcccaagccccggttttacctctgcccgatgacttgatccagctcatcgacgatgtaataaatagatatgccgacaagtctgacgagaacatatctgaaagactgaacgatgagctgctgtccatattcaacagggacatcgtctccgatccctcccgccatgcagccttcctagccgtcttgcgccatctccgccccctcatcggcttgtcgacaaagatgctgcaatggtacgagctttttcttccgtcaatgaaccgcatacaccaggtcaaagacctggcgacagaggggcgagcatttatcctcgacatcatgacggcagagaacgctagcgacacaagctccttcacgggcggcgctgcagttcctctggctgagaagctgatgttgctgtggcttcaggaatgtgagctcttccagaaacaccctgagccccgtcgtgatttccaggagaaagaagtcagagagaccatgttgctctatggaaagaaacggcccaagaacgctttcgtcaatgtcacgtgctacaacgaaaatttctatacattgacgcttgagtcggagaagacggacttcggacgatggatcaagagcgaaccgtccgaagtggtagcggattgcatggccctgcgccagccatctgacgatttttccgacccgggattcctggatctagccaatgtgctcatttcagaaaaagatggactagttagtgatgagacgaacacggctcttcttgctaactcgatcaatgctggaacttctagttttagcctactccaagaggagatacatcgctcctcagactctgcgctttcagagttggtttctggtggtcgttcacagcctacagcaatacgatatccatctcccagtagcgtacgttcctccagcactagacgctccatgcatgaaagtgatagcccctcactaccccgtcaaatgcacacgtcgggctcgcagacacaactccaagaccttatcagttcaaacaaggctgttaaatccagcctgcatcaaactttgaccaatgatagtgtgccctctctatcattgagtcatcatgatcccaatccagaaaaagcgttctcttcgtctcatctcagcctacctgtaggcagtacacaggagctcaagagtggtgaattcggcgaagaccaacacctacagttacttcgctacgtctttctccttcataatgacctattgttcgagcggttcatgaagcagcagcatctaacccatatcggggaattgcgaaggcggtacgtccgagaggcagcgagtgaagctgaaactcaaaacctgattattgcgaatcgcaatctcaaacaaagactggaagaggcgaagaaggctgagttacaggccaaaatcgaggctgagaaaagccgcacgttgtctaagaaatgggaagctgatatattcaataagctaaaattgcttcgggaggaacagaagaaatggattgtcgaagggtcgactctacgcacagatctccagagcgctcgggaagaagctgaaaagcttcgcacacttgtctgtgatgtggaagtaagagagttgaaactcaagcagactatgcagtctgctgatatcaacttcagcgaattagagaggcttcgcactgaagttgaaagactaacacagtcggaacgagaccaccagtcgactgatgtcgagcgacaagcagccaatagcgaagccagtgaagcagacagccgagcaaaagaactcgagttgaagctcatagctcaagaattggatttcaagcagacctctacgtcatatcaggcccagattgtattgctcgaatccaaattgcgcgaggcgcagaagagtggagggcagcgaggcgctgatggcctacaaaggcaattggcaaatgccctggaagccaatcgagtttcgcagaatgagatgaaaggacgattaagcatgcttgtgtctaagaactcggctctacaagctaagatattccagatggagtccgagattccagtccgctctaaagcaatagcacgctcaccggcagaactcgatgatgacatttcatcggaatcggacagccatgccatcaggatccgtaggcagcgaggcttttccgaccccgagattttcgaggcgctctcttataatgctacgcctcccctcgatatatttgagaaagaccaatcagcaagttctcaaggtcggccatctacaccacaacaggctggcgaagacaccccgacgtcgaaggaaagtccaacaaccgagcggtactttggcaggggaggattacaaaacaaccgcgcgggcaagaaggagaaaaaggaggagaaagagaagaagaaatccacaggcttacgtggtattcgtggatttgtatag

SEQ ID NO: 8140 - protein, 808 aa, Muscodor strobelii
  misc_feature: SGI Peptide ID NO. 562492
  misc_feature (188)..(808): NCBI GI: 46136071 Blast Desc: FG09551.1 [Gibberella zeae PH-1]
  misc_feature (188)..(808): NCBI GI: 256727577 Blast Desc: NECHADRAFT_91109 [Nectria haematococca mpVI 77-13-4]
  misc_feature (166)..(808): NCBI GI: 39951693 Blast Desc: MGG_01489 [Magnaporthe grisea 70-15] gi|145020667|gb|EDK04796.1| MGG_01489 [Magnaporthe grisea 70-15]
  misc_feature (188)..(808): NCBI GI: 171690482 Blast Desc: protein product [Podospora anserina] gi|170945189|emb|CAP71300.1| protein product [Podospora anserina]
  misc_feature (197)..(808): NCBI GI: 116196136 Blast Desc: CHGG_04666 [Chaetomium globosum CBS 148.51] gi|88180579|gb|EAQ88047.1| CHGG_04666 [Chaetomium globosum CBS 148.51]
  misc_feature (188)..(674): NCBI GI: 156032940 Blast Desc: SS1G_13876 [Sclerotinia sclerotiorum 1980] gi|154699278|gb|EDN99016.1| SS1G_13876 [Sclerotinia sclerotiorum 1980]
  misc_feature (197)..(808): NCBI GI: 164423513 Blast Desc: NCU08331 [Neurospora crassa OR74A] gi|157070126|gb|EAA33308.2| [Neurospora crassa OR74A]
  misc_feature (197)..(481): NCBI GI: 261352363 Blast Desc: conserved [Verticillium albo-atrum VaMs.102]
  misc_feature (271)..(597): NCBI GI: 154294477 Blast Desc: BC1G_13841 [Botryotinia fuckeliana B05.10] gi|150844681|gb|EDN19874.1| BC1G_13841 [Botryotinia fuckeliana B05.10]
  misc_feature (165)..(684): NCBI GI: 189205603 Blast Desc: conserved [Pyrenophora tritici-repentis Pt-1C-BFP] gi|187975229|gb|EDU41855.1| conserved [Pyrenophora tritici-repentis Pt-1C-BFP]
MSQAPTVKELTKSIASFAQAPVLPLPDDLIQLIDDVINRYADKSDENISERLNDELLSIFNRDIVSDPSRHAAFLAVLRHLRPLIGLSTKMLQWYELFLPSMNRIHQVKDLATEGRAFILDIMTAENASDTSSFTGGAAVPLAEKLMLLWLQECELFQKHPEPRRDFQEKEVRETMLLYGKKRPKNAFVNVTCYNENFYTLTLESEKTDFGRWIKSEPSEVVADCMALRQPSDDFSDPGFLDLANVLISEKDGLVSDETNTALLANSINAGTSSFSLLQEEIHRSSDSALSELVSGGRSQPTAIRYPSPSSVRSSSTRRSMHESDSPSLPRQMHTSGSQTQLQDLISSNKAVKSSLHQTLTNDSVPSLSLSHHDPNPEKAFSSSHLSLPVGSTQELKSGEFGEDQHLQLLRYVFLLHNDLLFERFMKQQHLTHIGELRRRYVREAASEAETQNLIIANRNLKQRLEEAKKAELQAKIEAEKSRTLSKKWEADIFNKLKLLREEQKKWIVEGSTLRTDLQSAREEAEKLRTLVCDVEVRELKLKQTMQSADINFSELERLRTEVERLTQSERDHQSTDVERQAANSEASEADSRAKELELKLIAQELDFKQTSTSYQAQIVLLESKLREAQKSGGQRGADGLQRQLANALEANRVSQNEMKGRLSMLVSKNSALQAKIFQMESEIPVRSKAIARSPAELDDDISSESDSHAIRIRRQRGFSDPEIFEALSYNATPPLDIFEKDQSASSQGRPSTPQQAGEDTPTSKESPTTERYFGRGGLQNNRAGKKEKKEEKEKKKSTGLRGIRGFV

SEQ ID NO: 8141 - DNA, 3773 bp, Muscodor strobelii
  misc_feature: SGI EST ID NO. CUFF.19922.0
  misc_feature: Variant of the nucleotide sequence at SEQ ID NO 8139
cctgtattctccaaacatcacgagacacagaacgatgacagcattttgttagttacagatggcaactgttgagaaattccagcctcgtttctatctcagccttcgcatatagtggcagcgctcggtgcccaacgtcctcccctccaggctcatcatgtctcaagcaccgacagttaaagagctcactaaatctattgcgagctttgcccaagccccggttttacctctgcccgatgacttgatccagctcatcgacgatgtaataaatagatatgccgacaagtctgacgagaacatatctgaaagactgaacgatgagctgctgtccatattcaacagggacatcgtctccgatccctcccgccatgcagccttcctagccgtcttgcgccatctccgccccctcatcggcttgtcgacaaagatgctgcaatggtacgagctttttcttccgtcaatgaaccgcatacaccaggtcaaagacctggcgacagaggggcgagcatttatcctcgacatcatgacggcagagaacgctagcgacacaagctccttcacgggcggcgctgcagttcctctggctgagaagctgatgttgctgtggcttcaggaatgtgagctcttccagaaacaccctgagccccgtcgtgatttccaggagaaagaagtcagagagaccatgttgctctatggaaagaaacggcccaaggtttgtttgctacgactcacccagaagatatccttctgctaacacccttgcgggatttcatgatgctcatagacagatttgtctgtaagagggagcaccgcggaagtgcactactgttattatcggctttcatacaaagtcaaccaccacatctttatctcatacttcagactccgcttttcggcaatctacttacttgccttcaacgagacacatctacaaccatcgtgtccttggccttaacggctctgactatggtacttccacatgtaccaagctcactagttcctcacttgccattgctatttaatatatatgcaaggctcttgttttgggaacgggagctttcaaatctcaccgccgaggcagacaaagaacgaagactctctccaaatgctttagcatgggaaaagtctcctttctcaccagaaactgatctcacgaccattccacagcttcttaattattttacgatcttgtatggcctatatccgatcaatttcgcggactacattcggaagccacaaaggtacctgaggcatgcggacgtcccagacgcagaggaaatcgaggtacagccaactgagatacggcatgcttcagaacgctttcgtcaatgtcacgtgctacaacgaaaatttctatacattgacgcttgagtcggagaagacggacttcggacgatggatcaagagcgaaccgtccgaagtggtagcggattgcatggccctgcgccagccatctgacgatttttccgacccgggattcctggatctagccaatgtgctcatttcagaaaaagatggactagttagtgatgagacgaacacggctcttcttgctaactcgatcaatgctggaacttctagttttagcctactccaagaggagatacatcgctcctcagactctgcgctttcagagttggtttctggtggtcgttcacagcctacagcaatacgatatccatctcccagtagcgtacgttcctccagcactagacgctccatgcatgaaagtgatagcccctcactaccccgtcaaatgcacacgtcgggctcgcagacacaactccaagaccttatcagttcaaacaaggctgttaaatccagcctgcatcaaactttgaccaatgatagtgtgccctctctatcattgagtcatcatgatcccaatccagaaaaagcgttctcttcgtctcatctcagcctacctgtaggcagtacacaggagctcaagagtggtgaattcggcgaagaccaacacctacagttacttcgctacgtctttctccttcataatgacctattgttcgagcggttcatgaagcagcagcatctaacccatatcggggaattgcgaaggcggtacgtccgagaggcagcgagtgaagctgaaactcaaaacctgattattgcgaatcgcaatctcaaacaaagactggaagaggcgaagaaggctgagttacaggccaaaatcgaggctgagaaaagccgcacgttgtctaagaaatgggaagctgatatattcaataagctaaaattgcttcgggaggaacagaagaaatggattgtcgaagggtcgactctacgcacagatctccagagcgctcgggaagaagctgaaaagcttcgcacacttgtctgtgatgtggaagtaagagagttgaaactcaagcagactatgcagtctgctgatatcaacttcagcgaattagagaggcttcgcactgaagttgaaagactaacacagtcggaacgagaccaccagtcgactgatgtcgagcgacaagcagccaatagcgaagccagtgaagcagacagccgagcaaaagaactcgagttgaagctcatagctcaagaattggatttcaagcagacctctacgtcatatcaggcccagattgtattgctcgaatccaaattgcgcgaggcgcagaagagtggagggcagcgaggcgctgatggcctacaaaggcaattggcaaatgccctggaagccaatcgagtttcgcagaatgagatgaaaggacgattaagcatgcttgtgtctaagaactcggctctacaagctaagatattccagatggagtccgagattccagtccgctctaaagcaatagcacgctcaccggcagaactcgatgatgacatttcatcggaatcggacagccatgccatcaggatccgtaggcagcgaggcttttccgaccccgagattttcgaggcgctctcttataatgctacgcctcccctcgatatatttgagaaagaccaatcagcaagttctcaaggtcggccatctacaccacaacaggctggcgaagacaccccgacgtcgaaggaaagtccaacaaccgagcggtactttggcaggggaggattacaaaacaaccgcgcgggcaagaaggagaaaaaggaggagaaagagaagaagaaatccacaggcttacgtggtattcgtggatttgtatagtgattcgccaacaatatactctgaaatcagtagctcccataataagagccctcaaaacaatccacaatatatcaagcgcaggacaggccacggtaatgttgagatcagcgtaccagagcagatagcattcctcagcgactctttgacttttgggggataatagatgcatagacaaccataaaaggcgttgagcatccagagatgcttcaaaatgtttgttaaatcttgcctacgatcaccccactccctcctagaatgattattctggacgtctcaaatattcgtaaatattccttggctccgtcaagctcagagacccgttcctaagagggcacccgtacagcctatccgccatgtctttccggatagtgtcaaggtcgtgacttccgtttcaaaatctctcagctagctttgcagtcatttgtgtctcttttcttcttgcaaatgcggcgcagcagggaatgcgccaccaaattgctcattgttcagtctgctaccatccattcgggaaagaattctacgaaatctgtgaagttgaaaaagtaatattatttgtatcttaccaactgtatacgagaagagggtcgga

SEQ ID NO: 8142 - DNA, 1371 bp, Muscodor strobelii
  misc_feature: SGI cDNA ID NO. 562493
  misc_feature: Reduced expression when VOC is produced
  misc_feature: Encodes the peptide sequence at SEQ ID NO 8143
atgcattccagcgctttgctacttgcgctcgcttccgtggcttcggccaagcttggctttaactacggctctacattcaccacgggagctgctaaacaacagtcagattttgaggatgagttcaccactgctgccaacttgaagggtgcgaaggggttcactagtgctcgtctctataccatggttcaagccggttccgcctctgaccctatctctgctattcctgccgccatcaatacaggaacgacacttctcttgggcttgtgggcttcaggcggcgatgagtcttttgcgaacgagattactgcgctgaaagcggctatcgaaaaatacggagatgattttgcgagcattgtggacggtatctcgatcggtagcgaggatctctaccgtaactcgccacaaggaatcgcagctggctcgaacgttggtgcggatcccgacactatagttaagtacatcaaggaagttaggagcgttattgaaggtacaagccttgcaaacgcccctctaggtcacgtcgacacttggacggcttgggaaaacggtaccaatagcattgttgttgatgaactcgactggcttggcatggatgcttacccctatttccaagacacgatggcgaatggcatccaactcagcaagtctcttttcgatgctgctctcgacacaacgaaggcagctgcaaagggaaaatccgtttgggtgaccgagactggatatcctgtcagcggtgacaaatctggagacgctactccttccatcgcgaacgctaagacatactggcaagaagttggttgcccgatgtttggcaacaccaacacatggtggtacaccctaaaagatgctcagcccgacactcccaaccctagtttcggtctaatcaacaacgaatccacaacacctctctacgatctcagctgcgatgatgttgctgtttcgtcttctacgtcttccgcctcctcgccgagcaaggctgcctctaccactaagcccacgtctactaagaacacctctgctgacgagactgcttcgactgatgagcctagctctacaggcaaggggtctggcaccggggcttccagcacaggcatcgagacgtccgaagtctctggtagcgagactaccgcagctgcaaccacgacgtctggtattttgagccccagctcttcgggtgcctcgcagacaaccagctctggtggcgaatccggctccggctctagctccggtgtcggtagtagcgtaagctcaggcgaaacctcgagcacgccctccaatacttctgtgccagaaggctctgccaataacgtccagtccggaggtctcgctgctgctttcattgccatcatggctgccatcattgctctatga

SEQ ID NO: 8143 - protein, 456 aa, Muscodor strobelii
  misc_feature: SGI Peptide ID NO. 562493
  misc_feature (1)..(330): NCBI GI: 85106636 Blast Desc: NCU06381 [Neurospora crassa OR74A] gi|28923819|gb|EAA32983.1| NCU06381 [Neurospora crassa OR74A]
  misc_feature (19)..(306): NCBI GI: 159128517 Blast Desc: GPI-anchored cell wall beta-1,3-endoglucanase EglC [Aspergillus fumigatus A1163]
  misc_feature (19)..(306): NCBI GI: 70985687 Blast Desc: GPI-anchored cell wall beta-1,3-endoglucanase EglC [Aspergillus fumigatus Af293] gi|66845978|gb|EAL86311.1| GPI-anchored cell wall beta-1,3-endoglucanase EglC [Aspergillus
  misc_feature (2)..(310): NCBI GI: 169764309 Blast Desc: [Aspergillus oryzae RIB40] gi|83764480|dbj|BAE54624.1| protein product [Aspergillus oryzae]
  misc_feature (19)..(306): NCBI GI: 119473515 Blast Desc: GPI-anchored cell wall beta-1,3-endoglucanase EglC [Neosartorya fischeri NRRL 181] gi|119406786|gb|EAW16736.1| GPI-anchored cell wall beta-1,3-endoglucanase EglC [Neosartorya
  misc_feature (4)..(309): NCBI GI: 261352365 Blast Desc: glucan 1,3-beta-glucosidase [Verticillium albo-atrum VaMs.102]
  misc_feature (4)..(310): NCBI GI: 145235523 Blast Desc: An03g05290 [Aspergillus niger] gi|134058095|emb|CAK49181.1| protein product [Aspergillus niger]
  misc_feature (19)..(306): NCBI GI: 121712487 Blast Desc: GPI-anchored cell wall beta-1,3-endoglucanase EglC [Aspergillus clavatus NRRL 1] gi|119402007|gb|EAW12429.1| GPI-anchored cell wall beta-1,3-endoglucanase EglC [Aspergillus
  misc_feature (2)..(308): NCBI GI: 256720715 Blast Desc: NECHADRAFT_106419 [Nectria haematococca mpVI 77-13-4]
  misc_feature (1)..(311): NCBI GI: 226505096 Blast Desc: LOC100274291 [Zea mays] gi|194707254|gb|ACF87711.1| [Zea mays]
  misc_feature (19)..(269): SWISSPROT Homolog: EC 3.2.1.58 Glucan 1,3-beta-glucosidase
  misc_feature: Useful for introducing or modulating the production of volatile compounds
MHSSALLLALASVASAKLGFNYGSTFTTGAAKQQSDFEDEFTTAANLKGAKGFTSARLYTMVQAGSASDPISAIPAAINTGTTLLLGLWASGGDESFANEITALKAAIEKYGDDFASIVDGISIGSEDLYRNSPQGIAAGSNVGADPDTIVKYIKEVRSVIEGTSLANAPLGHVDTWTAWENGTNSIVVDELDWLGMDAYPYFQDTMANGIQLSKSLFDAALDTTKAAAKGKSVWVTETGYPVSGDKSGDATPSIANAKTYWQEVGCPMFGNTNTWWYTLKDAQPDTPNPSFGLINNESTTPLYDLSCDDVAVSSSTSSASSPSKAASTTKPTSTKNTSADETASTDEPSSTGKGSGTGASSTGIETSEVSGSETTAAATTTSGILSPSSSGASQTTSSGGESGSGSSSGVGSSVSSGETSSTPSNTSVPEGSANNVQSGGLAAAFIAIMAAIIAL

SEQ ID NO: 8144 - DNA, 2270 bp, Muscodor strobelii
  misc_feature: SGI EST ID NO. CUFF.19937.0
  misc_feature: Variant of the nucleotide sequence at SEQ ID NO 8142
cttggaggctgccgagtcatcctgttgggggaaactgtggaatcctcaggtttaagtagcattcgtcaaggccttctcgcgctcttcgttgatgcttcgtccatctacctacctagattgcctcgcgacagcaagacaataccttcacatcaccacgttcgttcttggctgtgatttacattcgttcatcgttttctacttgcactgtatattcattgaataagttcgtttaatatattgtctcattgtccacctacggtgcttgtattcccaacacttatacaccatcaacgtgacttggatcttaaccgtcctattgaatttggctgatcaacctcgctgatcactggttgcttccatatagaacaacctagattttctctagtttgcctctacgataagctcaacatatcaaatatgcattccagcgctttgctacttgcgctcgcttccgtggcttcggccaagcttggctttaactacggctctacattcaccacgggagctgctaaacaacagtcagattttgaggatgagttcaccactgctgccaacttgaagggtgcgaaggggttcactagtgctcgtctctataccatggttcaagccggttccgcctctgaccctatctctgctattcctgccgccatcaatacaggaacgacacttctcttgggcttgtgggcttcaggcggcgatgagtcttttgcgaacgagattactgcgctgaaagcggctatcgaaaaatacggagatgattttgcgagcattgtggacggtatctcgatcggtagcgaggatctctaccgtaactcgccacaaggaatcgcagctggctcgaacgttggtgcggatcccgacactatagttaagtacatcaaggaagttaggagcgttattgaaggtacaagccttgcaaacgcccctctaggtcacgtcgacacttggacggcttgggaaaacggtaccaatagcattgttgttgatgaactcgactggcttggcatggatgcttacccctatttccaagacacgatggcgaatggcatccaactcagcaagtctcttttcgatgctgctctcgacacaacgaaggcagctgcaaagggaaaatccgtttgggtgaccgagactggatatcctgtcagcggtgacaaatctggagacgctactccttccatcgcgaacgctaagacatactggcaagaagttggttgcccgatgtttggcaacaccaacacatggtggtacaccctaaaagatgctcagcccgacactcccaaccctagtttcggtctaatcaacaacgaatccacaacacctctctacgatctcagctgcgatgatgttgctgtttcgtcttctacgtcttccgcctcctcgccgagcaaggctgcctctaccactaagcccacgtctactaagaacacctctgctgacgagactgcttcgactgatgagcctagctctacaggcaaggggtctggcaccggggcttccagcacaggcatcgagacgtccgaagtctctggtagcgagactaccgcagctgcaaccacgacgtctggtattttgagccccagctcttcgggtgcctcgcagacaaccagctctggtggcgaatccggctccggctctagctccggtgtcggtagtagcgtaagctcaggcgaaacctcgagcacgccctccaatacttctgtgccagaaggctctgccaataacgtccagtccggaggtctcgctgctgctttcattgccatcatggctgccatcattgctctatgaaaacatcatatgttgtatgggtgtcatataatggaaatggcagtactaaaagcgttatgaattttaatgaatcagcatggaatacgacaatgcaatttagaggtggatcttttacaaaagacatagttcttggtcaaatttcacgatgagggaaatgattgataattactacctgatctggtcataatacacgaattcaactttataagtacccctaggacgtgaacaagcgtctatatcgatcacagaaactggagttaggctgaccatgacgacgaacatgacgtcgttatagtatatatatactgtattggctaggcgtatcagctcgttcaaggtacaccgtcattcgatttggaactcgcagggtggtaagtactaggagcaggcagacatttagcactaaatgacatcggtcagtcgcagcttgcaaacccgtaggtatgccgtcgaaaggtgcctgaaaatatattaccctcact

SEQ ID NO: 8145 - DNA, 981 bp, Muscodor strobelii
  misc_feature: SGI cDNA ID NO. 562494
  misc_feature: Encodes the peptide sequence at SEQ ID NO 8146
atgagtgccaaaacaaggttcttgatcatttcagatacacatggtgatgtatttgatgtcaaagcggtcccaaaagccgacgttatcatacattgtggagatctcactgacggttccaagcttagtgagcatcgtcgcacgatagagcttcttaaagagctcgtttcaccactcaaattagtgattgctggcaaccacgattttactcttgacacgtcggtgttccagaaaatgatcgatgaagccccaaccaccctagagcccgagcttgtcgacaaaacctatgggcgccagaatgaggccagacagctttacgatgagacacccgatatcacatttctcgatgaaggtactcatagattcacgctcgctaacaacgcaacgttaacagtctatgcgagcccctttacttcctcgacaacctgcgatggcgcctatcagtacgctccttggacagatcacgacttttttatagatgaaaatatcgacgttgtggttacgcatggtccaccgcaaggtataatggacaggacggattctaaagaacgggcaggttgtcctgaactcttcacagctatatgcaaggctcgaccgagacttcactgcttcgggcacattcacgagagctggggggcaaaattagttgcctggcgagctcgaattccagaaaaaccttcccattttaacgccatcgataacagccgctctaccgtcatcgacaagcttaccaacctcaccccaacgaagttcgatgatgtagaagccaaagctcaaaaatgtcaagtagcagagaccttggtacgtcaagggtatcgagagacgagccactgccatggggacgagtaccaactcgaggaagggatacatacgctattcatcaatgcctcgattgagggcgctacggaggagctcccaatgcagcctccttggcttgttgacatagatttgcccttaaatgcccagtgtaacgaagggaagtga

SEQ ID NO: 8146 - protein, 326 aa, Muscodor strobelii
  misc_feature: SGI Peptide ID NO. 562494
  misc_feature (5)..(209): Pfam Id: PF00149 Pfam Desc: Calcineurin-like phosphoesterase
  misc_feature (2)..(317): NCBI GI: 85104244 Blast Desc: NCU01093 [Neurospora crassa OR74A] gi|18376234|emb|CAD21349.1| conserved [Neurospora crassa] gi|28923253|gb|EAA32469.1| conserved [Neurospora crassa OR74A]
  misc_feature (4)..(316): NCBI GI: 256729796 Blast Desc: NECHADRAFT_46630 [Nectria haematococca mpVI 77-13-4]
  misc_feature (2)..(316): NCBI GI: 256720909 Blast Desc: NECHADRAFT_85675 [Nectria haematococca mpVI 77-13-4]
  misc_feature (4)..(320): NCBI GI: 255935425 Blast Desc: Pc13g03010 [Penicillium chrysogenum Wisconsin 54-1255] gi|211583359|emb|CAP91370.1| Pc13g03010 [Penicillium chrysogenum Wisconsin 54-1255]
  misc_feature (2)..(316): NCBI GI: 238481923 Blast Desc: metallophosphoesterase domain-containing protein, [Aspergillus flavus NRRL3357] gi|220700250|gb|EED56588.1| metallophosphoesterase domain-containing protein, [Aspergillus
  misc_feature (4)..(317): NCBI GI: 226279540 Blast Desc: ser/Thr protein phosphatase family protein [Paracoccidioides brasiliensis Pb01]
  misc_feature (2)..(316): NCBI GI: 169765388 Blast Desc: [Aspergillus oryzae RIB40] gi|83765020|dbj|BAE55163.1| protein product [Aspergillus oryzae]
  misc_feature (4)..(317): NCBI GI: 226287633 Blast Desc: ser/Thr protein phosphatase family protein [Paracoccidioides brasiliensis Pb18]
  misc_feature (4)..(317): NCBI GI: 255956851 Blast Desc: Pc21g22070 [Penicillium chrysogenum Wisconsin 54-1255] gi|211590889|emb|CAP97104.1| Pc21g22070 [Penicillium chrysogenum Wisconsin 54-1255]
  misc_feature (4)..(317): NCBI GI: 225558057 Blast Desc: serine/threonine phosphatase [Ajellomyces capsulatus G186AR]
MSAKTRFLIISDTHGDVFDVKAVPKADVIIHCGDLTDGSKLSEHRRTIELLKELVSPLKLVIAGNHDFTLDTSVFQKMIDEAPTTLEPELVDKTYGRQNEARQLYDETPDITFLDEGTHRFTLANNATLTVYASPFTSSTTCDGAYQYAPWTDHDFFIDENIDVVVTHGPPQGIMDRTDSKERAGCPELFTAICKARPRLHCFGHIHESWGAKLVAWRARIPEKPSHFNAIDNSRSTVIDKLTNLTPTKFDDVEAKAQKCQVAETLVRQGYRETSHCHGDEYQLEEGIHTLFINASIEGATEELPMQPPWLVDIDLPLNAQCNEGK

SEQ ID NO: 8147 - DNA, 1593 bp, Muscodor strobelii
  misc_feature: SGI cDNA ID NO. 562495
  misc_feature: Encodes the peptide sequence at SEQ ID NO 8148
atggttctaaccaagcagagcgtacatcgtaatcctgacgaatttcctactcttcagctcttcttgctagccatcgttcggcttgccgagcccatcgctctcacctccatcttcccctacgcctggtctttagttcgcaatttccagatcggcagcgaacaagatgcctcgttctacgccggcatcctcatctccgccttttccctcacggaggccctgatgggcatgttctggggagggctctccgatagaatcggtcgaaaaccggtcttgataatgggctgcgtcggtacaatgttgagtatgctggtcgtcggtttcgcctccaatttctgggttgcactagctggtcgtgcttttggtggtttactcaacggcaatatcggtgtcatacagaccatggttggcgagcttgtcactaagcccgagttcgagcctcgtgcgtacagcgttatgccatttgtttggagcattgggacaatcattggacctgcaattggcggcattttcgctgatcctgcggtggctttccctggtttcttctcggaatccagtttgttcgtcgtatatccctaccttcttccaaatatgctgtgcgccggactcttgctcatgagcatcatattgggatactttttgttggaggaaacacatcccgacctgcagccacacgttctgttgcctgacaacgtctacagctccgatgaaacgccattgctggaaacttcagatgcccttaagcaaccggctgtggacttgcggtccgagagctatggcacgttcgggagcagaagaagcgtagaatttgcttcagagatgagggaccgcaaattttccgagaagacaccagaaagtatcttcacaaaacgcatcgtggctctgatcgtgtcgctgtccttgttcacttaccattcgatgacatacgatcatctcatgcccattttctttgaagataaacggtcatcctttggtgcgatgcttactaccgagtttgaaatgagctttaacccattctatttacctggtggccttggtctctctatgcaggctgttggtgtcattcttgccgtcaacggagcaatcgcgctcttcgttcaaatcatcgtcttccctattgttgccgagaaaattggtgttttcaggttattcctgattgtaaccactctgcatcctatcgcctacatgatcgtccccagcttgatctacgtaccggagtccgttctataccctgcaatctacctatgtttgacgatccgaaatctattatccatcattctgtacccgttgttgctcattcttatcaaggaggcaactccgagctccgctgttctagggaaggtgaacggcctcgccgctagcgcaggggctgcttgtcgcatggtcgccccgcctgttgccggatacctatattcttttggctcacaaatttcctgcacaggcattgcttggtatggcagcgctttcgttgcggtcatcggagcgatacaatgcttccaggttcctcggaataaacgacaggataacagaaactccggcaagggcttgtcatctacaacgatttacgaaactctagatgaggaagagacggcatag

SEQ ID NO: 8148 - protein, 530 aa, Muscodor strobelii
  misc_feature: SGI Peptide ID NO. 562495
  misc_feature (23)..(463): Pfam Id: PF07690 Pfam Desc: Major Facilitator Superfamily
  misc_feature (23)..(172): Pfam Id: PF07690 Pfam Desc: Major Facilitator Superfamily
  misc_feature (322)..(463): Pfam Id: PF07690 Pfam Desc: Major Facilitator Superfamily
  misc_feature (1)..(530): NCBI GI: 85107456 Blast Desc: NCU06341 [Neurospora crassa OR74A] gi|28923980|gb|EAA33139.1| conserved [Neurospora crassa OR74A]
  misc_feature (5)..(502): NCBI GI: 171683285 Blast Desc: protein product [Podospora anserina] gi|170941602|emb|CAP67256.1| protein product [Podospora anserina]
  misc_feature (1)..(502): NCBI GI: 145603260 Blast Desc: MGG_13192 [Magnaporthe grisea 70-15] gi|145011525|gb|EDJ96181.1| MGG_13192 [Magnaporthe grisea 70-15]
  misc_feature (24)..(506): NCBI GI: 156045175 Blast Desc: SS1G_09776 [Sclerotinia sclerotiorum 1980] gi|154694171|gb|EDN93909.1| SS1G_09776 [Sclerotinia sclerotiorum 1980]
  misc_feature (10)..(507): NCBI GI: 256727550 Blast Desc: [Nectria haematococca mpVI 77-13-4]
  misc_feature (10)..(515): NCBI GI: 46136577 Blast Desc: FG09804.1 [Gibberella zeae PH-1]
  misc_feature (12)..(505): NCBI GI: 261192188 Blast Desc: MFS transporter [Ajellomyces dermatitidis SLH14081] gi|239589376|gb|EEQ72019.1| MFS transporter [Ajellomyces dermatitidis SLH14081] gi|239615093|gb|EEQ92080.1| MFS ER-3]
  misc_feature (13)..(505): NCBI GI: 258575911 Blast Desc: conserved [Uncinocarpus reesii 1704] gi|237902403|gb|EEP76804.1| conserved [Uncinocarpus reesii 1704]
  misc_feature (1)..(504): NCBI GI: 242794949 Blast Desc: MFS transporter, [Talaromyces stipitatus ATCC 10500] gi|218719068|gb|EED18488.1| MFS transporter, [Talaromyces stipitatus ATCC 10500]
  misc_feature (1)..(504): NCBI GI: 212536134 Blast Desc: MFS transporter, [Penicillium marneffei ATCC 18224] gi|210070622|gb|EEA24712.1| MFS transporter, [Penicillium marneffei ATCC 18224]
MVLTKQSVHRNPDEFPTLQLFLLAIVRLAEPIALTSIFPYAWSLVRNFQIGSEQDASFYAGILISAFSLTEALMGMFWGGLSDRIGRKPVLIMGCVGTMLSMLVVGFASNFWVALAGRAFGGLLNGNIGVIQTMVGELVTKPEFEPRAYSVMPFVWSIGTIIGPAIGGIFADPAVAFPGFFSESSLFVVYPYLLPNMLCAGLLLMSIILGYFLLEETHPDLQPHVLLPDNVYSSDETPLLETSDALKQPAVDLRSESYGTFGSRRSVEFASEMRDRKFSEKTPESIFTKRIVALIVSLSLFTYHSMTYDHLMPIFFEDKRSSFGAMLTTEFEMSFNPFYLPGGLGLSMQAVGVILAVNGAIALFVQIIVFPIVAEKIGVFRLFLIVTTLHPIAYMIVPSLIYVPESVLYPAIYLCLTIRNLLSIILYPLLLILIKEATPSSAVLGKVNGLAASAGAACRMVAPPVAGYLYSFGSQISCTGIAWYGSAFVAVIGAIQCFQVPRNKRQDNRNSGKGLSSTTIYETLDEEETA

SEQ ID NO: 8149 - DNA, 2351 bp, Muscodor strobelii
  misc_feature: SGI EST ID NO. CUFF.20184.1
  misc_feature: Variant of the nucleotide sequence at SEQ ID NO 8147
aatacatgtacgtagggaaatctccgccgaggtatgtcctagaaaccagaggttctcggcattaattagacccaagggtgcttggtattagaaaagttgagttccgtagatcgtcctatgtcctatttgaatcacgcactaccctccgcccgctacttttgtccggagcaaaccttctgattcttcaccgaagtcctctgaataattattcccaaagacacatgatcctctactgccacgctcgtgtcttatacttgctgcagtcaggtccaaaccatacagcctcatctctcagatatctgccatcataggacgtcggcaaagaagaccaccacgtctcatccgacacagcaacagccgagtcacacgcgcaagtgttgtgtccgctcgttagcgtacatcgtaatcctgacgaatttcctactcttcagctcttcttgctagccatcgttcggcttgccgagcccatcgctctcacctccatcttcccctacgcctggtctttagttcgcaatttccagatcggcagcgaacaagatgcctcgttctacgccggcatcctcatctccgccttttccctcacggaggccctgatgggcatgttctggggagggctctccgatagaatcggtcgaaaaccggtcttgataatgggctgcgtcggtacaatgttgagtatgctggtcgtcggtttcgcctccaatttctgggttgcactagctggtcgtgcttttggtggtttactcaacggcaatatcggtgtcatacagaccatggttggcgagcttgtcactaagcccgagttcgagcctcgtgcgtacagcgttatgccatttgtttggagcattgggacaatcattggacctgcaattggcggcattttcgctgatcctgcggtggctttccctggtttcttctcggaatccagtttgttcgtcgtatatccctaccttcttccaaatatgctgtgcgccggactcttgctcatgagcatcatattgggatactttttgttggaggaaacacatcccgacctgcagccacacgttctgttgcctgacaacgtctacagctccgatgaaacgccattgctggaaacttcagatgcccttaagcaaccggctgtggacttgcggtccgagagctatggcacgttcgggagcagaagaagcgtagaatttgcttcagagatgagggaccgcaaattttccgagaagacaccagaaagtatcttcacaaaacgcatcgtggctctgatcgtgtcgctgtccttgttcacttaccattcgatgacatacgatcatctcatgcccattttctttgaagataaacggtcatcctttggtgcgatgcttactaccgagtttgaaatgagctttaacccattctatttacctggtggccttggtctctctatgcaggctgttggtgtcattcttgccgtcaacggagcaatcgcgctcttcgttcaaatcatcgtcttccctattgttgccgagaaaattggtgttttcaggttattcctgattgtaaccactctgcatcctatcgcctacatgatcgtccccagcttgatctacgtaccggagtccgttctataccctgcaatctacctatgtttgacgatccgaaatctattatccatcattctgtacccgttgttgctcattcttatcaaggaggcaactccgagctccgctgttctagggaaggtgaacggcctcgccgctagcgcaggggctgcttgtcgcatggtcgccccgcctgttgccggatacctatattcttttggctcacaaatttcctgcacaggcattgcttggtatggcagcgctttcgttgcggtcatcggagcgatacaatgcttccaggttcctcggaataaacgacaggataacagaaactccggcaagggcttgtcatctacaacgatttacgaaactctagatgaggaagagacggcataggaacggtactttcaatttttcgcctactttgcgtaatgggctggcaaccgttgggttgctctaatgatacatgatagacgtcacggaaaagtcgcgatggatcataccggcgttttatggaaggattgcgagtcaccacgcaataccaaggagtttttgataaaggccctgggatccgggccgttcatgataacgcactacgatgattcccccaaaatagacggcgctggtgttgatagtctggattgctgcttcaaattttataggcaataaggtagagtcgcaagaagatatgcgtgctgatggaattttatgtgcatagaaatagaagatgacgtagacggatataatggcagaattatagagacttccatccatttctcc

SEQ ID NO: 8150 - DNA, 981 bp, Muscodor strobelii
  misc_feature: SGI cDNA ID NO. 562496
  misc_feature: Reduced expression when VOC is produced
  misc_feature: Encodes the peptide sequence at SEQ ID NO 8151
atggcttccgcttccatccccgccaacggagagtctgtcgcccgaggcgagtctccttcgccgtcgccgtcgcgctccgcgtccatctcgttgcaggccgctgccactatgaacgccggtctacagcacgaacctagtcgtcgcacttccaacagctcgctgtctcgccagcgacagtcccctcaggctggtcgacgaagatcgaccgttctcatgaatctccagctcaacgacccttccctgccagctccgggcgagatggtcaccgaaggctccaatccccaccgaactctgactccccaatccatgtccggctctcctatcctgggcgagcctcgacgcgatagagccccgagcttgggtgagctacaccaagagctcgaggctgagcaagaagcacaagtgaaccgcttgctgcaaatgattcgatctcaacaagtccaactgcagcagctacaggctgcccaaggccaatctcagtccagcgtcgctgctgaagaccctccatcgatctcgggtcgatcaacttcgatgtctaacccgcctggggcagcttatacagtacccactcccttgagctcaactccacggtcaccatccatgtcccaccctcgatcctccttcgatatagctcgagatgcactgcatcgtaggtctaggacacccagtcgtggagccaactccccaaggatcagatcgacttcgttcggccaagatgctggtgagccgcacctgtccggtgttcgagatgagactagctattatcaggccgagacccaaaacttggttcgtgagaaccagatgttgcgtcacaggattcgcgagcttgagcgtcagctaagcgaggcaaacgctaacgcagctgtcacgcgagaaccgccaaatccatcacatttgacacattcgacatctgtatctgaaggagacactcaaaccacagactccccgctagcggctacctctgaaaccaaagaggaatag

SEQ ID NO: 8151 - protein, 326 aa, Muscodor strobelii
  misc_feature: SGI Peptide ID NO. 562496
  misc_feature (1)..(301): NCBI GI: 171690616 Blast Desc: protein product [Podospora anserina] gi|170945256|emb|CAP71367.1| protein product [Podospora anserina]
  misc_feature (20)..(326): NCBI GI: 116196008 Blast Desc: CHGG_04602 [Chaetomium globosum CBS 148.51] gi|88180515|gb|EAQ87983.1| CHGG_04602 [Chaetomium globosum CBS 148.51]
  misc_feature (52)..(307): NCBI GI: 156045569 Blast Desc: SS1G_09975 [Sclerotinia sclerotiorum 1980] gi|154694368|gb|EDN94106.1| SS1G_09975 [Sclerotinia sclerotiorum 1980]
  misc_feature (72)..(307): NCBI GI: 256727459 Blast Desc: NECHADRAFT_90932 [Nectria haematococca mpVI 77-13-4]
  misc_feature (31)..(307): NCBI GI: 85104529 Blast Desc: NCU08695 [Neurospora crassa OR74A] gi|28923323|gb|EAA32519.1| [Neurospora crassa OR74A]
  misc_feature (21)..(321): NCBI GI: 145612401 Blast Desc: MGG_07102 [Magnaporthe grisea 70-15] gi|145019571|gb|EDK03799.1| MGG_07102 [Magnaporthe grisea 70-15]
  misc_feature (72)..(283): NCBI GI: 46121489 Blast Desc: FG05123.1 [Gibberella zeae PH-1]
  misc_feature (7)..(293): NCBI GI: 169605771 Blast Desc: SNOG_05912 [Phaeosphaeria nodorum SN15] gi|111065856|gb|EAT86976.1| SNOG_05912 [Phaeosphaeria nodorum SN15]
  misc_feature (37)..(293): NCBI GI: 189197925 Blast Desc: conserved [Pyrenophora tritici-repentis Pt-1C-BFP] gi|187981248|gb|EDU47874.1| conserved [Pyrenophora tritici-repentis Pt-1C-BFP]
  misc_feature (8)..(288): NCBI GI: 226279612 Blast Desc: PAAG_06225 [Paracoccidioides brasiliensis Pb01]
  misc_feature: Useful for introducing or modulating the production of volatile compounds
MASASIPANGESVARGESPSPSPSRSASISLQAAATMNAGLQHEPSRRTSNSSLSRQRQSPQAGRRRSTVLMNLQLNDPSLPAPGEMVTEGSNPHRTLTPQSMSGSPILGEPRRDRAPSLGELHQELEAEQEAQVNRLLQMIRSQQVQLQQLQAAQGQSQSSVAAEDPPSISGRSTSMSNPPGAAYTVPTPLSSTPRSPSMSHPRSSFDIARDALHRRSRTPSRGANSPRIRSTSFGQDAGEPHLSGVRDETSYYQAETQNLVRENQMLRHRIRELERQLSEANANAAVTREPPNPSHLTHSTSVSEGDTQTTDSPLAATSETKEE

SEQ ID NO: 8152 - DNA, 1807 bp, Muscodor strobelii
  misc_feature: SGI EST ID NO. CUFF.19969.0
  misc_feature: Variant of the nucleotide sequence at SEQ ID NO 8150
gcggttttgaccatctcgcaccatgtcataatccgagctgccaagctacttcttctagcctccctctggaaatatagtacctgacttctcgcctgaatatcatatctatattacgaatgtaattagctggggcttgtgctcgtggagctgtgctcttggtcttccccgcccccaccaacgaacgaaacagcggcattcaagcaacaccaaggcaacaccagcacaaggattaggtagctctgtgaaactgccagcaaccaaggccatcctcggttctaagccgtggaccgtcatcttctgcacttagagtgattctacctaagacgacgcatacacagactgcaccagaggcagagctatggcccctgacctcaactcgttgcctccatcatcgctctcgtcatccccggtgaccgtgtccctcagcgccatggcttccgcttccatccccgccaacggagagtctgtcgcccgaggcgagtctccttcgccgtcgccgtcgcgctccgcgtccatctcgttgcaggccgctgccactatgaacgccggtctacagcacgaacctagtcgtcgcacttccaacagctcgctgtctcgccagcgacagtcccctcaggctggtcgacgaagatcgaccgttctcatgaatctccagctcaacgacccttccctgccagctccgggcgagatggtcaccgaaggctccaatccccaccgaactctgactccccaatccatgtccggctctcctatcctgggcgagcctcgacgcgatagagccccgagcttgggtgagctacaccaagagctcgaggctgagcaagaagcacaagtgaaccgcttgctgcaaatgattcgatctcaacaagtccaactgcagcagctacaggctgcccaaggccaatctcagtccagcgtcgctgctgaagaccctccatcgatctcgggtcgatcaacttcgatgtctaacccgcctggggcagcttatacagtacccactcccttgagctcaactccacggtcaccatccatgtcccaccctcgatcctccttcgatatagctcgagatgcactgcatcgtaggtctaggacacccagtcgtggagccaactccccaaggatcagatcgacttcgttcggccaagatgctggtgagccgcacctgtccggtgttcgagatgagactagctattatcaggccgagacccaaaacttggttcgtgagaaccagatgttgcgtcacaggattcgcgagcttgagcgtcagctaagcgaggcaaacgctaacgcagctgtcacgcgagaaccgccaaatccatcacatttgacacattcgacatctgtatctgaaggagacactcaaaccacagactccccgctagcggctacctctgaaaccaaagaggaataggaaaaactggggtttcgtgacagcgaaaaggaaggtgggcggcgagttcggggttcaagctcctgaaggcaattttaacaactgtctgttctattgtatgattatgctctttagcacgtaatggcgttgggtgtcttaccaagatcgggacagatgggtgttggttggcctggctttctacaagtgtatctttaagtgtcatgattactacaaacaggcccaacagtgatagtatcaaacaagacttctaggactattgccttgttctgcataataccattcataaccgtgcgggttggaatccgaattgataattcgcaaaattccggataagcaatagaatacagggtaggtctaaccaaaggccatattccggatagatcattgatgtgtcgg

SEQ ID NO: 8153 - DNA, 1266 bp, Muscodor strobelii
  misc_feature: SGI cDNA ID NO. 562497
  misc_feature: Reduced expression when VOC is produced
  misc_feature: Encodes the peptide sequence at SEQ ID NO 8154
atgcttataaggctagttgcacgccaatgcctcgccacaacgaaaactttcagtattcgaccatttagctccacagcctctgtaaaggcagatttcacacatgtggtaacaggcggcggcgtaataggcctcgcaacagcccgcgcactagcacaacacacatcctcctcatcaaacgcgagcacactgcttcttgagcggcacaacatcgtgggctccgagacttctgcaagaaatagcgaggtcatccatgcgggcttatattatggccctaacaccctgaagacccgactttgcattgagggtaagcagaagttgtatgagttttgcgcgtcgcgtggtgtgggacacgcgaactgtgggaaatggatcgtggcgcaagatgatgcggaacgcgaggctcttgaaagactgcatgttgcctgccgggacgagcttggcgtcccgacacgttgggtacccgaggccgaggcgaaggagctggagccccagatacgtgccgccgctggggcgctcgatagccctacgacgggaatcgtcgatagtcatgggttgatggtagcgcttcagggcgagcttgaagacgcgggtggtgtcgtggccgtcaactctaaggtcactgggattgagccgctatcttcttcgggtgagccggggtcaggcggttgggttctcacgatacaggacacgagcacaggcgaggaatcaaccatcgaggccgagactatcatcaacagcgccgggttaggtgccgccgacatccacaatatgattgttccgtctgtgagacacatgcgtctgtactacgcgaaaggaaattatttcagctacggagcgtcatttcccaaagtgaagcgccttatatatcccgtcacgttgccgggagctggtggcttagggacacatctcacgatcgatctagcaggacggattcgctttggccccgatgtcgagtgggtagataacccatccgatctcgccgtaaacacttctcgtttccccgatgcgctcaaagctattaagagatatatgccacaagtggatgagagcgctcttagccctgattacgcaggcattcgaccaaagctcgggaaggctggtgctgtaggggctggcaaggggtttgttgacttttatatagaaaaggagcaaggctttgtgggttgggtcaatatgctgggtatggagagccctgggcttacgagttccctcgccataggagattatgttcgtgacttgctatatggcagttgcaagatagaatga

SEQ ID NO: 8154 - protein, 421 aa, Muscodor strobelii
  misc_feature: SGI Peptide ID NO. 562497
  misc_feature (33)..(413): Pfam Id: PF01266 Pfam Desc: FAD dependent oxidoreductase
  misc_feature (19)..(416): NCBI GI: 164423679 Blast Desc: NCU08048 [Neurospora crassa OR74A] gi|39979174|emb|CAE85547.1| conserved [Neurospora crassa] gi|157070193|gb|EAA33482.2| NCU08048 [Neurospora crassa OR74A]
  misc_feature (12)..(419): NCBI GI: 46121487 Blast Desc: FG05122.1 [Gibberella zeae PH-1]
  misc_feature (14)..(415): NCBI GI: 116196010 Blast Desc: CHGG_04603 [Chaetomium globosum CBS 148.51] gi|88180516|gb|EAQ87984.1| CHGG_04603 [Chaetomium globosum CBS 148.51]
  misc_feature (2)..(416): NCBI GI: 256727458 Blast Desc: NECHADRAFT_32312 [Nectria haematococca mpVI 77-13-4]
  misc_feature (12)..(416): NCBI GI: 171690614 Blast Desc: protein product [Podospora anserina] gi|170945255|emb|CAP71366.1| protein product [Podospora anserina]
  misc_feature (13)..(415): NCBI GI: 156045567 Blast Desc: SS1G_09974 [Sclerotinia sclerotiorum 1980] gi|154694367|gb|EDN94105.1| SS1G_09974 [Sclerotinia sclerotiorum 1980]
  misc_feature (9)..(415): NCBI GI: 145228835 Blast Desc: An01g02920 [Aspergillus niger] gi|134054818|emb|CAK43658.1| protein product [Aspergillus niger]
  misc_feature (19)..(415): NCBI GI: 189198011 Blast Desc: L-2-hydroxyglutarate dehydrogenase, mitochondrial precursor [Pyrenophora tritici-repentis Pt-1C-BFP] gi|187981291|gb|EDU47917.1| L-2-hydroxyglutarate dehydrogenase,
  misc_feature (5)..(416): NCBI GI: 238486300 Blast Desc: FAD dependent oxidoreductase, [Aspergillus flavus NRRL3357] gi|220699267|gb|EED55606.1| FAD dependent oxidoreductase, [Aspergillus flavus NRRL3357]
  misc_feature (5)..(416): NCBI GI: 169771173 Blast Desc: [Aspergillus oryzae RIB40] gi|83767915|dbj|BAE58054.1| protein product [Aspergillus oryzae]
  misc_feature (44)..(316): SWISSPROT Homolog: EC 1.1.99.2 2-hydroxyglutarate dehydrogenase
  misc_feature: Useful for introducing or modulating the production of volatile compounds
MLIRLVARQCLATTKTFSIRPFSSTASVKADFTHVVTGGGVIGLATARALAQHTSSSSNASTLLLERHNIVGSETSARNSEVIHAGLYYGPNTLKTRLCIEGKQKLYEFCASRGVGHANCGKWIVAQDDAEREALERLHVACRDELGVPTRWVPEAEAKELEPQIRAAAGALDSPTTGIVDSHGLMVALQGELEDAGGVVAVNSKVTGIEPLSSSGEPGSGGWVLTIQDTSTGEESTIEAETIINSAGLGAADIHNMIVPSVRHMRLYYAKGNYFSYGASFPKVKRLIYPVTLPGAGGLGTHLTIDLAGRIRFGPDVEWVDNPSDLAVNTSRFPDALKAIKRYMPQVDESALSPDYAGIRPKLGKAGAVGAGKGFVDFYIEKEQGFVGWVNMLGMESPGLTSSLAIGDYVRDLLYGSCKIE

SEQ ID NO: 8155 - DNA, 1540 bp, Muscodor strobelii
  misc_feature: SGI EST ID NO. CUFF.19994.0
  misc_feature: Variant of the nucleotide sequence at SEQ ID NO 8153
caggcgatgatgtgactgaaatgacccaccagtccggcatcgctagactccctcttctcaacttcctaagtaacctcgacattgagtatcctctcacttataaagcctcgcctttttatgcgcaactgccaattaaagatgcttataaggctagttgcacgccaatgcctcgccacaacgaaaactttcagtattcgaccatttagctccacagcctctgtaaaggcagatttcacacatgtggtaacaggcggcggcgtaataggcctcgcaacagcccgcgcactagcacaacacacatcctcctcatcaaacgcgagcacactgcttcttgagcggcacaacatcgtgggctccgagacttctgcaagaaatagcgaggtcatccatgcgggcttatattatggccctaacaccctgaagacccgactttgcattgagggtaagcagaagttgtatgagttttgcgcgtcgcgtggtgtgggacacgcgaactgtgggaaatggatcgtggcgcaagatgatgcggaacgcgaggctcttgaaagactgcatgttgcctgccgggacgagcttggcgtcccgacacgttgggtacccgaggccgaggcgaaggagctggagccccagatacgtgccgccgctggggcgctcgatagccctacgacgggaatcgtcgatagtcatgggttgatggtagcgcttcagggcgagcttgaagacgcgggtggtgtcgtggccgtcaactctaaggtcactgggattgagccgctatcttcttcgggtgagccggggtcaggcggttgggttctcacgatacaggacacgagcacaggcgaggaatcaaccatcgaggccgagactatcatcaacagcgccgggttaggtgccgccgacatccacaatatgattgttccgtctgtgagacacatgcgtctgtactacgcgaaaggaaattatttcagctacggagcgtcatttcccaaagtgaagcgccttatatatcccgtcacgttgccgggagctggtggcttagggacacatctcacgatcgatctagcaggacggattcgctttggccccgatgtcgagtgggtagataacccatccgatctcgccgtaaacacttctcgtttccccgatgcgctcaaagctattaagagatatatgccacaagtggatgagagcgctcttagccctgattacgcaggcattcgaccaaagctcgggaaggctggtgctgtaggggctggcaaggggtttgttgacttttatatagaaaaggagcaaggctttgtgggttgggtcaatatgctgggtatggagagccctgggcttacgagttccctcgccataggagattatgttcgtgacttgctatatggcagttgcaagatagaatgagagaatgagtcaagaaagcttgaaagatatagaaattgtatatcggtatgatcatatagatttagacttgagacacatttttgctcttcttagtagattaggtactactcacatatctactacgtttaaggcggag

SEQ ID NO: 8156 - DNA, 2211 bp, Muscodor strobelii
  misc_feature: SGI cDNA ID NO. 562498
  misc_feature: Reduced expression when VOC is produced
  misc_feature: Encodes the peptide sequence at SEQ ID NO 8157
atggccgtcggcgatgaagccagtctctggcccaccgacagcctgcttctgaagcatagccgcaagcactaccgtacccaggtctcgcccatacattggcagctgcgttccctgatcagcgccgagggaaacggcaacatctactaccccgccggcctgaacaacacccacatcacccgtctcgacacaaacacccgcgagtgcgagaccatcaaggtcatcagcttctacccgagatgtctggtggccagcggcgggtggatatgctgcggtggcgagaacggcgagtttgctattatccgcgagtctggccgccctgacttcagcgacgacaccccgtctgcgactgcgactgcgactgcgactacagccaccgagcgcggtgccacacccggcgtccccgaggcctccatgtccgagcttcatcgcgacatcctcaacatcgtcgagcgcctcaacggctccgccaagacctggtccgccaccaaccacaagttcggctctcagcgcgtcaactgcatcaccatatggcagcccgccaagtcccagcccgtgacctcgccccgccccgaagcctacccctttcccgtcgccatcctcgccaacaacgacaagagcgtgaccgtcgtgagcctgcacgacgccgaggctgttgacgagctggagtatcccgactgcgtgaaccgtggcgtcatctcccccgacggtcgactgctagtagccatctgcgacgaccctttcctctacgtccatgtccgtgtcatgcctcccgccacgaaacggggagcctgcgcggagtggatccaactgcccagaatacggctcaaggatcagtcgcctcgagacacttcggattgtcggggcagctttgccgcttgtttctctccctcgggccggtatcttgctgttggtacgcagtatggcactatctccatcttcgatacagctaccatgatacggaatgctggagacgaccctctcatcacctactggagctctgcgcgtgcgcccatcgatgttggagctgttagagacatggctttctctccggggccgtatgatatactggcctgggcggagcaccgcggctgcgtcggagtggcagatgcccgaaccaacttcaccaaacggcagatcatttctatcgaggatcataccacctttgataccgtcaccctcaacgagcgaaataccattgaccctcgcttactcgatcctcggagtgaacacaacgctgggacttcgccatccatgtccggccttggaaaccagacgagccgaaatcagcccagttctgagagtaccgacacagccagattgaatcagccctacagtgcccaggagacagccatattggacgccatgcagagtgagcgtaggcgccgagaggcccgggagcagcgggagcaacgggaacgtggcgaaccgccgggccctcggaacaccaacaccgcgacctggagatcctctgtttttgccgagcgtgtcagcccccagcagaggacgccgggccgagagcgcgatcgggacatctctgaaagactgcgatacctgacttctcttcaacgtgataccctgacccgcatactcgagcgcgaacgacagcgtgagaatcgcgaccatcagcgctcggtaacgacccagacaacgcaaacgttacagacacagacagcaacgcagacaccagctgagcaggaccgagagaggcgagcgcctacgccgcggagaagaagctcgttgatggcggcactcacacagaacgtcgataacttgacacagcagactatcaatcggctgcaaggctttggcagtggggaaggcggaaactcatcacgggattatacttccgcttggacatcaggaaacagagttgcctcgggctgggctgatctcgaggccttgtacaatatgacgactggagaaagtggcaacccgagcggccttcacgatgcaacccgttccgaagtcaatcggattcgacgtgctataccagtgatcagtgatgtctggaatgacgacacttctggtttccgtcggccttacggtcggaacaataacattcgggaccaccagcagaacccagatgacacagctggcttgacatggagcgaggatggccgcacactctacattggggccgaagacgggatatatgaattccagttggacatgctcagcagaaagatgctgccagctgtgacacttcgctga

SEQ ID NO: 8157 - protein, 736 aa, Muscodor strobelii
  misc_feature: SGI Peptide ID NO. 562498
  misc_feature (1)..(463): NCBI GI: 256726888 Blast Desc: NECHADRAFT_90930 [Nectria haematococca mpVI 77-13-4]
  misc_feature (1)..(493): NCBI GI: 46121485 Blast Desc: FG05121.1 [Gibberella zeae PH-1]
  misc_feature (1)..(456): NCBI GI: 145607353 Blast Desc: MGG_12167 [Magnaporthe grisea 70-15] gi|145014929|gb|EDJ99497.1| MGG_12167 [Magnaporthe grisea 70-15]
  misc_feature (1)..(488): NCBI GI: 85104526 Blast Desc: NCU08694 [Neurospora crassa OR74A] gi|28923322|gb|EAA32518.1| [Neurospora crassa OR74A]
  misc_feature (12)..(736): NCBI GI: 171690626 Blast Desc: protein product [Podospora anserina] gi|170945261|emb|CAP71372.1| protein product [Podospora anserina]
  misc_feature (11)..(463): NCBI GI: 116196012 Blast Desc: CHGG_04604 [Chaetomium globosum CBS 148.51] gi|88180517|gb|EAQ87985.1| CHGG_04604 [Chaetomium globosum CBS 148.51]
  misc_feature (32)..(736): NCBI GI: 154298410 Blast Desc: BC1G_11660 [Botryotinia fuckeliana B05.10] gi|150858113|gb|EDN33305.1| BC1G_11660 [Botryotinia fuckeliana B05.10]
  misc_feature (32)..(722): NCBI GI: 156045109 Blast Desc: SS1G_09743 [Sclerotinia sclerotiorum 1980] gi|154694138|gb|EDN93876.1| SS1G_09743 [Sclerotinia sclerotiorum 1980]
  misc_feature (1)..(383): NCBI GI: 259479809 Blast Desc: TPA: conserved [Aspergillus nidulans FGSC A4]
  misc_feature (5)..(556): NCBI GI: 119188775 Blast Desc: CIMG_04435 [Coccidioides immitis RS]
  misc_feature: Useful for introducing or modulating the production of volatile compounds
MAVGDEASLWPTDSLLLKHSRKHYRTQVSPIHWQLRSLISAEGNGNIYYPAGLNNTHITRLDTNTRECETIKVISFYPRCLVASGGWICCGGENGEFAIIRESGRPDFSDDTPSATATATATTATERGATPGVPEASMSELHRDILNIVERLNGSAKTWSATNHKFGSQRVNCITIWQPAKSQPVTSPRPEAYPFPVAILANNDKSVTVVSLHDAEAVDELEYPDCVNRGVISPDGRLLVAICDDPFLYVHVRVMPPATKRGACAEWIQLPRIRLKDQSPRDTSDCRGSFAACFSPSGRYLAVGTQYGTISIFDTATMIRNAGDDPLITYWSSARAPIDVGAVRDMAFSPGPYDILAWAEHRGCVGVADARTNFTKRQIISIEDHTTFDTVTLNERNTIDPRLLDPRSEHNAGTSPSMSGLGNQTSRNQPSSESTDTARLNQPYSAQETAILDAMQSERRRREAREQREQRERGEPPGPRNTNTATWRSSVFAERVSPQQRTPGRERDRDISERLRYLTSLQRDTLTRILERERQRENRDHQRSVTTQTTQTLQTQTATQTPAEQDRERRAPTPRRRSSLMAALTQNVDNLTQQTINRLQGFGSGEGGNSSRDYTSAWTSGNRVASGWADLEALYNMTTGESGNPSGLHDATRSEVNRIRRAIPVISDVWNDDTSGFRRPYGRNNNIRDHQQNPDDTAGLTWSEDGRTLYIGAEDGIYEFQLDMLSRKMLPAVTLR

SEQ ID NO: 8158 - DNA, 3458 bp, Muscodor strobelii
  misc_feature: SGI EST ID NO. CUFF.20169.4
  misc_feature: Variant of the nucleotide sequence at SEQ ID NO 8156
cgaaacgaaacacagaaagagaaggaaaagaagaccgcatccgtgactttgcgctgggttccgcacattatcttcgcagtgctccaacagaccttccgtacacggctcttacacagctctcacctacctaagtgaccctggtgcaagtaatagctaggtaagttgatagcagctgtccagcattacccaccaaattcgacagtaaggccgatagctcagcagcaggtgcgtccagtgagcccgggccagcctgctccaaggagccgttgtaaggagccgtcctttgaagattagatctagaactgcggtgccgcgggattacgtgctggatctgcacagcagagaaggtgagcagcaatctggcgacaacaccattacaccaacgtttccaacacaagcaccgccaccagcctgacagccaagcgacctcgacggacgacgatcgacgcagcatctcgtcaaacaacacgcatttgcagcagcaccggctccgcagccgtgacaaatcgcaggtcgagccaacgtcggccgcgacgcaactgcacctcgagagggctgcttcctacttgcttgcttgccgcccgcccgcttaccgaccgcttaccaccacacccgcgcatctcggcttacccacttgctcagtgctgtcgccgaccctgccagccctgccctgagacatgtccgcttgcgtgctcctctgatcaatgcgacttgatgatcccatcctctgaccgtcccatctcgccactggcagcatggccgtcggcgatgaagccagtctctggcccaccgacagcctgcttctgaagcatagccgcaagcactaccgtacccaggtctcgcccatacattggcagctgcgttccctgatcagcgccgagggaaacggcaacatctactaccccgccggcctgaacaacacccacatcacccgtctcgacacaaacacccgcgagtgcgagaccatcaaggtcatcagcttctacccgagatgtctggtggccagcggcgggtggatatgctgcggtggcgagaacggcgagtttgctattatccgcgagtctggccgccctgacttcagcgacgacaccccgtctgcgactgcgactgcgactgcgactacagccaccgagcgcggtgccacacccggcgtccccgaggcctccatgtccgagcttcatcgcgacatcctcaacatcgtcgagcgcctcaacggctccgccaagacctggtccgccaccaaccacaagttcggctctcagcgcgtcaactgcatcaccatatggcagcccgccaagtcccagcccgtgacctcgccccgccccgaagcctacccctttcccgtcgccatcctcgccaacaacgacaagagcgtgaccgtcgtgagcctgcacgacgccgaggctgttgacgagctggagtatcccgactgcgtgaaccgtggcgtcatctcccccgacggtcgactgctagtagccatctgcgacgaccctttcctctacgtccatgtccgtgtcatgcctcccgccacgaaacggggagcctgcgcggagtggatccaactgcccagaatacggctcaaggatcagtcgcctcgagacacttcggattgtcggggcagctttgccgcttgtttctctccctcgggccggtatcttgctgttggtacgcagtatggcactatctccatcttcgatacagctaccatgatacggaatgctggagacgaccctctcatcacctactggagctctgcgcgtgcgcccatcgatgttggagctgttagagacatggctttctctccggggccgtatgatatactggcctgggcggagcaccgcggctgcgtcggagtggcagatgcccgaaccaacttcaccaaacggcagatcatttctatcgaggatcataccacctttgataccgtcaccctcaacgagcgaaataccattgaccctcgcttactcgatcctcggagtgaacacaacgctgggacttcgccatccatgtccggccttggaaaccagacgagccgaaatcagcccagttctgagagtaccgacacagccagattgaatcagccctacagtgcccaggagacagccatattggacgccatgcagagtgagcgtaggcgccgagaggcccgggagcagcgggagcaacgggaacgtggcgaaccgccgggccctcggaacaccaacaccgcgacctggagatcctctgtttttgccgagcgtgtcagcccccagcagaggacgccgggccgagagcgcgatcgggacatctctgaaagactgcgatacctgacttctcttcaacgtgataccctgacccgcatactcgagcgcgaacgacagcgtgagaatcgcgaccatcagcgctcggtaacgacccagacaacgcaaacgttacagacacagacagcaacgcagacaccagctgagcaggaccgagagaggcgagcgcctacgccgcggagaagaagctcgttgatggcggcactcacacagaacgtcgataacttgacacagcagactatcaatcggctgcaaggctttggcagtggggaaggcggaaactcatcacgggattatacttccgcttggacatcaggaaacagagttgcctcgggctgggctgatctcgaggccttgtacaatatgacgactggagaaagtggcaacccgagcggccttcacgatgcaacccgttccgaagtcaatcggattcgacgtgctataccagtgatcagtgatgtctggaatgacgacacttctggtttccgtcggccttacggtcggaacaataacattcgggaccaccagcagaacccagatgacacagctggcttgacatggagcgaggatggccgcacactctacattggggccgaagacgggatatatgaattccagttggacatgctcagcagaaagatgctgccagctgtgacacttcgctgaacccatcttcagttcattcttctatatatcttctgtatcaggcaattgggggcagggtcacgtctggcgttacggaaacaggagcatattaaagccttcgttgatagctggcaggtctcacaggcttgggtctccacactctgaaattgggttggaggctgcagctacagaagcatgagcatgatgttcctcgcgttcaaaaaattcccagggttcaaggagttctccggagttggctgctaggaatcgggactcaaagggcgggaaatcctcattgcgctttcgtgaacctcatgctttccgcacatagtatataagtcttcaattataccccgcaggttcttttagggacccgaacatcatactttcatagcatgtaataatacagcattgatgccggttttcaacctgctccggcgcagctgattacgacactatttagtgatcattgctatctataagagtggtttaggaaagagatgaaagatccgg

SEQ ID NO: 8159 - DNA, 2070 bp, Muscodor strobelii
  misc_feature: SGI cDNA ID NO. 562499
  misc_feature: Encodes the peptide sequence at SEQ ID NO 8160
atgcgcccgcgactccgcggccatcagaatggatctcatcaacgtgacacaaggctaatcagaaatcatccgcaacagcttccccgagcaacctccacagcacccagatggactgcgccattaagaaagcctttgggttccagcttcgcccgctatgagtccaccgatggaaaggtcactggtgccgtcatcggtatcgatcttggcacaacaaactcagccgtcgccttgatggaaggcaaagttcccagaatcattgaaaactccgaaggtgcccgcacaacgccatcagtcgtcgccttcgcgcaagacggcgagcgattggttggtgttgccgccaagcgacaggctgttgtcaaccctgagcacacgctcttcgctaccaagcgattgatcggccgcaagttcacagatgccgaagtccaaagagatatcaaggaggtcccttacaagatcgtccagcacacaaacggcgatgcttgggttgaggctcgtggccagaagtactctccgtcgcaggtcggtggtttcgtcctcaacaagatgaaggagactgccgaggcctacatgagcaagcccgttaagaacgccgttgtcactgttcccgcctacttcaatgactctcaacgtcaagctaccaaggatgccggtcaaattgctggtctcaatgttctccgtgtcgtcaacgagcctaccgctgctgcattggcctatggtctcgagaaggaggctgaccgcgtcgtcgctgtctacgatcttggtggtggtaccttcgatatctccgtcctcgagatccagaacggtgtcttcgaggtcaagtccaccaatggtgacacccacttgggcggtgaggatttcgatatccgcctcgtccgccaccttgtccagcagttcaagaccgattccggcattgatctctccagtgaccgcatggctatccagagaatccgtgaggctgctgagaaggccaagattgaactttcttcctctctccagactgacatcagcttgcctttcattactgccgatgcttctggccccaagcacatcaacagcaagcttactcgctcccagctggagacgatgatggatcctctcatcactaagaccatcgagcctgtgcgcaaggccctgaaggatgccggcctccaggccaaggacatccaggaagtcattcttgtcggtggcatgacccgtatgcctaaggtttccgagtcggtcaagaacatcttcggccgtgaccctgccaagtcagtcaatcctgacgaggctgtcgccatgggtgctgctatccagggtgccgtgctctccggtgaggtcaaggatctcctcctcctcgacgtcacgcctctgtctcttggtattgagaccctcggcggtgtcttcacccgtctcattaaccgcaacaccaccatccccaccaagaagtcccaggtcttctccactgccgctgacttccagaccgctgtcgagatcaaggtctatcagggtgagcgtgagcttgtccgcgataacaagctcctcggaaacttccaattggttggcattcctcctgcccaccgtggtgtccctcaagtcgaggtcaccttcgatattgatgccgactcgattgtccacgttcacgccaaggacaagagcaccaacaaggatcagtccattaccatcgcctctggctctggtctctctgattctgagattgaacagatggttcaagactctgagaagtatgccgaggccgacaaggagcgtaagggagccatcgaggctgccaatcgtgccgacagcgtattgaacgatactgagaaggctcttaacgaatttgccgacagactcgacaagaccgaggctgatggtattcgtgagaagatcacctctcttcgcgagttcgtcgccaagagccagtctggcgagggcactgcgactgccgaggatatcaagaccaagactgacgagctccaaatggctagcttgaacctcttcgacaagatgcacaaggctcgcgccgagtccggtgagcagtctgaagcttcttcctcagaagctaagcccgaggacgagaagaagccttaa

SEQ ID NO: 8160 - protein, 689 aa, Muscodor strobelii
  misc_feature: SGI Peptide ID NO. 562499
  misc_feature (63)..(665): Pfam Id: PF00012 Pfam Desc: Hsp70 protein
  misc_feature (17)..(688): NCBI GI: 171690628 Blast Desc: protein product [Podospora anserina] gi|170945262|emb|CAP71373.1| protein product [Podospora anserina]
  misc_feature (27)..(689): NCBI GI: 256727457 Blast Desc: [Nectria haematococca mpVI 77-13-4]
  misc_feature (27)..(667): NCBI GI: 46123553 Blast Desc: FG06154.1 [Gibberella zeae PH-1]
  misc_feature (27)..(689): NCBI GI: 154298412 Blast Desc: BC1G_11661 [Botryotinia fuckeliana B05.10] gi|150858114|gb|EDN33306.1| BC1G_11661 [Botryotinia fuckeliana B05.10]
  misc_feature (17)..(684): NCBI GI: 164426355 Blast Desc: heat shock 70 kDa protein, mitochondrial precursor [Neurospora crassa OR74A] gi|157071302|gb|EAA32517.2| heat shock 70 kDa protein, mitochondrial precursor [Neurospora crassa OR74A]
  misc_feature (27)..(689): NCBI GI: 39944360 Blast Desc: MGG_04191 [Magnaporthe grisea 70-15] gi|59802821|gb|AAX07628.1| heat shock protein SSC1-like protein [Magnaporthe grisea] gi|145014928|gb|EDJ99496.1| MGG_04191 grisea
  misc_feature (27)..(689): NCBI GI: 156045111 Blast Desc: SS1G_09744 [Sclerotinia sclerotiorum 1980] gi|154694139|gb|EDN93877.1| SS1G_09744 [Sclerotinia sclerotiorum 1980]
  misc_feature (68)..(684): NCBI GI: 116196014 Blast Desc: CHGG_04605 [Chaetomium globosum CBS 148.51] gi|88180518|gb|EAQ87986.1| CHGG_04605 [Chaetomium globosum CBS 148.51]
  misc_feature (27)..(689): NCBI GI: 258575931 Blast Desc: chaperone DnaK [Uncinocarpus reesii 1704] gi|237902413|gb|EEP76814.1| chaperone DnaK [Uncinocarpus reesii 1704]
  misc_feature (27)..(669): NCBI GI: 242795011 Blast Desc: mitochondrial Hsp70 chaperone (Ssc70), [Talaromyces stipitatus ATCC 10500] gi|218719080|gb|EED18500.1| mitochondrial Hsp70 chaperone (Ssc70), [Talaromyces stipitatus ATCC 10500]
  misc_feature (61)..(441): SWISSPROT Homolog: EC 3.6.1.3 Adenosinetriphosphatase
MRPRLRGHQNGSHQRDTRLIRNHPQQLPRATSTAPRWTAPLRKPLGSSFARYESTDGKVTGAVIGIDLGTTNSAVALMEGKVPRIIENSEGARTTPSVVAFAQDGERLVGVAAKRQAVVNPEHTLFATKRLIGRKFTDAEVQRDIKEVPYKIVQHTNGDAWVEARGQKYSPSQVGGFVLNKMKETAEAYMSKPVKNAVVTVPAYFNDSQRQATKDAGQIAGLNVLRVVNEPTAAALAYGLEKEADRVVAVYDLGGGTFDISVLEIQNGVFEVKSTNGDTHLGGEDFDIRLVRHLVQQFKTDSGIDLSSDRMAIQRIREAAEKAKIELSSSLQTDISLPFITADASGPKHINSKLTRSQLETMMDPLITKTIEPVRKALKDAGLQAKDIQEVILVGGMTRMPKVSESVKNIFGRDPAKSVNPDEAVAMGAAIQGAVLSGEVKDLLLLDVTPLSLGIETLGGVFTRLINRNTTIPTKKSQVFSTAADFQTAVEIKVYQGERELVRDNKLLGNFQLVGIPPAHRGVPQVEVTFDIDADSIVHVHAKDKSTNKDQSITIASGSGLSDSEIEQMVQDSEKYAEADKERKGAIEAANRADSVLNDTEKALNEFADRLDKTEADGIREKITSLREFVAKSQSGEGTATAEDIKTKTDELQMASLNLFDKMHKARAESGEQSEASSSEAKPEDEKKP

SEQ ID NO: 8161 - DNA, 2648 bp, Muscodor strobelii
  misc_feature: SGI EST ID NO. CUFF.20002.0
  misc_feature: Variant of the nucleotide sequence at SEQ ID NO 8159
aatttctgccacccctgaccgcccaggtcgaagctcccggaaatcttctatgctctagaaattttctgcgcgattgtggccgtacttgagctcccattccttctgttccatcttcatcgcgaacctctcctcctgcatcctctccaatcgccgctgctgtataatacccgccttcttccctttcatagtacaataataatttcacacaccctctcctttattcgccgacccttttcacaccgtcaagccctcacacctcaccatgttggcttcgcgcttctctagagctcttccccgagcaacctccacagcacccagatggactgcgccattaagaaagcctttgggttccagcttcgcccgctatgagtccaccgatggaaaggtcactggtgccgtcatcggtatcgatcttggcacaacaaactcagccgtcgccttgatggaaggcaaagttcccagaatcattgaaaactccgaaggtgcccgcacaacgccatcagtcgtcgccttcgcgcaagacggcgagcgattggttggtgttgccgccaagcgacaggctgttgtcaaccctgagcacacgctcttcgctaccaagcgattgatcggccgcaagttcacagatgccgaagtccaaagagatatcaaggaggtcccttacaagatcgtccagcacacaaacggcgatgcttgggttgaggctcgtggccagaagtactctccgtcgcaggtcggtggtttcgtcctcaacaagatgaaggagactgccgaggcctacatgagcaagcccgttaagaacgccgttgtcactgttcccgcctacttcaatgactctcaacgtcaagctaccaaggatgccggtcaaattgctggtctcaatgttctccgtgtcgtcaacgagcctaccgctgctgcattggcctatggtctcgagaaggaggctgaccgcgtcgtcgctgtctacgatcttggtggtggtaccttcgatatctccgtcctcgagatccagaacggtgtcttcgaggtcaagtccaccaatggtgacacccacttgggcggtgaggatttcgatatccgcctcgtccgccaccttgtccagcagttcaagaccgattccggcattgatctctccagtgaccgcatggctatccagagaatccgtgaggctgctgagaaggccaagattgaactttcttcctctctccagactgacatcagcttgcctttcattactgccgatgcttctggccccaagcacatcaacagcaagcttactcgctcccagctggagacgatgatggatcctctcatcactaagaccatcgagcctgtgcgcaaggccctgaaggatgccggcctccaggccaaggacatccaggaagtcattcttgtcggtggcatgacccgtatgcctaaggtttccgagtcggtcaagaacatcttcggccgtgaccctgccaagtcagtcaatcctgacgaggctgtcgccatgggtgctgctatccagggtgccgtgctctccggtgaggtcaaggatctcctcctcctcgacgtcacgcctctgtctcttggtattgagaccctcggcggtgtcttcacccgtctcattaaccgcaacaccaccatccccaccaagaagtcccaggtcttctccactgccgctgacttccagaccgctgtcgagatcaaggtctatcagggtgagcgtgagcttgtccgcgataacaagctcctcggaaacttccaattggttggcattcctcctgcccaccgtggtgtccctcaagtcgaggtcaccttcgatattgatgccgactcgattgtccacgttcacgccaaggacaagagcaccaacaaggatcagtccattaccatcgcctctggctctggtctctctgattctgagattgaacagatggttcaagactctgagaagtatgccgaggccgacaaggagcgtaagggagccatcgaggctgccaatcgtgccgacagcgtattgaacgatactgagaaggctcttaacgaatttgccgacagactcgacaagaccgaggctgatggtattcgtgagaagatcacctctcttcgcgagttcgtcgccaagagccagtctggcgagggcactgcgactgccgaggatatcaagaccaagactgacgagctccaaatggctagcttgaacctcttcgacaagatgcacaaggctcgcgccgagtccggtgagcagtctgaagcttcttcctcagaagctaagcccgaggacgagaagaagccttaaagccccgataaatcatcttctctctcttctcaaacctgtttcaataccacttggttcgagggtctttgatggccgttcagcccacctgtacttcatgttgtactcatatctgcgacttgtttttgattcccggttgtttacgagaaatcatgttgtcttatacatttgcgggcggccggggcgttccgagatatgggaaaaaagaaagtttcacgcgggtcgaagacactatgaccatctgtgatgatgatttgcataggaatggtctgctcttgatttgagcgctgtacataaagtgtcctacaataagattaacaaaacctaatacaccatcccctctcaaatgagaagatcattagttccgaac

SEQ ID NO: 8162 - DNA, 2019 bp, Muscodor strobelii
  misc_feature: SGI cDNA ID NO. 562500
  misc_feature: Reduced expression when VOC is produced
  misc_feature: Encodes the peptide sequence at SEQ ID NO 8163
atgttggcttcgcgcttctctagagctcttccccgagcaacctccacagcacccagatggactgcgccattaagaaagcctttgggttccagcttcgcccgctatgagtccaccgatggaaaggtcactggtgccgtcatcggtatcgatcttggcacaacaaactcagccgtcgccttgatggaaggcaaagttcccagaatcattgaaaactccgaaggtgcccgcacaacgccatcagtcgtcgccttcgcgcaagacggcgagcgattggttggtgttgccgccaagcgacaggctgttgtcaaccctgagcacacgctcttcgctaccaagcgattgatcggccgcaagttcacagatgccgaagtccaaagagatatcaaggaggtcccttacaagatcgtccagcacacaaacggcgatgcttgggttgaggctcgtggccagaagtactctccgtcgcaggtcggtggtttcgtcctcaacaagatgaaggagactgccgaggcctacatgagcaagcccgttaagaacgccgttgtcactgttcccgcctacttcaatgactctcaacgtcaagctaccaaggatgccggtcaaattgctggtctcaatgttctccgtgtcgtcaacgagcctaccgctgctgcattggcctatggtctcgagaaggaggctgaccgcgtcgtcgctgtctacgatcttggtggtggtaccttcgatatctccgtcctcgagatccagaacggtgtcttcgaggtcaagtccaccaatggtgacacccacttgggcggtgaggatttcgatatccgcctcgtccgccaccttgtccagcagttcaagaccgattccggcattgatctctccagtgaccgcatggctatccagagaatccgtgaggctgctgagaaggccaagattgaactttcttcctctctccagactgacatcagcttgcctttcattactgccgatgcttctggccccaagcacatcaacagcaagcttactcgctcccagctggagacgatgatggatcctctcatcactaagaccatcgagcctgtgcgcaaggccctgaaggatgccggcctccaggccaaggacatccaggaagtcattcttgtcggtggcatgacccgtatgcctaaggtttccgagtcggtcaagaacatcttcggccgtgaccctgccaagtcagtcaatcctgacgaggctgtcgccatgggtgctgctatccagggtgccgtgctctccggtgaggtcaaggatctcctcctcctcgacgtcacgcctctgtctcttggtattgagaccctcggcggtgtcttcacccgtctcattaaccgcaacaccaccatccccaccaagaagtcccaggtcttctccactgccgctgacttccagaccgctgtcgagatcaaggtctatcagggtgagcgtgagcttgtccgcgataacaagctcctcggaaacttccaattggttggcattcctcctgcccaccgtggtgtccctcaagtcgaggtcaccttcgatattgatgccgactcgattgtccacgttcacgccaaggacaagagcaccaacaaggatcagtccattaccatcgcctctggctctggtctctctgattctgagattgaacagatggttcaagactctgagaagtatgccgaggccgacaaggagcgtaagggagccatcgaggctgccaatcgtgccgacagcgtattgaacgatactgagaaggctcttaacgaatttgccgacagactcgacaagaccgaggctgatggtattcgtgagaagatcacctctcttcgcgagttcgtcgccaagagccagtctggcgagggcactgcgactgccgaggatatcaagaccaagactgacgagctccaaatggctagcttgaacctcttcgacaagatgcacaaggctcgcgccgagtccggtgagcagtctgaagcttcttcctcagaagctaagcccgaggacgagaagaagccttaa

SEQ ID NO: 8163 - protein, 672 aa, Muscodor strobelii
  misc_feature: SGI Peptide ID NO. 562500
  misc_feature (46)..(648): Pfam Id: PF00012 Pfam Desc: Hsp70 protein
  misc_feature (1)..(672): NCBI GI: 154272429 Blast Desc: heat shock protein SSC1, mitochondrial precursor [Ajellomyces capsulatus NAm1] gi|150409054|gb|EDN04510.1| heat shock protein SSC1, mitochondrial precursor [Ajellomyces NAm1]
  misc_feature (1)..(651): NCBI GI: 225554808 Blast Desc: heat shock protein SSC1 [Ajellomyces capsulatus G186AR]
  misc_feature (1)..(672): NCBI GI: 261352292 Blast Desc: heat shock protein SSC1 [Verticillium albo-atrum VaMs.102]
  misc_feature (1)..(671): NCBI GI: 189210511 Blast Desc: heat shock 70 kDa protein, mitochondrial precursor [Pyrenophora tritici-repentis Pt-1C-BFP] gi|187977680|gb|EDU44306.1| heat shock 70 kDa protein, precursor
  misc_feature (1)..(650): NCBI GI: 31324921 Blast Desc: 70 kDa heat shock protein [Paracoccidioides brasiliensis] gi|226283311|gb|EEH38877.1| heat shock protein SSC1 [Paracoccidioides brasiliensis Pb01]
  misc_feature (1)..(650): NCBI GI: 225681491 Blast Desc: hsp70-like protein [Paracoccidioides brasiliensis Pb03] gi|226288629|gb|EEH44141.1| heat shock protein SSC1 [Paracoccidioides brasiliensis Pb18]
  misc_feature (1)..(651): NCBI GI: 255950268 Blast Desc: Pc22g19990 [Penicillium chrysogenum Wisconsin 54-1255] gi|211592918|emb|CAP99287.1| Pc22g19990 [Penicillium chrysogenum Wisconsin 54-1255]
  misc_feature (24)..(658): NCBI GI: 169620758 Blast Desc: SNOG_13583 [Phaeosphaeria nodorum SN15] gi|160704098|gb|EAT79030.2| SNOG_13583 [Phaeosphaeria nodorum SN15]
  misc_feature (1)..(671): NCBI GI: 238842099 Blast Desc: heat shock protein SSC1 [Microsporum canis CBS 113480]
  misc_feature (25)..(648): NCBI GI: 171463 Blast Desc: endonuclease SceI 75 kDa subunit [Saccharomyces cerevisiae] gi|190409522|gb|EDV12787.1| heat shock protein SSC1, mitochondrial precursor [Saccharomyces cerevisiae RM11-1a] Ssc1p
  misc_feature (44)..(424): SWISSPROT Homolog: EC 3.6.1.3 Adenosinetriphosphatase
  misc_feature: Useful for introducing or modulating the production of volatile compounds
MLASRFSRALPRATSTAPRWTAPLRKPLGSSFARYESTDGKVTGAVIGIDLGTTNSAVALMEGKVPRIIENSEGARTTPSVVAFAQDGERLVGVAAKRQAVVNPEHTLFATKRLIGRKFTDAEVQRDIKEVPYKIVQHTNGDAWVEARGQKYSPSQVGGFVLNKMKETAEAYMSKPVKNAVVTVPAYFNDSQRQATKDAGQIAGLNVLRVVNEPTAAALAYGLEKEADRVVAVYDLGGGTFDISVLEIQNGVFEVKSTNGDTHLGGEDFDIRLVRHLVQQFKTDSGIDLSSDRMAIQRIREAAEKAKIELSSSLQTDISLPFITADASGPKHINSKLTRSQLETMMDPLITKTIEPVRKALKDAGLQAKDIQEVILVGGMTRMPKVSESVKNIFGRDPAKSVNPDEAVAMGAAIQGAVLSGEVKDLLLLDVTPLSLGIETLGGVFTRLINRNTTIPTKKSQVFSTAADFQTAVEIKVYQGERELVRDNKLLGNFQLVGIPPAHRGVPQVEVTFDIDADSIVHVHAKDKSTNKDQSITIASGSGLSDSEIEQMVQDSEKYAEADKERKGAIEAANRADSVLNDTEKALNEFADRLDKTEADGIREKITSLREFVAKSQSGEGTATAEDIKTKTDELQMASLNLFDKMHKARAESGEQSEASSSEAKPEDEKKP

SEQ ID NO: 8164 - DNA, 2648 bp, Muscodor strobelii; identical to SEQ ID NO: 8161
  misc_feature: SGI EST ID NO. CUFF.20002.0
  misc_feature: Variant of the nucleotide sequence at SEQ ID NO 8162

SEQ ID NO: 8165 - DNA, 1929 bp, Muscodor strobelii
  misc_feature: SGI cDNA ID NO. 562501
  misc_feature: Encodes the peptide sequence at SEQ ID NO 8166
atgaggacgagtttagtcgctgctacacctcgtaactcaagcagcagctacggaataccagatgatctagaaataattccgatcgaccagctcgtcaattcgaaggagctcgcgttagataccggattccttcaatcgacagattcacagatccgtgaatatgtctttaacatatcgcaggctctcgcgtcgcccgatggcttccagaaacccatgatactcgtcaatgggcagtctccaggaccgctgatcgaggcaaataccggtgacacaataagagttctcgtgaacaatcacatgccgaatactagcacgactatccactggcatgggattgatcaaaagaacagcacttggatggacggcgtgacgagtgtctctcaatgtggtattccaccgggacagagctttacgtatgagtttcaagtcgatggacagagaggcacattttggtggcatgctcacctctctgtgcactataccgatggtctttatgggcctctgatcattcatgacccgaaagaaatggtacctcaaacagatagcgaaagtatactattcattggtgatctataccatacatatggatcagtcctcttggaaagctatttgaatccgacatcagaatgggttcccttcgaagccggagtcgagccccttcccgacaatattcttctcaacggccagaatgtatatgactgtggtgtagaatctaccacgtttccgatcgaagcatcagcacgaattgcgaatataagcgacgtcgtatgcaccggcggccagcttcacactacaaagacccgcacaggacaacgcctacgtctacgactcataaactcatcatcatttctctcgtactggttcagcattgacaatcacacactgtccatcgtcgagttagacggcgtggaaatttcacccatcaccgctcgtggtgtatatttgaacatcgggcagcgagccagcgtggtggtaacagcaaatgcaacagcaggtaactactacattcgagcaacgctgccacagacttgtttcctcccttatgcaccatatacaagttcaggtctagaatctgttgaatacgccgtggaaggtatcctatcatacgacgatgtgtcggtgaatgaggagccgataggagtcaagggcaatgtcagcaatccctacggcattgagaataatggtgcgaggggtgatgtttgggagggttgtgatgatatgccatttgacatgccgcggcctatgcgagagattgccgcgtatgatgttgcggaacgcaatgtccagtttattgagtatgcattcagacaggcgcaggatgtgaaccgcatcttcattaacaagacggcatacgcaccccttccagacaatgcgacgctctggaaagttacggaacaaaacttcagcccaaatgagtcaaactcatacaatagctgggacttcggactaaaccaacaagtccttctcatcccggaagccaacagaggcgcgcaaatcgttattaattcactggatgctatggaacatccatggcacttacacggccacacattccaagtagtcggctggggcccggggctcttcggcacccaccgctcaaccgacccgaatcccaacagcacaacgacaacctggaacctcgcaaaccccatgcgccgggacaccgtgaccgttcccgccttcagccacgtagtcctacgcttcttagccgacaacccagggctctgggctctgcattgtcatgttgcttggcatatggaaggcgggatgttcgtctccctagccgaaaggccgaatgatctcaccacgcttctatcctccatggacgaagacactcggagactcagccagagtttctgtggtcctggcacttacgtagtcttaagttttgtgtcacaaaatggcccgcttattcgggttaccacctga

SEQ ID NO: 8166 - protein, 642 aa, Muscodor strobelii
  misc_feature: SGI Peptide ID NO. 562501
  misc_feature (183)..(361): Pfam Id: PF00394 Pfam Desc: Multicopper oxidase
  misc_feature (467)..(600): Pfam Id: PF07731 Pfam Desc: Multicopper oxidase
  misc_feature (57)..(175): Pfam Id: PF07732 Pfam Desc: Multicopper oxidase
  misc_feature (183)..(353): Pfam Id: PF00394 Pfam Desc: Multicopper oxidase
  misc_feature (498)..(600): Pfam Id: PF07731 Pfam Desc: Multicopper oxidase
  misc_feature (26)..(620): NCBI GI: 171690630 Blast Desc: protein product [Podospora anserina] gi|170945263|emb|CAP71374.1| protein product [Podospora anserina]
  misc_feature (7)..(620): NCBI GI: 39972953 Blast Desc: MGG_07771 [Magnaporthe grisea 70-15] gi|145012543|gb|EDJ97197.1| MGG_07771 [Magnaporthe grisea 70-15]
  misc_feature (32)..(604): NCBI GI: 145611248 Blast Desc: MGG_00551 [Magnaporthe grisea 70-15] gi|145018548|gb|EDK02827.1| MGG_00551 [Magnaporthe grisea 70-15]
  misc_feature (7)..(609): NCBI GI: 42602104 Blast Desc: multicopper oxidase 3B [Phanerochaete chrysosporium]
  misc_feature (50)..(604): NCBI GI: 42602098 Blast Desc: multicopper oxidase 2A [Phanerochaete chrysosporium]
  misc_feature (44)..(599): NCBI GI: 148888431 Blast Desc: laccase [Phanerochaete flavidoalba]
  misc_feature (27)..(604): NCBI GI: 28416421 Blast Desc: extracellular multicopper oxidase [Phanerochaete chrysosporium]
  misc_feature (50)..(609): NCBI GI: 40218020 Blast Desc: multicopper oxidase [Auricularia auricula-judae]
  misc_feature (10)..(610): NCBI GI: 46126599 Blast Desc: FG07677.1 [Gibberella zeae PH-1]
  misc_feature (52)..(599): NCBI GI: 242214915 Blast Desc: candidate multicopper oxidase [Postia placenta Mad-698-R] gi|220727635|gb|EED81548.1| candidate multicopper oxidase [Postia placenta Mad-698-R]
  misc_feature (36)..(612): SWISSPROT Homolog: EC 1.10.3.2 Laccase
MRTSLVAATPRNSSSSYGIPDDLEIIPIDQLVNSKELALDTGFLQSTDSQIREYVFNISQALASPDGFQKPMILVNGQSPGPLIEANTGDTIRVLVNNHMPNTSTTIHWHGIDQKNSTWMDGVTSVSQCGIPPGQSFTYEFQVDGQRGTFWWHAHLSVHYTDGLYGPLIIHDPKEMVPQTDSESILFIGDLYHTYGSVLLESYLNPTSEWVPFEAGVEPLPDNILLNGQNVYDCGVESTTFPIEASARIANISDVVCTGGQLHTTKTRTGQRLRLRLINSSSFLSYWFSIDNHTLSIVELDGVEISPITARGVYLNIGQRASVVVTANATAGNYYIRATLPQTCFLPYAPYTSSGLESVEYAVEGILSYDDVSVNEEPIGVKGNVSNPYGIENNGARGDVWEGCDDMPFDMPRPMREIAAYDVAERNVQFIEYAFRQAQDVNRIFINKTAYAPLPDNATLWKVTEQNFSPNESNSYNSWDFGLNQQVLLIPEANRGAQIVINSLDAMEHPWHLHGHTFQVVGWGPGLFGTHRSTDPNPNSTTTTWNLANPMRRDTVTVPAFSHVVLRFLADNPGLWALHCHVAWHMEGGMFVSLAERPNDLTTLLSSMDEDTRRLSQSFCGPGTYVVLSFVSQNGPLIRVTT

SEQ ID NO: 8167 - DNA, 1830 bp, Muscodor strobelii
  misc_feature: SGI cDNA ID NO. 562502
  misc_feature: Encodes the peptide sequence at SEQ ID NO 8168
atggacatcaccaccttcatcgtggccacgcgcaaccaggcgctcctctacggcgactacaccacctaccacaagctgcttgccaagaagctgcacaactcgcgcaagaagctgaacctcgtcaccaagaacagaggcaagttcgccagcaagggccgtgtcaccgccgaccagctcgcccagaaccatgagttcctccacctgctgctgctcaccgccgagcgcgcctgggcccacgccatgcgcctgaaggccgtccactccgccgagtccaaccgcatcaccggccacacccgcagccacatcatctcccgcctcgacaaggccgcccgcaccgccgagcacctcgtccagatcctgcccgccgccagcgatgtcgacgtgctcgaggccagagcttacgccgctatgctgcgcggagccgttggcttcgagaagcaggactgggagccctgtctacgcagctactccaccgcccgcatcgtctacaccgccctcatggcctcgatcaaaggcgatatcctcaaggacctgttgtccgagaccatcgacccttctatccgctacgccgcctaccagactaaggttccgcgtacgttggccatagctaccatcgccaggaaggcgtttgattccgaggaggatgaggaactggctgctcggatcaacaaagtcgcgcccagcgtattgaaacaggaggcgtcgggtgcccaagacggcacaggcagcgctgtgaatgcgccccagaccatcgtgtggaggtcgagagaggtcaagatcgaagatgcctccatagcccttgccctcgcctcgacagatacagccactgcccgattggctgagaaattgaagtcttccgacgttgtgcttcccaaggagatggcagcagcatacgacgacgtcttgatcgctagccaggacgctgccgacgctgccaaacacgccatagacgagcttaaagaggacggcgtttcgcagagcgatcctcgcatccagagattgcaagtcactcgtactgcggttacctaccagatgatcagctggagaattggtcgtaacagagtattgagtggcgagcacgatggtgccctcctagattcggctcctaataccaccagaaaatcaaagaaagaggccacagcgcggaaacccaagatcgaacccccggggagtaagatcgcccgactgaaggagaaggtcgtcctctacgatgctactttgcagagtttggattcgatcaaagaactgcctggtgttgccgctgacgataagttgatccaacaactggacgcgacaaataaatatttctatgcgctcaaatgtttgtcgatcgctcggtcgcactctttagttaaccagtcgtccaactccctcgctctgatcaagcacgcatatgaccagtgccaggagtctattgcattcttctctgataacggtgcatccaccgcagagtcactgctgttaaacattgagatccgccagactgacctagaatttctcaatactctcttgcagggagagttgcaacgttcccgtgcaattgttgagattgataatctgaaggagaaggccaagtcaacgtcgacacagaccaagatacctctgattgatagactacaagagtatcccgctgaggatgtggacttggagaacttggtcgaatacccccctaagattcaacctatcccagtcaagccactgtttttggatgtggcatggaattacattgattacccgggaaagacaccaacgactgctgtcgagtcccaggcaggagcggaggcgacccctgaacctaagaagagagggtggtttggatttggtcgatga

SEQ ID NO: 8168 - protein, 609 aa, Muscodor strobelii
  misc_feature: SGI Peptide ID NO. 562502
  misc_feature (1)..(609): NCBI GI: 261352293 Blast Desc: signal recognition particle 68 kDa protein [Verticillium albo-atrum VaMs.102]
  misc_feature (1)..(609): NCBI GI: 164426357 Blast Desc: NCU10927 [Neurospora crassa OR74A] gi|157071303|gb|EDO65231.1| conserved [Neurospora crassa OR74A]
  misc_feature (1)..(609): NCBI GI: 39944358 Blast Desc: MGG_04190 [Magnaporthe grisea 70-15] gi|145014927|gb|EDJ99495.1| MGG_04190 [Magnaporthe grisea 70-15]
  misc_feature (1)..(609): NCBI GI: 171690632 Blast Desc: protein product [Podospora anserina] gi|170945264|emb|CAP71375.1| protein product [Podospora anserina]
  misc_feature (1)..(609): NCBI GI: 116196016 Blast Desc: CHGG_04606 [Chaetomium globosum CBS 148.51] gi|88180519|gb|EAQ87987.1| CHGG_04606 [Chaetomium globosum CBS 148.51]
  misc_feature (1)..(609): NCBI GI: 256726886 Blast Desc: NECHADRAFT_103399 [Nectria haematococca mpVI 77-13-4]
  misc_feature (1)..(609): NCBI GI: 46123557 Blast Desc: FG06156.1 [Gibberella zeae PH-1]
  misc_feature (1)..(609): NCBI GI: 154302185 Blast Desc: BC1G_09773 [Botryotinia fuckeliana B05.10] gi|150855547|gb|EDN30739.1| BC1G_09773 [Botryotinia fuckeliana B05.10]
  misc_feature (1)..(609): NCBI GI: 119189929 Blast Desc: CIMG_05012 [Coccidioides immitis RS]
  misc_feature (1)..(609): NCBI GI: 240111045 Blast Desc: CPC735_068800 [Coccidioides posadasii C735 delta SOWgp]
MDITTFIVATRNQALLYGDYTTYHKLLAKKLHNSRKKLNLVTKNRGKFASKGRVTADQLAQNHEFLHLLLLTAERAWAHAMRLKAVHSAESNRITGHTRSHIISRLDKAARTAEHLVQILPAASDVDVLEARAYAAMLRGAVGFEKQDWEPCLRSYSTARIVYTALMASIKGDILKDLLSETIDPSIRYAAYQTKVPRTLAIATIARKAFDSEEDEELAARINKVAPSVLKQEASGAQDGTGSAVNAPQTIVWRSREVKIEDASIALALASTDTATARLAEKLKSSDVVLPKEMAAAYDDVLIASQDAADAAKHAIDELKEDGVSQSDPRIQRLQVTRTAVTYQMISWRIGRNRVLSGEHDGALLDSAPNTTRKSKKEATARKPKIEPPGSKIARLKEKVVLYDATLQSLDSIKELPGVAADDKLIQQLDATNKYFYALKCLSIARSHSLVNQSSNSLALIKHAYDQCQESIAFFSDNGASTAESLLLNIEIRQTDLEFLNTLLQGELQRSRAIVEIDNLKEKAKSTSTQTKIPLIDRLQEYPAEDVDLENLVEYPPKIQPIPVKPLFLDVAWNYIDYPGKTPTTAVESQAGAEATPEPKKRGWFGFGR

SEQ ID NO: 8169 - DNA, 2225 bp, Muscodor strobelii
  misc_feature: SGI EST ID NO. CUFF.19988.0
  misc_feature: Variant of the nucleotide sequence at SEQ ID NO 8167
ccccactaataattattgccagccaaatcgcagcgacatcgaccgcacacgacccttcgcaagagaggtacatgtgaccgactatctggccgcgttcttaccgggtatcgctctatccctcagacaacacgtaacgtgccagcgtcgtactgcgctcggctcggttgtcttccggtattgtccaatattggccaccgcgggggaatgacaagacgagcgacagacggcccgccatggacatcaccaccttcatcgtggccacgcgcaaccaggcgctcctctacggcgactacaccacctaccacaagctgcttgccaagaagctgcacaactcgcgcaagaagctgaacctcgtcaccaagaacagaggcaagttcgccagcaagggccgtgtcaccgccgaccagctcgcccagaaccatgagttcctccacctgctgctgctcaccgccgagcgcgcctgggcccacgccatgcgcctgaaggccgtccactccgccgagtccaaccgcatcaccggccacacccgcagccacatcatctcccgcctcgacaaggccgcccgcaccgccgagcacctcgtccagatcctgcccgccgccagcgatgtcgacgtgctcgaggccagagcttacgccgctatgctgcgcggagccgttggcttcgagaagcaggactgggagccctgtctacgcagctactccaccgcccgcatcgtctacaccgccctcatggcctcgatcaaaggcgatatcctcaaggacctgttgtccgagaccatcgacccttctatccgctacgccgcctaccagactaaggttccgcgtacgttggccatagctaccatcgccaggaaggcgtttgattccgaggaggatgaggaactggctgctcggatcaacaaagtcgcgcccagcgtattgaaacaggaggcgtcgggtgcccaagacggcacaggcagcgctgtgaatgcgccccagaccatcgtgtggaggtcgagagaggtcaagatcgaagatgcctccatagcccttgccctcgcctcgacagatacagccactgcccgattggctgagaaattgaagtcttccgacgttgtgcttcccaaggagatggcagcagcatacgacgacgtcttgatcgctagccaggacgctgccgacgctgccaaacacgccatagacgagcttaaagaggacggcgtttcgcagagcgatcctcgcatccagagattgcaagtcactcgtactgcggttacctaccagatgatcagctggagaattggtcgtaacagagtattgagtggcgagcacgatggtgccctcctagattcggctcctaataccaccagaaaatcaaagaaagaggccacagcgcggaaacccaagatcgaacccccggggagtaagatcgcccgactgaaggagaaggtcgtcctctacgatgctactttgcagagtttggattcgatcaaagaactgcctggtgttgccgctgacgataagttgatccaacaactggacgcgacaaataaatatttctatgcgctcaaatgtttgtcgatcgctcggtcgcactctttagttaaccagtcgtccaactccctcgctctgatcaagcacgcatatgaccagtgccaggagtctattgcattcttctctgataacggtgcatccaccgcagagtcactgctgttaaacattgagatccgccagactgacctagaatttctcaatactctcttgcagggagagttgcaacgttcccgtgcaattgttgagattgataatctgaaggagaaggccaagtcaacgtcgacacagaccaagatacctctgattgatagactacaagagtatcccgctgaggatgtggacttggagaacttggtcgaatacccccctaagattcaacctatcccagtcaagccactgtttttggatgtggcatggaattacattgattacccgggaaagacaccaacgactgctgtcgagtcccaggcaggagcggaggcgacccctgaacctaagaagagagggtggtttggatttggtcgatgatagaagtcacatagctcctagcatcgcattaatgaaagcctcgtcaagaagaagcaccatttcagaacggttagctcgcttgtctcatattttgaagaacccctagatgccactagtaaaattgtctcggttgtacgcgacctgcgacataacatatctggc

SEQ ID NO: 8170 - DNA, 2538 bp, Muscodor strobelii
  misc_feature: SGI cDNA ID NO. 562503
  misc_feature: Encodes the peptide sequence at SEQ ID NO 8171
atgcgtcgtctttggtcttatgtcgtgctgctcatagcagccagtctgcatatccccttgatcagtggacaatcgtccaccgctaccgtatacaccgacagcaagaccggcatcactttcgacacatggatcgtgcccaacaccgccactggcggtacggggacgacgacttggggaggcttgacctttggcatggctcttccgtcaacggcgttgaccactgatgcgacagaattcattgggtacttgcaatgtcctagcaatagcactacgctcactggttggtgtggtatctcgttgggaggtcccatgaccaacagtctgcttctcatggcctggccatacaagacccagatcatgacctcgttccgctttgcaactggctacgatactcctgaactgtacacgggcaatgctaagctgacacaaatctcctctaccgtgaactccacgcactatactttgatcttccgatgccagaattgcttgtcgtggagtcaggacggtgcgactggttcggcatctacgagctcgggctttatggtgctcggctgggctaacgcctttccttctccttcaaaccctggctgcccgactgacaccaatgatgtcgtggaacacgacaatggtcaaagcattttcggtgctgtatttgatagcaatattgctaacccttcgtactcatcctgggtaacgaaggctaccgccactgtgaccggaacttgctcatcaactaccacaacctccacccctactgctactgttaccggcgttccggtaccaacagcaacatatgattacatcgtggttggtggcggcgctggcggtatacccattgctgacaagctttcagaagctgggaagaaggtcctgttgattgagaaaggacctcctagctcaggacgttggggcggaacgatcaaaccagactggctggacggaaccaatctgacacgcttcgatgtaccaggtctatgtaatgaaatctgggaggactctgctggtattgcctgcactgatactgaccagatggctggttgtgtgttgggaggaggcactgctatcaacgccggactgtggtggaagccttacagtctggattgggactacaacttcccaagcggatggcagtcgaaagacatgactagtgctacctcaagagtcttctctcgaattccgggcactgaccatccgtcgaaggatggccaactatatcttcaacagggctataatgtcattgccggtggcttggctgcttccggatggagtaacgttactgcgaacaatgttcctgatcaaaagaatcacactttctcccatacgccattcatgttttctaacggagaacgaggaggtccaatggccacctatctggtcacagctaaagcacgatcaaacttcaacttgtggacgagtacagcggtgaagcgcgtcattcgtaccggtgggcacatcactggtgtcgaagtcgagccgtatcttaacggcggatacaaaggagtcgtcaatgtgacggcaatttccggccgagtcatcttatctgcgggcacgttcggctcagccaagcttcttctccgcagtggtatcggccctcaggatcaactgcaggtcgtcaagagctcggcgatagatggtgcaactatgatttcgaataactcttggattaatctccccgtcggttataaccttgacgatcacgtcaacacggacaccgtcgtcacacatccctctgtagtattttatgacttttacgaagcatatgatacccctaacaccaccgataagaacttgtatctcaacaaacggttcggcatcctggcgcaagctgcaccaaatattggtcctatgttcttcgatcagatcaagggcgccgatggtgtcgtacgacagcttgaatggactgcaagagtcgaaggctcagatggtactcctaacggtcaggccattacgatgagtcagtaccttggacgcggagctaagtctcgcggtagaatgaccatcacaccggcgctttctaccgttgtgtctacattgccatatctgaatgacaagaatgatgtggcggctgtcattcaaggcatcaagaacttgcagtctgccctcgctaatgtcaaaaatcttacgtggacgtatcccccagcaggaacgaccgtcgaagattttgtcaataatatggtggtctcatactcgaaccgaaggtccaaccactggatcggaacgagcaagctcggaactgatgacggtcgtgccaacggcggaacttcaggttcagtcgttgatttgaactgccaggtttatggaacagataacttattcgtcgtcgatgctagcatcttccctggccacgttacaacaaatccctcggcgtacatcgtaattgcggctgagcatgcctatgacagaatcaatgcattgaaaccggcgactgcactggcgcaatactcccagtgcggtggagctagttatttaggctcgttccaatgcgcagcgccatatacgtgtcaataccagaacgcgtattattcacagtgcctttag

SEQ ID NO: 8171 - protein, 845 aa, Muscodor strobelii
  misc_feature: SGI Peptide ID NO. 562503
  misc_feature (813)..(841): Pfam Id: PF00734 Pfam Desc: Fungal cellulose binding domain
  misc_feature (652)..(798): Pfam Id: PF05199 Pfam Desc: GMC oxidoreductase
  misc_feature (265)..(581): Pfam Id: PF00732 Pfam Desc: GMC oxidoreductase
  misc_feature (266)..(301): Pfam Id: PF01266 Pfam Desc: FAD dependent oxidoreductase
  misc_feature (266)..(301): Pfam Id: PF00890 Pfam Desc: FAD binding domain
  misc_feature (734)..(798): Pfam Id: PF05199 Pfam Desc: GMC oxidoreductase
  misc_feature (421)..(536): Pfam Id: PF00732 Pfam Desc: GMC oxidoreductase
  misc_feature (1)..(843): NCBI GI: 145616732 Blast Desc: MGG_11036 [Magnaporthe grisea 70-15] gi|145023159|gb|EDK06699.1| MGG_11036 [Magnaporthe grisea 70-15]
  misc_feature (12)..(845): NCBI GI: 171685626 Blast Desc: protein product [Podospora anserina] gi|170942774|emb|CAP68427.1| protein product [Podospora anserina]
  misc_feature (24)..(845): NCBI GI: 3319315 Blast Desc: cellobiose dehydrogenase [Myceliophthora thermophila]
  misc_feature (1)..(845): NCBI GI: 116208174 Blast Desc: CHGG_03380 [Chaetomium globosum CBS 148.51] gi|88183977|gb|EAQ91445.1| CHGG_03380 [Chaetomium globosum CBS 148.51]
  misc_feature (10)..(845): NCBI GI: 85080721 Blast Desc: NCU00206 [Neurospora crassa OR74A] gi|28917661|gb|EAA27355.1| NCU00206 [Neurospora crassa OR74A]
  misc_feature (1)..(805): NCBI GI: 119482417 Blast Desc: cellobiose dehydrogenase [Neosartorya fischeri NRRL 181] gi|119409391|gb|EAW19340.1| cellobiose dehydrogenase [Neosartorya fischeri NRRL 181]
  misc_feature (24)..(845): NCBI GI: 164597964 Blast Desc: cellobiose dehydrogenase [Myriococcum thermophilum]
  misc_feature (24)..(845): NCBI GI: 152958098 Blast Desc: cellobiose dehydrogenase [Myriococcum thermophilum]
  misc_feature (11)..(806): NCBI GI: 121717196 Blast Desc: cellobiose dehydrogenase [Aspergillus clavatus NRRL 1] gi|119404194|gb|EAW14611.1| cellobiose dehydrogenase [Aspergillus clavatus NRRL 1]
  misc_feature (11)..(805): NCBI GI: 159130152 Blast Desc: cellobiose dehydrogenase [Aspergillus fumigatus A1163]
  misc_feature (76)..(805): SWISSPROT Homolog: EC 1.1.99.18 Cellobiose dehydrogenase (acceptor)
MRRLWSYVVLLIAASLHIPLISGQSSTATVYTDSKTGITFDTWIVPNTATGGTGTTTWGGLTFGMALPSTALTTDATEFIGYLQCPSNSTTLTGWCGISLGGPMTNSLLLMAWPYKTQIMTSFRFATGYDTPELYTGNAKLTQISSTVNSTHYTLIFRCQNCLSWSQDGATGSASTSSGFMVLGWANAFPSPSNPGCPTDTNDVVEHDNGQSIFGAVFDSNIANPSYSSWVTKATATVTGTCSSTTTTSTPTATVTGVPVPTATYDYIVVGGGAGGIPIADKLSEAGKKVLLIEKGPPSSGRWGGTIKPDWLDGTNLTRFDVPGLCNEIWEDSAGIACTDTDQMAGCVLGGGTAINAGLWWKPYSLDWDYNFPSGWQSKDMTSATSRVFSRIPGTDHPSKDGQLYLQQGYNVIAGGLAASGWSNVTANNVPDQKNHTFSHTPFMFSNGERGGPMATYLVTAKARSNFNLWTSTAVKRVIRTGGHITGVEVEPYLNGGYKGVVNVTAISGRVILSAGTFGSAKLLLRSGIGPQDQLQVVKSSAIDGATMISNNSWINLPVGYNLDDHVNTDTVVTHPSVVFYDFYEAYDTPNTTDKNLYLNKRFGILAQAAPNIGPMFFDQIKGADGVVRQLEWTARVEGSDGTPNGQAITMSQYLGRGAKSRGRMTITPALSTVVSTLPYLNDKNDVAAVIQGIKNLQSALANVKNLTWTYPPAGTTVEDFVNNMVVSYSNRRSNHWIGTSKLGTDDGRANGGTSGSVVDLNCQVYGTDNLFVVDASIFPGHVTTNPSAYIVIAAEHAYDRINALKPATALAQYSQCGGASYLGSFQCAAPYTCQYQNAYYSQCL

SEQ ID NO: 8172 - DNA, 2040 bp, Muscodor strobelii
  misc_feature: SGI EST ID NO. CUFF.19996.0
  misc_feature: Variant of the nucleotide sequence at SEQ ID NO 8170
tcaactaccacaacctccacccctactgctactgttaccggcgttccggtaccaacagcaacatatgattacatcgtggttggtggcggcgctggcggtatacccattgctgacaagctttcagaagctgggaagaaggtcctgttgattgagaaaggacctcctagctcaggacgttggggcggaacgatcaaaccagactggctggacggaaccaatctgacacgcttcgatgtaccaggtctatgtaatgaaatctgggaggactctgctggtattgcctgcactgatactgaccagatggctggttgtgtgttgggaggaggcactgctatcaacgccggactgtggtggaagccttacagtctggattgggactacaacttcccaagcggatggcagtcgaaagacatgactagtgctacctcaagagtcttctctcgaattccgggcactgaccatccgtcgaaggatggccaactatatcttcaacagggctataatgtcattgccggtggcttggctgcttccggatggagtaacgttactgcgaacaatgttcctgatcaaaagaatcacactttctcccatacgccattcatgttttctaacggagaacgaggaggtccaatggccacctatctggtcacagctaaagcacgatcaaacttcaacttgtggacgagtacagcggtgaagcgcgtcattcgtaccggtgggcacatcactggtgtcgaagtcgagccgtatcttaacggcggatacaaaggagtcgtcaatgtgacggcaatttccggccgagtcatcttatctgcgggcacgttcggctcagccaagcttcttctccgcagtggtatcggccctcaggatcaactgcaggtcgtcaagagctcggcgatagatggtgcaactatgatttcgaataactcttggattaatctccccgtcggttataaccttgacgatcacgtcaacacggacaccgtcgtcacacatccctctgtagtattttatgacttttacgaagcatatgatacccctaacaccaccgataagaacttgtatctcaacaaacggttcggcatcctggcgcaagctgcaccaaatattggtcctatgttcttcgatcagatcaagggcgccgatggtgtcgtacgacagcttgaatggactgcaagagtcgaaggctcagatggtactcctaacggtcaggccattacgatgagtcagtaccttggacgcggagctaagtctcgcggtagaatgaccatcacaccggcgctttctaccgttgtgtctacattgccatatctgaatgacaagaatgatgtggcggctgtcattcaaggcatcaagaacttgcagtctgccctcgctaatgtcaaaaatcttacgtggacgtatcccccagcaggaacgaccgtcgaagattttgtcaataatatggtggtctcatactcgaaccgaaggtccaaccactggatcggaacgagcaagctcggaactgatgacggtcgtgccaacggcggaacttcaggttcagtcgttgatttgaactgccaggtttatggaacagataacttattcgtcgtcgatgctagcatcttccctggccacgttacaacaaatccctcggcgtacatcgtaattgcggctgagcatgcctatgacagaatcaatgcattgaaaccggcgactgcactggcgcaatactcccagtgcggtggagctagttatttaggctcgttccaatgcgcagcgccatatacgtgtcaataccagaacgcgtattattcacagtgcctttagacaaatgttacacgatggatgcatttgactgtatatacgcgtcttcagtgtctagaaataagaaattacataacagatattttgcaaaccgtgtgaaacatatcgtgacatgcgcacggattgtcgtattggtgtatatgacctgagcgtcatcctgtcactctccctcgtctcactaacgactacgaataatgaatgatcgactatgggaagacataatgttaaaaccgt

SEQ ID NO: 8173 - DNA, 999 bp, Muscodor strobelii
  misc_feature: SGI cDNA ID NO. 562504
  misc_feature: Encodes the peptide sequence at SEQ ID NO 8174
atgctccgacccagattccgaatacccttagcccgctccaatctacattgggctctgggccggtctcacaacatcaggaacaccacgaaactacggtacctgtcctcttcccccaagaccgacgctctcgagtccggctcgcagacaactcctggggccaacgcgccgacagtctcggaggtctactcacacaatgccaacataacacgaccaatccccgagcccaaacccgatgccccggctcccgccccggccgcagttccgtccttgccattagcaataccattatggcagcgcctcgggcctctcaccagggccggccgagcatatggccgagcccacagctcgcgaccctgggcaacccaattcgtaaccacagtcacaatctggttcatcgccgacacaaccgcacaatggatcggccgcagcgtcgacagtcccgaccatgacaccgcccacctccccacagacgagatccctcagccgaagcgatcccacgactggtatcgcaccgcccgctccctcgccataggcggttccgccgccatcccgggctacatctggttcaaatggctctcggtatccttcgcctaccgctccaagctgctctcgattctcgcgcaagtcgccctgcaccagttcacgttcacccccatcttcaacgcctatttcttcggcatgcaggcccttctctccggcgacagcttctccgacgcctggcgccgcgtcactaacacggtgcccacgagctgggtcaactcgctgaagttgtggccggccgtcatggccttcaattttgcgtttataccctttgcctacaggagtatagtctccggcaccgtcgccgtcggctggcagacgtatttgagttttctgaatgcgaaggccgagaagatggagaggcttaggaagagggaagagagacttagaggtctggaggtaggtgccgagttaggtgccgaggtcgatgcgcctagccgtgttttggctgcagcttag

SEQ ID NO: 8174 - protein, 332 aa, Muscodor strobelii
  misc_feature: SGI Peptide ID NO. 562504
  misc_feature (229)..(298): Pfam Id: PF04117 Pfam Desc: Mpv17 / PMP22 family
  misc_feature (257)..(298): Pfam Id: PF04117 Pfam Desc: Mpv17 / PMP22 family
  misc_feature (67)..(293): NCBI GI: 261352786 Blast Desc: conserved [Verticillium albo-atrum VaMs.102]
  misc_feature (38)..(319): NCBI GI: 189200537 Blast Desc: conserved [Pyrenophora tritici-repentis Pt-1C-BFP] gi|187983704|gb|EDU49192.1| conserved [Pyrenophora tritici-repentis Pt-1C-BFP]
  misc_feature (87)..(300): NCBI GI: 256728854 Blast Desc: NECHADRAFT_7689 [Nectria haematococca mpVI 77-13-4]
  misc_feature (64)..(293): NCBI GI: 39949848 Blast Desc: MGG_08815 [Magnaporthe grisea 70-15] gi|145009371|gb|EDJ94082.1| MGG_08815 [Magnaporthe grisea 70-15]
  misc_feature (75)..(297): NCBI GI: 85104765 Blast Desc: NCU06533 [Neurospora crassa OR74A] gi|28923380|gb|EAA32569.1| conserved [Neurospora crassa OR74A]
  misc_feature (62)..(295): NCBI GI: 171691582 Blast Desc: protein product [Podospora anserina] gi|170945739|emb|CAP71852.1| protein product [Podospora anserina]
  misc_feature (73)..(313): NCBI GI: 240108476 Blast Desc: Mpv17/PMP22 family protein [Coccidioides posadasii C735 delta SOWgp]
  misc_feature (87)..(320): NCBI GI: 46138929 Blast Desc: FG10979.1 [Gibberella zeae PH-1]
  misc_feature (121)..(321): NCBI GI: 169622647 Blast Desc: SNOG_14550 [Phaeosphaeria nodorum SN15] gi|160704819|gb|EAT78090.2| SNOG_14550 [Phaeosphaeria nodorum SN15]
  misc_feature (25)..(313): NCBI GI: 145240335 Blast Desc: An08g06990 [Aspergillus niger] gi|134077330|emb|CAK45669.1| protein product [Aspergillus niger]
MLRPRFRIPLARSNLHWALGRSHNIRNTTKLRYLSSSPKTDALESGSQTTPGANAPTVSEVYSHNANITRPIPEPKPDAPAPAPAAVPSLPLAIPLWQRLGPLTRAGRAYGRAHSSRPWATQFVTTVTIWFIADTTAQWIGRSVDSPDHDTAHLPTDEIPQPKRSHDWYRTARSLAIGGSAAIPGYIWFKWLSVSFAYRSKLLSILAQVALHQFTFTPIFNAYFFGMQALLSGDSFSDAWRRVTNTVPTSWVNSLKLWPAVMAFNFAFIPFAYRSIVSGTVAVGWQTYLSFLNAKAEKMERLRKREERLRGLEVGAELGAEVDAPSRVLAAA

SEQ ID NO: 8175 - DNA, 1531 bp, Muscodor strobelii
  misc_feature: SGI EST ID NO. CUFF.19999.0
  misc_feature: Variant of the nucleotide sequence at SEQ ID NO 8173
cggacatcccccaccggatatcctcggagcggtatcgaagtgaaagcgacttgtcagcgaaatcttatttcgctctgtttccgatgtaaacttcacgcactcatggtctctagatctactttactccttgcgttgctgtgacagtgctcaggtactctactccaccctcgcgcggcgtccccgggaaaggctctgggcctgcggaacgccatgctccgacccagattccgaatacccttagcccgctccaatctacattgggctctgggccggtctcacaacatcaggaacaccacgaaactacggtacctgtcctcttcccccaagaccgacgctctcgagtccggctcgcagacaactcctggggccaacgcgccgacagtctcggaggtctactcacacaatgccaacataacacgaccaatccccgagcccaaacccgatgccccggctcccgccccggccgcagttccgtccttgccattagcaataccattatggcagcgcctcgggcctctcaccagggccggccgagcatatggccgagcccacagctcgcgaccctgggcaacccaattcgtaaccacagtcacaatctggttcatcgccgacacaaccgcacaatggatcggccgcagcgtcgacagtcccgaccatgacaccgcccacctccccacagacgagatccctcagccgaagcgatcccacgactggtatcgcaccgcccgctccctcgccataggcggttccgccgccatcccgggctacatctggttcaaatggctctcggtatccttcgcctaccgctccaagctgctctcgattctcgcgcaagtcgccctgcaccagttcacgttcacccccatcttcaacgcctatttcttcggcatgcaggcccttctctccggcgacagcttctccgacgcctggcgccgcgtcactaacacggtgcccacgagctgggtcaactcgctgaagttgtggccggccgtcatggccttcaattttgcgtttataccctttgcctacaggagtatagtctccggcaccgtcgccgtcggctggcagacgtatttgagttttctgaatgcgaaggccgagaagatggagaggcttaggaagagggaagagagacttagaggtctggaggtaggtgccgagttaggtgccgaggtcgatgcgcctagccgtgttttggctgcagcttagacggggtgcgacatgagtgagcgttgcatcgggtttcaatcgctgaaacgtttcttttgtttggattcggtatagatggatactaagatcaggtacatagacaatggggcatggtaaatacgatgcgatagagcggcccaggggcgttagaattaaggtatttatatggcctattagacgggtagatttggagtcatagtaaggcgaggatacctcgcatatataagtcttagataagtcttagatttcgttaaggagaccgggcaggtgagagtaaaaataaacgatacaattgaataccacaatatatataattccgaat

SEQ ID NO: 8176 - DNA, 969 bp, Muscodor strobelii
  misc_feature: SGI cDNA ID NO. 562505
  misc_feature: Encodes the peptide sequence at SEQ ID NO 8177
atggtgaccagcaaacaaaaggcgatggaacgagctatcgaattcctgctgaagaatgatactgatatgactattcagtccgagggtaaatctattctcttgctggcgttagagtcatccagcccgtgcataacggctaaagtcctgttgcgggctggcttctggaaatatgtcaacaagtcattcaattatttcacagatggtcagtgcacgtattcagcaaccaaatacgtcgagaaagtcttagagtctccagacaaagcggaacttctcaagcttctacgatccaaccgagcgatagacgtgtactacgcgaactctggaccacaaccggagggtgcagtaggcatgccggctcatattgaaattgaagagcaagaccgtcgagctcgtgctgaacggctccaaaaggaaaatgaagaccatgtcctcgctatccggagaaacaaggaattggcagccgtgcaggcacagatatgggcaaatcaagcagaatttgaagaagcacggaagaagcgcgcacacggggccgatctcgcggccttgcaggagcgtgctcgagtcgaagaagatctgttcaacgccgggttacgacaacaacgggcgaaacagaatgcagacttgcagcatcaggagaaacttaccagcgccagcgtaacgagggcacgggcgattggcgacgccgagctctcagtggagagccagaagcagacgaaattgttacaatgggagcgtgagatgggtagtgagagggtcggaaatgcaaaccagatctcgaaccttcggatacgagagcgcgaagagctggacaagctagaaaaggcagcggacgcgaggttcaagacgaggcttaaggagcagaagaaacttgtggatagccagagcgtgctggccgctagcttaaatggcgctgggcctggggcgaggaggcaaattgggttcgtgagtggcgaactgggtcctgactag

SEQ ID NO: 8177 - protein, 322 aa, Muscodor strobelii
  misc_feature: SGI Peptide ID NO. 562505
  misc_feature (1)..(315): NCBI GI: 256729607 Blast Desc: NECHADRAFT_83602 [Nectria haematococca mpVI 77-13-4]
  misc_feature (1)..(319): NCBI GI: 261352732 Blast Desc: conserved [Verticillium albo-atrum VaMs.102]
  misc_feature (1)..(319): NCBI GI: 145607337 Blast Desc: MGG_04177 [Magnaporthe grisea 70-15] gi|145014913|gb|EDJ99481.1| MGG_04177 [Magnaporthe grisea 70-15]
  misc_feature (1)..(315): NCBI GI: 46122627 Blast Desc: FG05691.1 [Gibberella zeae PH-1]
  misc_feature (1)..(319): NCBI GI: 116194786 Blast Desc: CHGG_03991 [Chaetomium globosum CBS 148.51] gi|88179904|gb|EAQ87372.1| CHGG_03991 [Chaetomium globosum CBS 148.51]
  misc_feature (1)..(319): NCBI GI: 40882177 Blast Desc: conserved [Neurospora crassa]
  misc_feature (1)..(316): NCBI GI: 164429417 Blast Desc: NCU04444 [Neurospora crassa OR74A] gi|157073471|gb|EAA28285.2| [Neurospora crassa OR74A]
  misc_feature (1)..(319): NCBI GI: 171683449 Blast Desc: protein product [Podospora anserina] gi|170941684|emb|CAP67338.1| protein product [Podospora anserina]
  misc_feature (9)..(322): NCBI GI: 225681865 Blast Desc: [Paracoccidioides brasiliensis Pb03]
  misc_feature (11)..(161): NCBI GI: 238837843 Blast Desc: conserved [Microsporum canis CBS 113480]
MVTSKQKAMERAIEFLLKNDTDMTIQSEGKSILLLALESSSPCITAKVLLRAGFWKYVNKSFNYFTDGQCTYSATKYVEKVLESPDKAELLKLLRSNRAIDVYYANSGPQPEGAVGMPAHIEIEEQDRRARAERLQKENEDHVLAIRRNKELAAVQAQIWANQAEFEEARKKRAHGADLAALQERARVEEDLFNAGLRQQRAKQNADLQHQEKLTSASVTRARAIGDAELSVESQKQTKLLQWEREMGSERVGNANQISNLRIREREELDKLEKAADARFKTRLKEQKKLVDSQSVLAASLNGAGPGARRQIGFVSGELGPD

SEQ ID NO: 8178 - DNA, 5074 bp, Muscodor strobelii
  misc_feature: SGI EST ID NO. CUFF.20015.0
  misc_feature: Variant of the nucleotide sequence at SEQ ID NO 8176
ctcggagggacgaccgaacacagcagagctgtcgcagtctttgattgcagcagtcagggcagggtgccttgccacagtcgaaaacctaagccaatcaactgcggactgtgacttcgacaaagctgctgccctgaagactgcgatcggactaggtagaagagatctcgtactcgctctcgtccttggtcgcaacccaccgaagcaatatggtatcaatgaagctttcgaacaacttatgaagctgcagagcatcaatccaaatgagaagagcgccatgaccgaaatccttctatgtgcgggggctggcggcgaaccagtggctaaagctttagttcacgcagccgcaacttactttcttgagctggttgacttgctggtatcatatggcgcgtcgatcgaatatgacgaggccatagccttgcgcaaagccgtttctaaagggaaagttgccctcgttgaagtaatgctcaacggaaaatctaatctcagcccaagccatgcgtcggaatgcgtcggactctttccaaaaaagataaggttcgaagagcgttacgcactcctgaactgtttcctcagaaaaggggcggctggttcggtccttgacgaggcgctaatcgactcctctgaagctggagacgtagaatctgcgaatctgcttgtaacgcccgtgttcttcgggagaagatctagccaccagaagcatatctcaagaggagcgtcaaatgagttgtcggaacggcatgaaactgcatcgacagattataaaggcgctcttgctctacaaattgcagtgaaaaagggcgacacggcaatagctggtgtgatactatcccagcggcctccaagccatgttgccctaactcaagtgtttcctagcacgcgaaaccttccacgtcccgaacgttatcacattaccgagttgtttcttcgagcaggactgtctgggccatgtgttgatgccgcactcatcaacgtcatagaggaacagcgacctcctcgccgtgacgacaaactcatcgctctcttacttcatcacgacatcgatgttaatttcaacgacgggagttgtattactgcggcgattgcgcaagaagacactcgccttctagaaaatcttcttgcaaagaagccaacgatacaaaccgtagctaaagctattccaaaggcgatggaagtgaagaatcatgccataaggttacatatcgtaaacgcgcttctcgcatcgggagctgctcaaggtggtacgcaagtctctacagctttggccacggcaattgtcgcaaatccgacggataaacaattgatcaaagctctgcttcagcaaggcaatgctgatgtcaacgctgatgctggctctgcgctggatctcgcggcgcaacatcaggatctagaagttttgcagcttgtcattggatttggtcgacctgacgaagcaagtctcgagcgcggtttggtagcgctcaagaagctcccaccttcacccgtaaaggcagagaaaatcaaggcgcttgtcttaaactcttccaagtcgacggacgctgttagtagtctcctaattgcggaagttcaaacgcttctaaaagcggatcctggagcgcggaatttttcatccctgaagactttattagccaacggagcagatgtcaatgcagaaaagggagaggctttaggtcgtgctatagctgcttctagcatgcaaatagtcgagatgttgttgacatcgaccccaacttcggaaactctagcatgggttatgccgcatgcacttcgaatccgggactcaatggacagattgacattcgcgcaaaagattctcgattgcggtattgaggccaaccctgcaaatgatgcactcgtacatgccattcggacttatccggatgatctaccactcatcacatcccttttggcgcgtgccaatacagaggacggtcaagcgctcatggaagcggtcaaagcagagaagcaagacatagttaacttgatattggccaagaagagcttcagtgtggatgtcctcaatacgagtttcgcagaagcaaccaaagttaaagacaagaggacgaggagtctgtcttgtaacagcctgttgaaagctggtgcgtcgggcgaggtagtctcagatgcattgctcgctgcagcctcagcaaatgatttagaattcggtgggatcctagtcaagaacggcggaagtgctgagcataaaaatggacaagccatcgtcgaagcctgcaagtctggttctgttggagtgttagaaatgctactaggtggtaacaacataatctcagaccaaatcttgcaaagaggctttcaagccgcgacacagatgggcgacttaaagaagcgagctgagatattcgaggtcttgctaaaatcgggagtctcaggtgaagtcgtagatatgcagctcgtctctgcagtccgctacggtgacgaagggaaagatttggtgaagcttctattattccacggcgcatctccggattactcgaacggcgaggcgattgaaaaagccgccaggaccgcttttcttgatggtctagagttgcttctaggcatcaataagactggcagcagtcagaagaaaccctcgtctcacagtctggtacgagctctcgatgcgtgttgggaactaaacagggacgccagatttactgtagttgactggatttttcgggcgggtatgcctgctccaaacagcgtgcacgccgctttgcaccgggccgtgagagaggaagagcctgaggagcgactcattcgacttctcatcaataaccgggcgtccgtggttgctagtgggtgcaagaccttgatcgatgcagcccacacattatcttccccgatgtttgcagagctattgaattctcgagtgactagtgaagatgcgtcattggtgttcagcaaagcattccaacccaacgataccgactcgtggctatctgaacgaggatttgaaattgcctcaagccttctcagaaaaggagccactggggatggcgtgggctctgttttgaccgctgtcctccggaaacacgtcacatcttcacaggctataacgaacagcttcgcagatttgcttttaaaccatggagcagatgtcaaccataatcacggcgaagccctgcagcttgcggccacgactggaaattctgagcttttggcacgactgcttagcgagaaccccaatactgaaacgctcacgttggcatttcagcgtctttttgatgcaaatatctccgaggatgagatatacagtaacatcaccttattctctgaatatcgacacggaaatgaccaggtagatgtcctcttcgcgcaacaaggctcggaaccagccatcgttaaggcgctgtcccgatatccccgcagcgttaaggtcttagaagcccttctggacgttggtttctatcatgaacaaatgatgacctacaaggtcgtcgatgaaaaaggagaagatgagaccataactattctaatagcgtggtgccaagataaatctcgagacgtctattactcgaaagactccacttatgctggctattgaggctcgacgccaggacgtggtaaaattactactacttgccggtgctaaagtagatatcactgacgcttttgggacgtctcccctttcccaggcgtctgctatcggaggtgatttggccatcactatgatgtctaatctacttgcagcgggagcacccaagaacgatggctcacttcacaatgcggcgcgagagttgaatctaccggccatgcaagtcttggtcgagtatggccatgatccggattttccaagccctatacatggtggacgaagcgcccttggagaattatgcctacatgcgtcagaatccatcgatatggtgaccagcaaacaaaaggcgatggaacgagctatcgaattcctgctgaagaatgatactgatatgactattcagtccgagggtaaatctattctcttgctggcgttagagtcatccagcccgtgcataacggctaaagtcctgttgcgggctggcttctggaaatatgtcaacaagtcattcaattatttcacagatggtcagtgcacgtattcagcaaccaaatacgtcgagaaagtcttagagtctccagacaaagcggaacttctcaagcttctacgatccaaccgagcgatagacgtgtactacgcgaactctggaccacaaccggagggtgcagtaggcatgccggctcatattgaaattgaagagcaagaccgtcgagctcgtgctgaacggctccaaaaggaaaatgaagaccatgtcctcgctatccggagaaacaaggaattggcagccgtgcaggcacagatatgggcaaatcaagcagaatttgaagaagcacggaagaagcgcgcacacggggccgatctcgcggccttgcaggagcgtgctcgagtcgaagaagatctgttcaacgccgggttacgacaacaacgggcgaaacagaatgcagacttgcagcatcaggagaaacttaccagcgccagcgtaacgagggcacgggcgattggcgacgccgagctctcagtggagagccagaagcagacgaaattgttacaatgggagcgtgagatgggtagtgagagggtcggaaatgcaaaccagatctcgaaccttcggatacgagagcgcgaagagctggacaagctagaaaaggcagcggacgcgaggttcaagacgaggcttaaggagcagaagaaacttgtggatagccagagcgtgctggccgctagcttaaatggcgctgggcctggggcgaggaggcaaattgggttcgtgagtggcgaactgggtcctgactagggacgaggacgttgataaaatggtcgctatctttcattcggaccatacgttcaggagattgagacagcaatcttttcatcagggtaaaagtgatgcgcactcgattacgggttgtatttaaattgtatagcagggacggataccacaaggcgtaattgcgtgtatggtagctattgacttctgcattaaacagatatgagtttctcatacaaactacttttgaatctactactatgcccacc

SEQ ID NO: 8179 - DNA, 5400 bp, Muscodor strobelii
  misc_feature: SGI cDNA ID NO. 562506
  misc_feature: Encodes the peptide sequence at SEQ ID NO 8180
atggcgtcaccgtctactcaagatcggattgcccggctccgccaaatgggtgatgaatttggtatcaatgaccgacttgaagcgtcaagagaacctcttgttcgtcctgagcgtccaccaacatttcgcacggaccgcgatgttctgattgcggaagagttgctccaaaatcagagaatagctgagtctcaacaacaatctaagggaagtcttgccagagcgttcacgagcagcaagaagaaaacatgggaatacaaggaaatatatggggcgttgttggcacatttgactagccaaggctcgccaggcgtggcagaggctctggttgcaaaactcaattccttaggtggcaatctgaaccttgcccaaaagagtcgaacgagcttgctcagcaggaggaaaagtctcgatttgtctgagcgcagtcaaattcttcatgtcgctgtgagaaatcaacagcttcagatggttcaagttctactaccatatgcggatgccttgattctagcctcggagggacgaccgaacacagcagagctgtcgcagtctttgattgcagcagtcagggcagggtgccttgccacagtcgaaaacctaagccaatcaactgcggactgtgacttcgacaaagctgctgccctgaagactgcgatcggactaggtagaagagatctcgtactcgctctcgtccttggtcgcaacccaccgaagcaatatggtatcaatgaagctttcgaacaacttatgaagctgcagagcatcaatccaaatgagaagagcgccatgaccgaaatccttctatgtgcgggggctggcggcgaaccagtggctaaagctttagttcacgcagccgcaacttactttcttgagctggttgacttgctggtatcatatggcgcgtcgatcgaatatgacgaggccatagccttgcgcaaagccgtttctaaagggaaagttgccctcgttgaagtaatgctcaacggaaaatctaatctcagcccaagccatgcgtcggaatgcgtcggactctttccaaaaaagataaggttcgaagagcgttacgcactcctgaactgtttcctcagaaaaggggcggctggttcggtccttgacgaggcgctaatcgactcctctgaagctggagacgtagaatctgcgaatctgcttgtaacgcccgtgttcttcgggagaagatctagccaccagaagcatatctcaagaggagcgtcaaatgagttgtcggaacggcatgaaactgcatcgacagattataaaggcgctcttgctctacaaattgcagtgaaaaagggcgacacggcaatagctggtgtgatactatcccagcggcctccaagccatgttgccctaactcaagtgtttcctagcacgcgaaaccttccacgtcccgaacgttatcacattaccgagttgtttcttcgagcaggactgtctgggccatgtgttgatgccgcactcatcaacgtcatagaggaacagcgacctcctcgccgtgacgacaaactcatcgctctcttacttcatcacgacatcgatgttaatttcaacgacgggagttgtattactgcggcgattgcgcaagaagacactcgccttctagaaaatcttcttgcaaagaagccaacgatacaaaccgtagctaaagctattccaaaggcgatggaagtgaagaatcatgccataaggttacatatcgtaaacgcgcttctcgcatcgggagctgctcaaggtggtacgcaagtctctacagctttggccacggcaattgtcgcaaatccgacggataaacaattgatcaaagctctgcttcagcaaggcaatgctgatgtcaacgctgatgctggctctgcgctggatctcgcggcgcaacatcaggatctagaagttttgcagcttgtcattggatttggtcgacctgacgaagcaagtctcgagcgcggtttggtagcgctcaagaagctcccaccttcacccgtaaaggcagagaaaatcaaggcgcttgtcttaaactcttccaagtcgacggacgctgttagtagtctcctaattgcggaagttcaaacgcttctaaaagcggatcctggagcgcggaatttttcatccctgaagactttattagccaacggagcagatgtcaatgcagaaaagggagaggctttaggtcgtgctatagctgcttctagcatgcaaatagtcgagatgttgttgacatcgaccccaacttcggaaactctagcatgggttatgccgcatgcacttcgaatccgggactcaatggacagattgacattcgcgcaaaagattctcgattgcggtattgaggccaaccctgcaaatgatgcactcgtacatgccattcggacttatccggatgatctaccactcatcacatcccttttggcgcgtgccaatacagaggacggtcaagcgctcatggaagcggtcaaagcagagaagcaagacatagttaacttgatattggccaagaagagcttcagtgtggatgtcctcaatacgagtttcgcagaagcaaccaaagttaaagacaagaggacgaggagtctgtcttgtaacagcctgttgaaagctggtgcgtcgggcgaggtagtctcagatgcattgctcgctgcagcctcagcaaatgatttagaattcggtgggatcctagtcaagaacggcggaagtgctgagcataaaaatggacaagccatcgtcgaagcctgcaagtctggttctgttggagtgttagaaatgctactaggtggtaacaacataatctcagaccaaatcttgcaaagaggctttcaagccgcgacacagatgggcgacttaaagaagcgagctgagatattcgaggtcttgctaaaatcgggagtctcaggtgaagtcgtagatatgcagctcgtctctgcagtccgctacggtgacgaagggaaagatttggtgaagcttctattattccacggcgcatctccggattactcgaacggcgaggcgattgaaaaagccgccaggaccgcttttcttgatggtctagagttgcttctaggcatcaataagactggcagcagtcagaagaaaccctcgtctcacagtctggtacgagctctcgatgcgtgttgggaactaaacagggacgccagatttactgtagttgactggatttttcgggcgggtatgcctgctccaaacagcgtgcacgccgctttgcaccgggccgtgagagaggaagagcctgaggagcgactcattcgacttctcatcaataaccgggcgtccgtggttgctagtgggtgcaagaccttgatcgatgcagcccacacattatcttccccgatgtttgcagagctattgaattctcgagtgactagtgaagatgcgtcattggtgttcagcaaagcattccaacccaacgataccgactcgtggctatctgaacgaggatttgaaattgcctcaagccttctcagaaaaggagccactggggatggcgtgggctctgttttgaccgctgtcctccggaaacacgtcacatcttcacaggctataacgaacagcttcgcagatttgcttttaaaccatggagcagatgtcaaccataatcacggcgaagccctgcagcttgcggccacgactggaaattctgagcttttggcacgactgcttagcgagaaccccaatactgaaacgctcacgttggcatttcagcgtctttttgatgcaaatatctccgaggatgagatatacagtaacatcaccttattctctgaatatcgacacggaaatgaccaggtagatgtcctcttcgcgcaacaaggctcggaaccagccatcgttaaggcgctgtcccgatatccccgcagcgttaaggtcttagaagcccttctggacgttggtttctatcatgaacaaatgatgacctacaaggtcgtcgatgaaaaaggagaagatgagaccataactattctaatgtgggcattgttgcagccgcaaaagaaaattagcaccgccatcattaacgtgctgatagagcgtggtgccaagataaatctcgagacgtctattactcgaaagactccacttatgctggctattgaggctcgacgccaggacgtggtaaaattactactacttgccggtgctaaagtagatatcactgacgcttttgggacgtctcccctttcccaggcgtctgctatcggaggtgatttggccatcactatgatgtctaatctacttgcagcgggagcacccaagaacgatggctcacttcacaatgcggcgcgagagttgaatctaccggccatgcaagtcttggtcgagtatggccatgatccggattttccaagccctatacatggtggacgaagcgcccttggagaattatgcctacatgcgtcagaatccatcgatatggtgaccagcaaacaaaaggcgatggaacgagctatcgaattcctgctgaagaatgatactgatatgactattcagtccgagggtaaatctattctcttgctggcgttagagtcatccagcccgtgcataacggctaaagtcctgttgcgggctggcttctggaaatatgtcaacaagtcattcaattatttcacagatggtcagtgcacgtattcagcaaccaaatacgtcgagaaagtcttagagtctccagacaaagcggaacttctcaagcttctacgatccaaccgagcgatagacgtgtactacgcgaactctggaccacaaccggagggtgcagtaggcatgccggctcatattgaaattgaagagcaagaccgtcgagctcgtgctgaacggctccaaaaggaaaatgaagaccatgtcctcgctatccggagaaacaaggaattggcagccgtgcaggcacagatatgggcaaatcaagcagaatttgaagaagcacggaagaagcgcgcacacggggccgatctcgcggccttgcaggagcgtgctcgagtcgaagaagatctgttcaacgccgggttacgacaacaacgggcgaaacagaatgcagacttgcagcatcaggagaaacttaccagcgccagcgtaacgagggcacgggcgattggcgacgccgagctctcagtggagagccagaagcagacgaaattgttacaatgggagcgtgagatgggtagtgagagggtcggaaatgcaaaccagatctcgaaccttcggatacgagagcgcgaagagctggacaagctagaaaaggcagcggacgcgaggttcaagacgaggcttaaggagcagaagaaacttgtggatagccagagcgtgctggccgctagcttaaatggcgctgggcctggggcgaggaggcaaattgggttcgtgagtggcgaactgggtcctgactag

SEQ ID NO: 8180 - protein, 1799 aa, Muscodor strobelii
  misc_feature: SGI Peptide ID NO. 562506
  misc_feature (1362)..(1394): Pfam Id: PF00023 Pfam Desc: Ankyrin repeat
  misc_feature (1)..(1796): NCBI GI: 171683449 Blast Desc: protein product [Podospora anserina] gi|170941684|emb|CAP67338.1| protein product [Podospora anserina]
  misc_feature (9)..(1792): NCBI GI: 256729607 Blast Desc: NECHADRAFT_83602 [Nectria haematococca mpVI 77-13-4]
  misc_feature (22)..(1796): NCBI GI: 145607337 Blast Desc: MGG_04177 [Magnaporthe grisea 70-15] gi|145014913|gb|EDJ99481.1| MGG_04177 [Magnaporthe grisea 70-15]
  misc_feature (1)..(1796): NCBI GI: 261352732 Blast Desc: conserved [Verticillium albo-atrum VaMs.102]
  misc_feature (1)..(1792): NCBI GI: 46122627 Blast Desc: FG05691.1 [Gibberella zeae PH-1]
  misc_feature (46)..(1796): NCBI GI: 40882177 Blast Desc: conserved [Neurospora crassa]
  misc_feature (46)..(1793): NCBI GI: 164429417 Blast Desc: NCU04444 [Neurospora crassa OR74A] gi|157073471|gb|EAA28285.2| [Neurospora crassa OR74A]
  misc_feature (957)..(1796): NCBI GI: 116194786 Blast Desc: CHGG_03991 [Chaetomium globosum CBS 148.51] gi|88179904|gb|EAQ87372.1| CHGG_03991 [Chaetomium globosum CBS 148.51]
  misc_feature (48)..(738): NCBI GI: 116194786 Blast Desc: CHGG_03991 [Chaetomium globosum CBS 148.51] gi|88179904|gb|EAQ87372.1| CHGG_03991 [Chaetomium globosum CBS 148.51]
  misc_feature (356)..(1799): NCBI GI: 225681865 Blast Desc: [Paracoccidioides brasiliensis Pb03]
MASPSTQDRIARLRQMGDEFGINDRLEASREPLVRPERPPTFRTDRDVLIAEELLQNQRIAESQQQSKGSLARAFTSSKKKTWEYKEIYGALLAHLTSQGSPGVAEALVAKLNSLGGNLNLAQKSRTSLLSRRKSLDLSERSQILHVAVRNQQLQMVQVLLPYADALILASEGRPNTAELSQSLIAAVRAGCLATVENLSQSTADCDFDKAAALKTAIGLGRRDLVLALVLGRNPPKQYGINEAFEQLMKLQSINPNEKSAMTEILLCAGAGGEPVAKALVHAAATYFLELVDLLVSYGASIEYDEAIALRKAVSKGKVALVEVMLNGKSNLSPSHASECVGLFPKKIRFEERYALLNCFLRKGAAGSVLDEALIDSSEAGDVESANLLVTPVFFGRRSSHQKHISRGASNELSERHETASTDYKGALALQIAVKKGDTAIAGVILSQRPPSHVALTQVFPSTRNLPRPERYHITELFLRAGLSGPCVDAALINVIEEQRPPRRDDKLIALLLHHDIDVNFNDGSCITAAIAQEDTRLLENLLAKKPTIQTVAKAIPKAMEVKNHAIRLHIVNALLASGAAQGGTQVSTALATAIVANPTDKQLIKALLQQGNADVNADAGSALDLAAQHQDLEVLQLVIGFGRPDEASLERGLVALKKLPPSPVKAEKIKALVLNSSKSTDAVSSLLIAEVQTLLKADPGARNFSSLKTLLANGADVNAEKGEALGRAIAASSMQIVEMLLTSTPTSETLAWVMPHALRIRDSMDRLTFAQKILDCGIEANPANDALVHAIRTYPDDLPLITSLLARANTEDGQALMEAVKAEKQDIVNLILAKKSFSVDVLNTSFAEATKVKDKRTRSLSCNSLLKAGASGEVVSDALLAAASANDLEFGGILVKNGGSAEHKNGQAIVEACKSGSVGVLEMLLGGNNIISDQILQRGFQAATQMGDLKKRAEIFEVLLKSGVSGEVVDMQLVSAVRYGDEGKDLVKLLLFHGASPDYSNGEAIEKAARTAFLDGLELLLGINKTGSSQKKPSSHSLVRALDACWELNRDARFTVVDWIFRAGMPAPNSVHAALHRAVREEEPEERLIRLLINNRASVVASGCKTLIDAAHTLSSPMFAELLNSRVTSEDASLVFSKAFQPNDTDSWLSERGFEIASSLLRKGATGDGVGSVLTAVLRKHVTSSQAITNSFADLLLNHGADVNHNHGEALQLAATTGNSELLARLLSENPNTETLTLAFQRLFDANISEDEIYSNITLFSEYRHGNDQVDVLFAQQGSEPAIVKALSRYPRSVKVLEALLDVGFYHEQMMTYKVVDEKGEDETITILMWALLQPQKKISTAIINVLIERGAKINLETSITRKTPLMLAIEARRQDVVKLLLLAGAKVDITDAFGTSPLSQASAIGGDLAITMMSNLLAAGAPKNDGSLHNAARELNLPAMQVLVEYGHDPDFPSPIHGGRSALGELCLHASESIDMVTSKQKAMERAIEFLLKNDTDMTIQSEGKSILLLALESSSPCITAKVLLRAGFWKYVNKSFNYFTDGQCTYSATKYVEKVLESPDKAELLKLLRSNRAIDVYYANSGPQPEGAVGMPAHIEIEEQDRRARAERLQKENEDHVLAIRRNKELAAVQAQIWANQAEFEEARKKRAHGADLAALQERARVEEDLFNAGLRQQRAKQNADLQHQEKLTSASVTRARAIGDAELSVESQKQTKLLQWEREMGSERVGNANQISNLRIREREELDKLEKAADARFKTRLKEQKKLVDSQSVLAASLNGAGPGARRQIGFVSGELGPD

SEQ ID NO: 8181 - DNA, 5074 bp, Muscodor strobelii; identical to SEQ ID NO: 8178
  misc_feature: SGI EST ID NO. CUFF.20015.0
  misc_feature: Variant of the nucleotide sequence at SEQ ID NO 8179

SEQ ID NO: 8182 - DNA, 1119 bp, Muscodor strobelii
  misc_feature: SGI cDNA ID NO. 562507
  misc_feature: Encodes the peptide sequence at SEQ ID NO 8183
atgcctgtgggaactgtcctcatcactggtggcacgggctacatcggctctttcacctctctggctcttctcgagcacggctacgatgttgtcatcgtcgacagtctctacaactcctccgaggtcgctcttgaccgcatcgagctcatatgcggcaagcggccggccttccacaaggccgacctcactgatgagcccgccctcgacaaggtcttcgacgcccacccggccatcgacagtgtcatccacttcgctgctctcaaggccgtcggagagtctgccgagatccctctcgactattaccgcgtcaatgtcggtggcaccattgctctgctgagctccatgaagaagcacaacgtcaccaacattgtcttctcctcctccgctaccgtctacggcgatgccacacgctttgagaacatgatccccatccccgagcactgccctattggcccgacgaacacgtacggacggacaaaggccattgtcgagggcatcatcgaggacttcatcgctgccgagcgccaggccgccaagaaggccggaaagccctttgaacaatggaacggtgccaacctgcggtacttcaacccttgcggtgctcatcctaccggtatcatgggcgaggatcctcagggtgtcccctataacttgctcccactcctcgggaaagttgccacaggcgaccggcccaagctcctagtattcggagacgactactcctctcgcgacggcactgccattcgcgactacattcacgttgtggaccttgctcgaggccaccttgtggcgctcaacaatcttcgtgagaacaagccgggtgtcaaggcatggaacttgggatctggccgcggcagcactgtctttgaaatcattaaggccttcagttccgttgttggccgtgacctaccttacgaggtggtaccacggagacaaggagatgtcttagatctcacagccaaccccacaagagcaaaccaagagctcaattggaagacagaactcaccatggagaaggcctgcgaagacctgtggcggtgggtttcaaacaaccctaagggctaccgccaagagcctccagccgagctgctttccgcagtcaaggctaagacctcgtaa

SEQ ID NO: 8183 - protein, 372 aa, Muscodor strobelii
  misc_feature: SGI Peptide ID NO. 562507
  misc_feature (7)..(310): Pfam Id: PF01073 Pfam Desc: 3-beta hydroxysteroid dehydrogenase/isomerase family
  misc_feature (4)..(141): Pfam Id: PF00106 Pfam Desc: short chain dehydrogenase
  misc_feature (6)..(281): Pfam Id: PF01370 Pfam Desc: NAD dependent epimerase/dehydratase family
  misc_feature (8)..(258): Pfam Id: PF07993 Pfam Desc: Male sterility protein
  misc_feature (57)..(131): Pfam Id: PF01073 Pfam Desc: 3-beta hydroxysteroid dehydrogenase/isomerase family
  misc_feature (4)..(83): Pfam Id: PF00106 Pfam Desc: short chain dehydrogenase
  misc_feature (6)..(30): Pfam Id: PF05368 Pfam Desc: NmrA-like family
  misc_feature (1)..(372): NCBI GI: 46122623 Blast Desc: FG05689.1 [Gibberella zeae PH-1]
  misc_feature (1)..(368): NCBI GI: 39945784 Blast Desc: MGG_08012 [Magnaporthe grisea 70-15] gi|145019246|gb|EDK03474.1| MGG_08012 [Magnaporthe grisea 70-15]
  misc_feature (1)..(372): NCBI GI: 116194810 Blast Desc: CHGG_04003 [Chaetomium globosum CBS 148.51] gi|88179916|gb|EAQ87384.1| CHGG_04003 [Chaetomium globosum CBS 148.51]
  misc_feature (1)..(368): NCBI GI: 23266710 Blast Desc: AF439323_1 UDP-glucose 4-epimerase Gal10 [Hypocrea jecorina]
  misc_feature (1)..(369): NCBI GI: 171683445 Blast Desc: protein product [Podospora anserina] gi|170941682|emb|CAP67336.1| protein product [Podospora anserina]
  misc_feature (1)..(372): NCBI GI: 85085481 Blast Desc: GAL10 bifunctional protein [Neurospora crassa OR74A] gi|28918611|gb|EAA28283.1| GAL10 bifunctional protein [Neurospora crassa OR74A] gi|40882179|emb|CAF06005.1| UDP-glucose 4-epimerase
  misc_feature (1)..(368): NCBI GI: 154299682 Blast Desc: BC1G_11467 [Botryotinia fuckeliana B05.10] gi|150857157|gb|EDN32349.1| BC1G_11467 [Botryotinia fuckeliana B05.10]
  misc_feature (1)..(368): NCBI GI: 156049239 Blast Desc: UDP-glucose 4-epimerase Gal10 [Sclerotinia sclerotiorum 1980] gi|154692725|gb|EDN92463.1| UDP-glucose 4-epimerase Gal10 [Sclerotinia sclerotiorum 1980]
  misc_feature (1)..(372): NCBI GI: 189205915 Blast Desc: UDP-glucose 4-epimerase [Pyrenophora tritici-repentis Pt-1C-BFP] gi|187975385|gb|EDU42011.1| UDP-glucose 4-epimerase [Pyrenophora tritici-repentis Pt-1C-BFP]
  misc_feature (1)..(370): NCBI GI: 242777735 Blast Desc: UDP-glucose 4-epimerase [Talaromyces stipitatus ATCC 10500] gi|218722713|gb|EED22131.1| UDP-glucose 4-epimerase [Talaromyces stipitatus ATCC 10500]
  misc_feature (6)..(356): SWISSPROT Homolog: EC 5.1.3.2 UDP-glucose 4-epimerase
  misc_feature (6)..(356): SWISSPROT Homolog: EC 5.1.3.3 Aldose 1-epimerase
MPVGTVLITGGTGYIGSFTSLALLEHGYDVVIVDSLYNSSEVALDRIELICGKRPAFHKADLTDEPALDKVFDAHPAIDSVIHFAALKAVGESAEIPLDYYRVNVGGTIALLSSMKKHNVTNIVFSSSATVYGDATRFENMIPIPEHCPIGPTNTYGRTKAIVEGIIEDFIAAERQAAKKAGKPFEQWNGANLRYFNPCGAHPTGIMGEDPQGVPYNLLPLLGKVATGDRPKLLVFGDDYSSRDGTAIRDYIHVVDLARGHLVALNNLRENKPGVKAWNLGSGRGSTVFEIIKAFSSVVGRDLPYEVVPRRQGDVLDLTANPTRANQELNWKTELTMEKACEDLWRWVSNNPKGYRQEPPAELLSAVKAKTS

SEQ ID NO: 8184 - DNA, 2010 bp, Muscodor strobelii
  misc_feature: SGI EST ID NO. CUFF.20187.0
  misc_feature: Variant of the nucleotide sequence at SEQ ID NO 8182
ggacaatggacggacatgggcgggtccttggcttcgataatccactctaagtagaggggcttcgaggggcaagcggggccaggtaggtaggcgaggtaggtacatgtagtctatcgagtctgtttggaggggctgtggttagaggggctcattttccaagttgcctcctcaggtagctcctatcctcattatcacaccgcaacgaaggttctgatgcccagcccttaaggtattactatttccaccgcctcctgtcgccaacaataatagagactcttgataccaattccgccctcccatcacgttgcaatcagttgtctccaaacatgcctgtgggaactgtcctcatcactggtggcacgggctacatcggctctttcacctctctggctcttctcgagcacggctacgatgttgtcatcgtcgacagtctctacaactcctccgaggtcgctcttgaccgcatcgagctcatatgcggcaagcggccggccttccacaaggccgacctcactgatgagcccgccctcgacaaggtcttcgacgcccacccggccatcgacagtgtcatccacttcgctgctctcaaggcaagtccgagctctctgccgcgtacacccactcgtcgccctgccgtcgcctctctgaccgtgtgagatccaggccgtcggagagtctgccgagatccctctcgactattaccgcgtcaatgtcggtggcaccattgctctgctgagctccatgaagaagcacaacgtcaccaacattgtcttctcctcctccgctaccgtctacggcgatgccacacgctttgagaacatgatccccatccccgagcactgccctattggcccgacgaacacgtacggacggacaaaggccattgtcgagggcatcatcgaggacttcatcgctgccgagcgccaggccgccaagaaggccggaaagccctttgaacaatggaacggtgccaacctgcggtacttcaacccttgcggtgctcatcctaccggtatcatgggcgaggatcctcagggtgtcccctataacttgctcccactcctcgggaaagttgccacaggcgaccggcccaagctcctagtattcggagacgactactcctctcgcgacggcactgccattcgcgactacattcacgttgtggaccttgctcgaggccaccttgtggcgctcaacaatcttcgtgagaacaagccgggtgtcaaggcatggaacttgggatctggccgcggcagcactgtctttgaaatcattaaggccttcagttccgttgttggccgtgacctaccttacgaggtggtaccacggagacaaggagatgtcttagatctcacagccaaccccacaagagcaaaccaagagctcaattggaagacagaactcaccatggagaaggcctgcgaagacctgtggcggtgggtttcaaacaaccctaagggctaccgccaagagcctccagccgagctgctttccgcagtcaaggctaagacctcgtaagagaaatgcatatactgcgagtcattgctctacaattgacgggcggataatagaaaaaaaaaagaaatatagagcatttagagactgaagtttgaataataactgactgtcctgtcgcaacttgtcacaatataagctcgtgatagatactgtgtagtctcctgaatcacggtgaagctatttctccagatttagaatgcagcagcgttatgaatgacatacgtacctcaggaacatagaaaagatgacacccgatgaacttcgagatacaattgctaggtttcgggcagcgtaacttgcaaggatgtgtaagaattgccgtgtgcagtattccagattccggaacgatatggatggaccgcgcggcgtgcagggttgggagctgaaactcacagcttgcatctcttggcagtctctcgcagctgattttgggctttcgtgaggtagagtgcgatgaaacgctgggcggcgaagagcaaagtggagggtagt

SEQ ID NO: 8185 - DNA, 2577 bp, Muscodor strobelii
  misc_feature: SGI cDNA ID NO. 562508
  misc_feature: Encodes the peptide sequence at SEQ ID NO 8186
atggcccccaagacgaggaggaaagggtcaaagccggcctcggcggaccagtctcatcaaaagtcgccacagtctcaacaacaagcagcaggcctaccgagtttgttccctgcttatgatggatcgtacggtatcaacacgctcttagatacagatgcaaaggggcagaaggccaccaaatcaggcataaccaatgaaaaatcggacgaccagaaatggactaggtatatgcagggtgggcgaagcaagaagtacagcatggacagcgacttgaaaaacgcgatcaacactggcaatgaagaagttgagagagatcgccaagaaccagaaatctccgactcggcagacaatggctctcaccctccggacacgccttccactaatacaactcatccggtttcccctactaatcctgattacattgcgccccctcaatcctatatccccaaatatgatgttggaagggagcccttcatcgaggactatgatcaccagcctaaattaccgtatacgcgagcgcaactgccgacgctgaacgagcatgccgtcataggagtcagccaacccaaagcaccaccctacgagggcattccgttctacggattgccacaaggacaaggcgcaaaggaaccattttcgcccgtgcgtcctgatacgtctagaagcttcaactacgagagcgggcttttctcaaatgccactgttgaaaccccagcacatcacaagctccagcctgcaaaagaacctgaaaagccgcagcaggcagacaagccgcaagacatgccgatgaacgtagatcaggctaatcaagcgaagctcaaggagtatgcggaaagaaaggcagctcaagcagagaaagagcgcctcgagaacatgcaagactcgcaccaagttcatactcatcagcatacgatggaccaacaattttctcgcctgcagcctgatactcgcacaagcaaaacggcgacggtggtgaaacgaccagaaccccgatttgactcgcgaaagaagaaggaggaaggcaaggtagaaccaaatggactatggggaagaatttggtacacgatattcgtcatcatttcggtgctcgtcctcgtttccttactgaagctctccccccttgattccgagagcattcaaagaggattcagttggtctggcatgaagggaggtgtccccagtttggaatcagtattattcaatccgaagccatctccaagcgctcagaacccttccaaggtcgactatgataagctcttgaaggagttgcgcaaagacatgccggactacgtatgggtacacaaagataagaaagggcacttgaagattcctgaggacttttggcacgccctgagagatcttatcaaagatgatgatatgatactggagcttgagaatgcgaaaggtcaaccacctgagatatcaaacgatcattgggtggcggtgaaatcccggattgagaagagcggcctgttgtcttcccccaaaaacggcgatggtgggacaagtgcatcaaccaaagacgcttcagtatcgcatcaatcctgggaaacatggctagaaaacaacgccaagtctctgaagacgtctctaaaaggagtttttgtccccagagatgatttcatgaaactctttgaaaaggaggcatcatcttaccagaaagagatcaaaaaggagctcgcgaggcagcaggatcggatcgcagatattaccaagcagattgccagcattgttcatagccccagtggtcccggtgatggtggaatgagcagatccgaggtgaaacagctcgttgacaacattgtcacaaaggcaattaacaaggtaaagctgggtgccatcgcgaatggtcgaaatgacggccacgcaagtgacctgcttctcaaccaagtcaacttcttcagctatggagccggagctaggatcgatcctggatatacttcctctgcatgggaagggcctaaggccttttggaatggcaagaagtggatcgagaggacatataaaaagcagccgccattgtccgccctttcgacatgggccgaggagggtgaatgtttctgcgctgggccggaccgaaagggatttggtcagggtaccaataacatttctgtcctccttggtcgcgatatcattcctcagaatttggttgttgagcatattctgcctggcgcgacccttgatccaggtgcaataccaaaggagattgagctatgggcttatatacaggaaatcactcttcgcaatgaggtaaagaccttctcggagacgcagtttccgaacacgccgaaggagcaggtgcttgacgatggatgggtcaagatcgggcacttcaactatgagagtgatgctcaaggcaaaggcgtcaaaggtaatcgccgtacggaggtcttcccgctcaagtcggacctgacgacaatgaatgccgttgcgaaccagtttgtgattcgtgctctgaataaccatggtgcagaccacacatgtttctacagattgggattgtttggcgagatggtggagcgaccggaggactacacgtgggaccaagtgcctcagaaatcaggctggttctggtga

SEQ ID NO: 8186 - protein, 858 aa, Muscodor strobelii
  misc_feature: SGI Peptide ID NO. 562508
  misc_feature (391)..(836): NCBI GI: 256729790 Blast Desc: NECHADRAFT_95388 [Nectria haematococca mpVI 77-13-4]
  misc_feature (417)..(843): NCBI GI: 116194812 Blast Desc: CHGG_04004 [Chaetomium globosum CBS 148.51] gi|88179917|gb|EAQ87385.1| CHGG_04004 [Chaetomium globosum CBS 148.51]
  misc_feature (347)..(835): NCBI GI: 85085472 Blast Desc: NCU04440 [Neurospora crassa OR74A] gi|28918609|gb|EAA28281.1| [Neurospora crassa OR74A] gi|40882180|emb|CAF06006.1| [Neurospora crassa]
  misc_feature (420)..(840): NCBI GI: 171683443 Blast Desc: protein product [Podospora anserina] gi|170941681|emb|CAP67335.1| protein product [Podospora anserina]
  misc_feature (416)..(840): NCBI GI: 46122621 Blast Desc: FG05688.1 [Gibberella zeae PH-1]
  misc_feature (535)..(842): NCBI GI: 261352729 Blast Desc: conserved [Verticillium albo-atrum VaMs.102]
  misc_feature (417)..(847): NCBI GI: 145612001 Blast Desc: MGG_08013 [Magnaporthe grisea 70-15] gi|145019247|gb|EDK03475.1| MGG_08013 [Magnaporthe grisea 70-15]
  misc_feature (422)..(838): NCBI GI: 154299690 Blast Desc: BC1G_11471 [Botryotinia fuckeliana B05.10] gi|150857161|gb|EDN32353.1| BC1G_11471 [Botryotinia fuckeliana B05.10]
  misc_feature (420)..(836): NCBI GI: 189205913 Blast Desc: spindle pole body-associated protein sad1 [Pyrenophora tritici-repentis Pt-1C-BFP] gi|187975384|gb|EDU42010.1| spindle pole body-associated protein sad1 [Pyrenophora tritici-repentis
  misc_feature (628)..(838): NCBI GI: 115399568 Blast Desc: [Aspergillus terreus NIH2624] gi|114192256|gb|EAU33956.1| [Aspergillus terreus NIH2624]
MAPKTRRKGSKPASADQSHQKSPQSQQQAAGLPSLFPAYDGSYGINTLLDTDAKGQKATKSGITNEKSDDQKWTRYMQGGRSKKYSMDSDLKNAINTGNEEVERDRQEPEISDSADNGSHPPDTPSTNTTHPVSPTNPDYIAPPQSYIPKYDVGREPFIEDYDHQPKLPYTRAQLPTLNEHAVIGVSQPKAPPYEGIPFYGLPQGQGAKEPFSPVRPDTSRSFNYESGLFSNATVETPAHHKLQPAKEPEKPQQADKPQDMPMNVDQANQAKLKEYAERKAAQAEKERLENMQDSHQVHTHQHTMDQQFSRLQPDTRTSKTATVVKRPEPRFDSRKKKEEGKVEPNGLWGRIWYTIFVIISVLVLVSLLKLSPLDSESIQRGFSWSGMKGGVPSLESVLFNPKPSPSAQNPSKVDYDKLLKELRKDMPDYVWVHKDKKGHLKIPEDFWHALRDLIKDDDMILELENAKGQPPEISNDHWVAVKSRIEKSGLLSSPKNGDGGTSASTKDASVSHQSWETWLENNAKSLKTSLKGVFVPRDDFMKLFEKEASSYQKEIKKELARQQDRIADITKQIASIVHSPSGPGDGGMSRSEVKQLVDNIVTKAINKVKLGAIANGRNDGHASDLLLNQVNFFSYGAGARIDPGYTSSAWEGPKAFWNGKKWIERTYKKQPPLSALSTWAEEGECFCAGPDRKGFGQGTNNISVLLGRDIIPQNLVVEHILPGATLDPGAIPKEIELWAYIQEITLRNEVKTFSETQFPNTPKEQVLDDGWVKIGHFNYESDAQGKGVKGNRRTEVFPLKSDLTTMNAVANQFVIRALNNHGADHTCFYRLGLFGEMVERPEDYTWDQVPQKSGWFW

SEQ ID NO: 8187 - DNA, 4739 bp, Muscodor strobelii
  misc_feature: SGI EST ID NO. CUFF.20125.0
  misc_feature: Variant of the nucleotide sequence at SEQ ID NO 8185
gcgcgtacacccgtctgctacctaagctggtagatcccctgcatcgccgatccacaccacacgccacgttcattgatcagctcccgactgttgactcgagcatacctcttggtgtatgatgtgacatgggcaaatactcatctttgattgagaagacgggctctttatatttttcagaagaacatatggcagcatgtccaacgtgcactagggagaaaagtccaatcgcattgatatctgaaagaccaattcccgatttgacttgctctttgtctctagacaccaccaaccgttctcggaaagtctcatccaagctgactcttgactcttcaacgccttcgatacccaccaagcaccgcgctttgctttgtctcacctctattcactgccggacacggctattgcaccacttaccccgcgacgtgacacgcgactcaacaaaggcaattttcttctgcggctcgacgcttgcagctttacccacgctggccttacctgtgttttgcccgtgtgtccaaaactactcttggaccctctcacacaaccctagccgactttcatcctcttgtggcacccacgggagtggtccgtaggtttggaatgaccttctaaatacggcgtgtcattcgcacctaagattcacctaaagatactcataaggactcggtcaggattcagcggcggctcacaatggcccccaagacgaggaggaaagggtcaaagccggcctcggcggaccagtctcatcaaaagtcgccacagtctcaacaacaagcagcaggcctaccgagtttgttccctgcttatgatggatcgtacggtatcaacacgctcttagatacagatgcaaaggggcagaaggccaccaaatcaggcataaccaatgaaaaatcggacgaccagaaatggactaggtatatgcagggtgggcgaagcaagaagtacagcatggacagcgacttgaaaaacgcgatcaacactggcaatgaagaagttgagagagatcgccaagaaccagaaatctccgactcggcagacaatggctctcaccctccggacacgccttccactaatacaactcatccggtttcccctactaatcctgattacattgcgccccctcaatcctatatccccaaatatgatgttggaagggagcccttcatcgaggactatgatcaccagcctaaattaccgtatacgcgagcgcaactgccgacgctgaacgagcatgccgtcataggagtcagccaacccaaagcaccaccctacgagggcattccgttctacggattgccacaaggacaaggcgcaaaggaaccattttcgcccgtgcgtcctgatacgtctagaagcttcaactacgagagcgggcttttctcaaatgccactgttgaaaccccagcacatcacaagctccagcctgcaaaagaacctgaaaagccgcagcaggcagacaagccgcaagacatgccgatgaacgtagatcaggctaatcaagcgaagctcaaggagtatgcggaaagaaaggcagctcaagcagagaaagagcgcctcgagaacatgcaagactcgcaccaagttcatactcatcagcatacgatggaccaacaattttctcgcctgcagcctgatactcgcacaagcaaaacggcgacggtggtgaaacgaccagaaccccgatttgactcgcgaaagaagaaggaggaaggcaaggtagaaccaaatggactatggggaagaatttggtacacgatattcgtcatcatttcggtgctcgtcctcgtttccttactgaagctctccccccttgattccgagagcattcaaagaggattcagttggtctggcatgaagggaggtgtccccagtttggaatcagtattattcaatccgaagccatctccaagcgctcagaacccttccaaggtcgactatgataagctcttgaaggagttgcgcaaagacatgccggactacgtatgggtacacaaagataagaaagggcacttgaagattcctgaggacttttggcacgccctgagagatcttatcaaagatgatgatatgatactggagcttgagaatgcgaaaggtcaaccacctgagatatcaaacgatcattgggtggcggtgaaatcccggattgagaagagcggcctgttgtcttcccccaaaaacggcgatggtgggacaagtgcatcaaccaaagacgcttcagtatcgcatcaatcctgggaaacatggctagaaaacaacgccaagtctctgaagacgtctctaaaaggagtttttgtccccagagatgatttcatgaaactctttgaaaaggaggcatcatcttaccagaaagagatcaaaaaggagctcgcgaggcagcaggatcggatcgcagatattaccaagcagattgccagcattgttcatagccccagtggtcccggtgatggtggaatgagcagatccgaggtgaaacagctcgttgacaacattgtcacaaaggcaattaacaaggtaaagctgggtgccatcgcgaatggtcgaaatgacggccacgcaagtgacctgcttctcaaccaagtcaacttcttcagctatggagccggagctaggatcgatcctggatatacttcctctgcatgggaagggcctaaggccttttggaatggcaagaagtggatcgagaggacatataaaaagcagccgccattgtccgccctttcgacatgggccgaggagggtgaatgtttctgcgctgggccggaccgaaagggatttggtcagggtaccaataacatttctgtcctccttggtcgcgatatcattcctcagaatttggttgttgagcatattctgcctggcgcgacccttgatccaggtgcaataccaaaggagattgagctatgggcttatatacaggaaatcactcttcgcaatgaggtaaagaccttctcggagacgcagtttccgaacacgccgaaggagcaggtgcttgacgatggatgggtcaagatcgggcacttcaactatgagagtgatgctcaaggcaaaggcgtcaaaggtaatcgccgtacggaggtcttcccgctcaagtcggacctgacgacaatgaatgccgttgcgaaccagtttgtgattcgtgctctgaataaccatggtgcagaccacacatgtttctacagattgggattgtttggcgagatggtggagcgaccggaggactacacgtgggaccaagtgcctcagaaatcaggctggttctggtgacgagggatgagtggcttgagtgacatgcttgtttccacgtcgtttaacagaaacagtgcagttgttggtcggtctgagctgaacggatgagataaaggacccaagagacatgcgtcccaatgtcttctcggtatgggtgtcgttagatctgtcagtaaaaggaagagacaacaatacggacagcccgcgagaaaccagggaaagatagcattggcaaataggaggtcggagtcggagttcagggctaatgataccaagctttcagatgtacattattcactcgtgcaattccccattgtgcttgccactttgtattattttcattcttcgtgcttttaagaggtgatacagggtataatttgcaacacaacgtcccattctagcctttgctttcctagccggaggacaaagccataacatagaccaacggaagttgacagggaaaatcaacacgtgctccgataaaccaggctttcacacatctaaccatccagcaacccggcagccagtgcctcataatcttcgagagtatccggttgctccgagatctcaatgactttgcccttgcctttcttcccctttttacttgttgtttcgtcgtctgaatcatcttggaaccacttcttctgcttctttttcggctgctcttctgcgtcctcaccgtcattgtcatatcggccaccagcaaccggaagcgaagccaagaaatccaaggcctcgtccgctcctgtatcctgcgatggaagtgcggccgacacacttgccacctggccattctccagtgcttcgcgagccttgcgcttctctttcttttcgcgccgcttctccttgacgagggccttgtcgctgatatcggcctccttgaccttggttgcctcgtcctcgacgaacctctgccgttgatcctcggctgctccgtctgcctggaagtcttcttcgttcttgatgcgatagggatggtgcgcgattccttcctcgtcgaaaatgatcctatctcctttacccttgaattttaacatttgtttctttgacttcaacatcttctcccttctcttggagtcgatcacaagtggctcctcgccaccgagatttcgtaagatcttggtaccagctggtactccaagttcctgatctattacctcatcgagatcgtcgccttgcattaccctcttgactgacaagaagtcctcatcgctgtcttctaaggcttcctctcccgccttttcttctcctatcaatttcgtgtaatgatcggtaagcacgtcttgattagtacgtccaaacatcttgtcaacttttgtccggaccttatttcgatcgccgtcgtcttctgaatccgaaagaccggctcgcggcgcattcttgagtttcttaatatcttcacccttcttgaaatgaataattggggctccaggcagcccaaggctagcagcatatgcttctagatccagggctttgagtttaaatatttc

SEQ ID NO: 8188 - DNA, 2391 bp, Muscodor strobelii
  misc_feature: SGI cDNA ID NO. 562509
  misc_feature: Encodes the peptide sequence at SEQ ID NO 8189
atgcctgccgatgcgaagaagcgtgggcctcagcggcctcgcaagcccatggtcgaggccaagtccctcaagcgcaagcgtcaacaggaagacctcaccaagctgcaggacgccgtggaccaatatgactctacgactgcagagaccacaaagttttccgagctcccgctttcgacccctacgaagtctggcctcgaggcttcccacttccaggtcttgaccgacgtgcaaaagcgagccattccccttgccctgaagggccgcgatatactcggtgccgcgaagactggctctggaaagaccctggcatttcttgtgcctgtgctcgaaaagctttaccgtgcccgctggacggaatacgatggtctcggcgctctcgttgtctcgcccacccgcgagcttgctgtccagattttcgacaatctccgcaagatcggccgctaccactccttctcggcgggacttgttatcggcggcaagagcctgcaggaggaaagcgagagactcggccgcatgaacatcctcgtctgcacgccaggtcgcctgttgcagcacctagaccagacagccggaatggatgtgaacaatctgcaagtccttgtcctcgacgaggctgaccggatcatggatatggggttcaaatcggctgttgatgctcttcttgaacatctccccaaaacacgacagacactccttttctcagccacgcagtcaaaaagagtttcggatctctctaggctgtcattgaaagaccctgaatatatctctgttcacgaggatgcgaccacatccacgcccgaatcccttcaacagttctacaccgtcaccccgcttgccttgaagatggacaccctttttggtttcataaagagcaacctcaaaagcaagattctcgtctttttctcgtcgggaaagcaggtccgatttgcctacgaaagtctacgtcacttaaaacctggtatatcacttctacatctcctgggggcgcagaagcagcttgccagattagacataacgtcaagatttgctgctgcaaagcactgctgtctgttcgctaccgatgttgttgcacgcggcgtagatttcccagctgtcgattacgtagttcaagtcgatgcgcctgaagacatcgacacctacatccacagagtcgggcgtacggcacgtttcaaccgtgagggaaaggcctttcttttcctcgatccgagtgaggagaaagggatggtgaaccggttcgaaataaggaaaattccgatcacaaaagtcaatgtaaaagataagaaaaaacaatctatcgcggactcaatccagtcgatgattttcaaggacccagctctcaaataccttgcgcagaaagcctttatttcttatacgagatcaatccacctgcagaaagataaagaaatatttaaactcaaagccctggatctagaagcatatgctgctagccttgggctgcctggagccccaattattcatttcaagaagggtgaagatattaagaaactcaagaatgcgccgcgagccggtctttcggattcagaagacgacggcgatcgaaataaggtccggacaaaagttgacaagatgtttggacgtactaatcaagacgtgcttaccgatcattacacgaaattgataggagaagaaaaggcgggagaggaagccttagaagacagcgatgaggacttcttgtcagtcaagagggtaatgcaaggcgacgatctcgatgaggtaatagatcaggaacttggagtaccagctggtaccaagatcttacgaaatctcggtggcgaggagccacttgtgatcgactccaagagaagggagaagatgttgaagtcaaagaaacaaatgttaaaattcaagggtaaaggagataggatcattttcgacgaggaaggaatcgcgcaccatccctatcgcatcaagaacgaagaagacttccaggcagacggagcagccgaggatcaacggcagaggttcgtcgaggacgaggcaaccaaggtcaaggaggccgatatcagcgacaaggccctcgtcaaggagaagcggcgcgaaaagaaagagaagcgcaaggctcgcgaagcactggagaatggccaggtggcaagtgtgtcggccgcacttccatcgcaggatacaggagcggacgaggccttggatttcttggcttcgcttccggttgctggtggccgatatgacaatgacggtgaggacgcagaagagcagccgaaaaagaagcagaagaagtggttccaagatgattcagacgacgaaacaacaagtaaaaaggggaagaaaggcaagggcaaagtcattgagatctcggagcaaccggatactctcgaagattatgaggcactggctgccgggttgctggatggttag

SEQ ID NO: 8189 - protein, 796 aa, Muscodor strobelii
  misc_feature: SGI Peptide ID NO. 562509
  misc_feature (74)..(244): Pfam Id: PF00270 Pfam Desc: DEAD/DEAH box helicase
  misc_feature (315)..(391): Pfam Id: PF00271 Pfam Desc: Helicase conserved C-terminal domain
  misc_feature (11)..(795): NCBI GI: 85085468 Blast Desc: NCU04439 [Neurospora crassa OR74A] gi|74696212|sp|Q7RZ35.1|DBP4_NEUCR RecName: Full=ATP-dependent RNA helicase dbp-4 gi|28918608|gb|EAA28280.1| NCU04439 crassa RNA
  misc_feature (1)..(795): NCBI GI: 46122619 Blast Desc: FG05687.1 [Gibberella zeae PH-1] gi|91206546|sp|Q4IAS1.1|DBP4_GIBZE RecName: Full=ATP-dependent RNA helicase DBP4
  misc_feature (8)..(795): NCBI GI: 39945858 Blast Desc: MGG_08049 [Magnaporthe grisea 70-15] gi|152013483|sp|A4RGU2.1|DBP4_MAGGR RecName: Full=ATP-dependent RNA helicase DBP4 gi|145019285|gb|EDK03513.1| MGG_08049 grisea
  misc_feature (18)..(795): NCBI GI: 156049233 Blast Desc: SS1G_08323 [Sclerotinia sclerotiorum 1980] gi|160380617|sp|A7ESL8.1|DBP4_SCLS1 RecName: Full=ATP-dependent RNA helicase dbp4 gi|154692722|gb|EDN92460.1| SS1G_08323 1980]
  misc_feature (13)..(795): NCBI GI: 171683441 Blast Desc: protein product [Podospora anserina] gi|170941680|emb|CAP67334.1| protein product [Podospora anserina]
  misc_feature (1)..(794): NCBI GI: 239613981 Blast Desc: ATP-dependent RNA helicase DBP4 [Ajellomyces dermatitidis ER-3]
  misc_feature (1)..(794): NCBI GI: 261193373 Blast Desc: ATP-dependent RNA helicase DBP4 [Ajellomyces dermatitidis SLH14081] gi|239588697|gb|EEQ71340.1| ATP-dependent RNA helicase DBP4 [Ajellomyces dermatitidis SLH14081]
  misc_feature (8)..(795): NCBI GI: 116194814 Blast Desc: CHGG_04005 [Chaetomium globosum CBS 148.51] gi|118575176|sp|Q2H2J1.1|DBP4_CHAGB RecName: Full=ATP-dependent RNA helicase DBP4 gi|88179918|gb|EAQ87386.1| CHGG_04005 globosum
  misc_feature (8)..(795): NCBI GI: 240275036 Blast Desc: ATP-dependent RNA helicase DBP4 [Ajellomyces capsulatus H143]
  misc_feature (8)..(794): NCBI GI: 225558597 Blast Desc: ATP-dependent RNA helicase DBP4 [Ajellomyces capsulatus G186AR]
MPADAKKRGPQRPRKPMVEAKSLKRKRQQEDLTKLQDAVDQYDSTTAETTKFSELPLSTPTKSGLEASHFQVLTDVQKRAIPLALKGRDILGAAKTGSGKTLAFLVPVLEKLYRARWTEYDGLGALVVSPTRELAVQIFDNLRKIGRYHSFSAGLVIGGKSLQEESERLGRMNILVCTPGRLLQHLDQTAGMDVNNLQVLVLDEADRIMDMGFKSAVDALLEHLPKTRQTLLFSATQSKRVSDLSRLSLKDPEYISVHEDATTSTPESLQQFYTVTPLALKMDTLFGFIKSNLKSKILVFFSSGKQVRFAYESLRHLKPGISLLHLLGAQKQLARLDITSRFAAAKHCCLFATDVVARGVDFPAVDYVVQVDAPEDIDTYIHRVGRTARFNREGKAFLFLDPSEEKGMVNRFEIRKIPITKVNVKDKKKQSIADSIQSMIFKDPALKYLAQKAFISYTRSIHLQKDKEIFKLKALDLEAYAASLGLPGAPIIHFKKGEDIKKLKNAPRAGLSDSEDDGDRNKVRTKVDKMFGRTNQDVLTDHYTKLIGEEKAGEEALEDSDEDFLSVKRVMQGDDLDEVIDQELGVPAGTKILRNLGGEEPLVIDSKRREKMLKSKKQMLKFKGKGDRIIFDEEGIAHHPYRIKNEEDFQADGAAEDQRQRFVEDEATKVKEADISDKALVKEKRREKKEKRKAREALENGQVASVSAALPSQDTGADEALDFLASLPVAGGRYDNDGEDAEEQPKKKQKKWFQDDSDDETTSKKGKKGKGKVIEISEQPDTLEDYEALAAGLLDG

SEQ ID NO: 8190 - DNA, 5567 bp, Muscodor strobelii
  misc_feature: SGI EST ID NO. CUFF.20126.1
  misc_feature: Variant of the nucleotide sequence at SEQ ID NO 8188
caacagtgcaaaacgcaacgccttttctacgtggagttttgcgaccggactcatgcctgccgatgcgaagaagcgtgggcctcagcggcctcgcaagcccatggtcgaggccaagtccctcaagcgcaagcgtcaacaggaagacctcaccaagctgcaggacgccgtggaccaatatgactctacgactgcagagaccacaaagttttccgagctcccgctttcgacccctacgaagtctggcctcgaggcttcccacttccaggtcttgaccgacgtgcaaaagcgagccattccccttgccctgaagggccgcgatatactcggtgccgcgaagactggctctggaaagaccctggcatttcttgtgcctgtgctcgaaaagctttaccgtgcccgctggacggaatacgatggtctcggcgctctcgttgtctcgcccacccgcgagcttgctgtccagattttcgacaatctccgcaagatcggccgctaccactccttctcggcgggacttgttatcggcggcaagagcctgcaggaggaaagcgagagactcggccgcatgaacatcctcgtctgcacgccaggtcgcctgttgcagcacctagaccagacagccggaatggatgtgaacaatctgcaagtccttgtcctcgacgaggctgaccggatcatggatatggggttcaaatcggctgttgatgctcttcttgaacatctccccaaaacacgacagacactccttttctcagccacgcagtcaaaaagagtttcggatctctctaggctgtcattgaaagaccctgaatatatctctgttcacgaggatgcgaccacatccacgcccgaatcccttcaacagttctacaccgtcaccccgcttgccttgaagatggacaccctttttggtttcataaagagcaacctcaaaagcaagattctcgtctttttctcgtcgggaaagcaggtccgatttgcctacgaaagtctacgtcacttaaaacctggtatatcacttctacatctcctgggggcgcagaagcagcttgccagattagacataacgtcaagatttgctgctgcaaagcactgctgtctgttcgctaccgatgttgttgcacgcggcgtagatttcccagctgtcgattacgtagttcaagtcgatgcgcctgaagacatcgacacctacatccacagagtcgggcgtacggcacgtttcaaccgtgagggaaaggcctttcttttcctcgatccgagtgaggagaaagggatggtgaaccggttcgaaataaggaaaattccgatcacaaaagtcaatgtaaaagataagaaaaaacaatctatcgcggactcaatccagtcgatgattttcaaggacccagctctcaaataccttgcgcagaaagcctttatttcttatacgagatcaatccacctgcagaaagataaagaaatatttaaactcaaagccctggatctagaagcatatgctgctagccttgggctgcctggagccccaattattcatttcaagaagggtgaagatattaagaaactcaagaatgcgccgcgagccggtctttcggattcagaagacgacggcgatcgaaataaggtccggacaaaagttgacaagatgtttggacgtactaatcaagacgtgcttaccgatcattacacgaaattgataggagaagaaaaggcgggagaggaagccttagaagacagcgatgaggacttcttgtcagtcaagagggtaatgcaaggcgacgatctcgatgaggtaatagatcaggaacttggagtaccagctggtaccaagatcttacgaaatctcggtggcgaggagccacttgtgatcgactccaagagaagggagaagatgttgaagtcaaagaaacaaatgttaaaattcaagggtaaaggagataggatcattttcgacgaggaaggaatcgcgcaccatccctatcgcatcaagaacgaagaagacttccaggcagacggagcagccgaggatcaacggcagaggttcgtcgaggacgaggcaaccaaggtcaaggaggccgatatcagcgacaaggccctcgtcaaggagaagcggcgcgaaaagaaagagaagcgcaaggctcgcgaagcactggagaatggccaggtggcaagtgtgtcggccgcacttccatcgcaggatacaggagcggacgaggccttggatttcttggcttcgcttccggttgctggtggccgatatgacaatgacggtgaggacgcagaagagcagccgaaaaagaagcagaagaagtggttccaagatgattcagacgacgaaacaacaagtaaaaaggggaagaaaggcaagggcaaagtcattgagatctcggagcaaccggatactctcgaagattatgaggcactggctgccgggttgctggatggttagatgtgtgaaagcctggtttatcggagcacgtgttgattttccctgtcaacttccgttggtctatgttatggctttgtcctccggctaggaaagcaaaggctagaatgggacgttgtgttgcaaattataccctgtatcacctcttaaaagcacgaagaatgaaaataatacaaagtggcaagcacaatggggaattgcacgagtgaataatgtacatctgaaagcttggtatcattagccctgaactccgactccgacctcctatttgccaatgctatctttccctggtttctcgcgggctgtccgtattgttgtctcttccttttactgacagatctaacgacacccataccgagaagacattgggacgcatgtctcttgggtcctttatctcatccgttcagctcagaccgaccaacaactgcactgtttctgttaaacgacgtggaaacaagcatgtcactcaagccactcatccctcgtcaccagaaccagcctgatttctgaggcacttggtcccacgtgtagtcctccggtcgctccaccatctcgccaaacaatcccaatctgtagaaacatgtgtggtctgcaccatggttattcagagcacgaatcacaaactggttcgcaacggcattcattgtcgtcaggtccgacttgagcgggaagacctccgtacggcgattacctttgacgcctttgccttgagcatcactctcatagttgaagtgcccgatcttgacccatccatcgtcaagcacctgctccttcggcgtgttcggaaactgcgtctccgagaaggtctttacctcattgcgaagagtgatttcctgtatataagcccatagctcaatctcctttggtattgcacctggatcaagggtcgcgccaggcagaatatgctcaacaaccaaattctgaggaatgatatcgcgaccaaggaggacagaaatgttattggtaccctgaccaaatccctttcggtccggcccagcgcagaaacattcaccctcctcggcccatgtcgaaagggcggacaatggcggctgctttttatatgtcctctcgatccacttcttgccattccaaaaggccttaggcccttcccatgcagaggaagtatatccaggatcgatcctagctccggctccatagctgaagaagttgacttggttgagaagcaggtcacttgcgtggccgtcatttcgaccattcgcgatggcacccagctttaccttgttaattgcctttgtgacaatgttgtcaacgagctgtttcacctcggatctgctcattccaccatcaccgggaccactggggctatgaacaatgctggcaatctgcttggtaatatctgcgatccgatcctgctgcctcgcgagctcctttttgatctctttctggtaagatgatgcctccttttcaaagagtttcatgaaatcatctctggggacaaaaactccttttagagacgtcttcagagacttggcgttgttttctagccatgtttcccaggattgatgcgatactgaagcgtctttggttgatgcacttgtcccaccatcgccgtttttgggggaagacaacaggccgctcttctcaatccgggatttcaccgccacccaatgatcgtttgatatctcaggtggttgacctttcgcattctcaagctccagtatcatatcatcatctttgataagatctctcagggcgtgccaaaagtcctcaggaatcttcaagtgccctttcttatctttgtgtacccatacgtagtccggcatgtctttgcgcaactccttcaagagcttatcatagtcgaccttggaagggttctgagcgcttggagatggcttcggattgaataatactgattccaaactggggacacctcccttcatgccagaccaactgaatcctctttgaatgctctcggaatcaaggggggagagcttcagtaaggaaacgaggacgagcaccgaaatgatgacgaatatcgtgtaccaaattcttccccatagtccatttggttctaccttgccttcctccttcttctttcgcgagtcaaatcggggttctggtcgtttcaccaccgtcgccgttttgcttgtgcgagtatcaggctgcaggcgagaaaattgttggtccatcgtatgctgatgagtatgaacttggtgcgagtcttgcatgttctcgaggcgctctttctctgcttgagctgcctttctttccgcatactccttgagcttcgcttgattagcctgatctacgttcatcggcatgtcttgcggcttgtctgcctgctgcggcttttcaggttcttttgcaggctggagcttgtgatgtgctggggtttcaacagtggcatttgagaaaagcccgctctcgtagttgaagcttctagacgtatcaggacgcacgggcgaaaatggttcctttgcgccttgtccttgtggcaatccgtagaacggaatgccctcgtagggtggtgctttgggttggctgactcctatgacggcatgctcgttcagcgtcggcagttgcgctcgcgtatacggtaatttaggctggtgatcatagtcctcgatgaagggctcccttccaacatcatatttggggatataggattgagggggcgcaatgtaatcaggattagtaggggaaaccggatgagttgtattagtggaaggcgtgtccggagggtgagagccattgtctgccgagtcggagatttctggttcttggcgatctctctcaacttcttcattgccagtgttgatcgcgtttttcaagtcgctgtccatgctgtacttcttgcttcgcccaccctgcatatacctagtccatttctggtcgtccgatttttcattggttatgcctgatttggtggccttctgcccctttgcatctgtatctaagagcgtgttgataccgtacgatccatcataagcagggaacaaactcggtaggcctgctgcttgttgttgagactgtggcgacttttgatgagactggtccgccgaggccggctttgaccctttcctcctcgtcttgggggccattgtgagccgccgctgaatcctgaccgagtccttatgagtatctttaggtgaatcttaggtgcgaa

SEQ ID NO: 8191 - DNA, 1662 bp, Muscodor strobelii
  misc_feature: SGI cDNA ID NO. 562510
  misc_feature: Encodes the peptide sequence at SEQ ID NO 8192
atgaccactgttcagctccccttatctgaggctgacaagtacgactacgtcgtcgttggcggaggcactgctggttgtgttgttgctgctaggctagctgaatacctaccgcataaaaaggtccttctgattgaggcaggacctagtgattttggggatgaccgtgttttggaccttcggaaatggctcgatctgctgggcggcgagctagactatgactatggcacgactgagcaacctatgggcaattcgttcattcggcattcccgcgccaaagttctaggaggttgctcatcgcacaacactctaatttccttcaagccattcaagtatgacatggacatctggcaatcgctgggtgcaaagggctgggatttccccacagttatgaaatctctcagtaagctgaagaacactattcagccagttcacgctaggcatcgaaatcagttgtgcaaggattgggtagagtcgtgcagcacgtcacttgacattccagtgatccccaacttcaacaagcagattgaggagaatggcgcgctgcagaccggcgttggctttttctccgttagctacaacccggatgatggcaggagatctagtgcatcagtggcatacatccatcctatccttaagggagaggagaaacgaccgaacttgactattttgaccggtgcttgggtatccaagatcaacgtcaagggcgatgaggtcagcagcttgaatgtcacactcaaagacggctctacacgggaggtgaaggctaagagcgagacggttctcagcgctggcgctgtggacacaccacgtctgatgttactttcgggactggggcccaaagagcagctgtcatccctcggcatcaatgttgtcaaagatatcccaggtgtcggcgagaacttgcaagaccatcctgagagtattatcatgtgggagttgaacaagcctgtaccggcgaaccagacgacgatggactccgacgctggaatattcttgcggcgtgaggcaccaggggcgggatcagagaagtcaaccgcaaacccgcatggtatttcggacggcgatattgccgacgtcatgatgcactgctaccaaattccctttaccctcaacaccttccgtcttggctacccggatatcaaggacgggtatgctttctgcatgacacccaacatcccgcggccacgctctcgcggacgtctgtatctcacctctgctgacccgaaggaaaagcctgcgcttgacttccggtacttcacggatgcggaaggctatgacgcggcgacactggtgtatggtatgaaagcagcccgtaaggtcgcagagcaggcccctttcaaggattggatcaagcaggaggttgcgccaggacccaaggtgcagacggatgaggagttgagctactatgcgcgaaaggttgcccacactgtttatcacccggcgggaacgacccgaatgggcgatactgagaaggatgagctggccgtggtcgacgcgaagctcaaagtccgcggcttcaagaacctgcgcatcgtcgatgcgggtatcttcccgaccatcccttccatcaaccccatggtgacggttttgggatgtgccgaacgagctgctgaactgatcgtcgaagaggcagcagctctgaaggagagagcacgcctataa

SEQ ID NO: 8192 - protein, 553 aa, Muscodor strobelii
  misc_feature: SGI Peptide ID NO. 562510
  misc_feature (388)..(536): Pfam Id: PF05199 Pfam Desc: GMC oxidoreductase
  misc_feature (14)..(319): Pfam Id: PF00732 Pfam Desc: GMC oxidoreductase
  misc_feature (15)..(48): Pfam Id: PF01266 Pfam Desc: FAD dependent oxidoreductase
  misc_feature (15)..(49): Pfam Id: PF00890 Pfam Desc: FAD binding domain
  misc_feature (195)..(319): Pfam Id: PF00732 Pfam Desc: GMC oxidoreductase
  misc_feature (14)..(125): Pfam Id: PF00732 Pfam Desc: GMC oxidoreductase
  misc_feature (15)..(49): Pfam Id: PF05834 Pfam Desc: Lycopene cyclase protein
  misc_feature (15)..(52): Pfam Id: PF07992 Pfam Desc: Pyridine nucleotide-disulphide oxidoreductase
  misc_feature (1)..(553): NCBI GI: 46121993 Blast Desc: FG05374.1 [Gibberella zeae PH-1]
  misc_feature (1)..(553): NCBI GI: 256724831 Blast Desc: [Nectria haematococca mpVI 77-13-4]
  misc_feature (2)..(553): NCBI GI: 154272389 Blast Desc: HCAG_08156 [Ajellomyces capsulatus NAm1] gi|150409034|gb|EDN04490.1| HCAG_08156 [Ajellomyces capsulatus NAm1]
  misc_feature (2)..(553): NCBI GI: 225554828 Blast Desc: oxidoreductase [Ajellomyces capsulatus G186AR]
  misc_feature (5)..(553): NCBI GI: 238842116 Blast Desc: choline dehydrogenase [Microsporum canis CBS 113480]
  misc_feature (2)..(553): NCBI GI: 240276794 Blast Desc: oxidoreductase [Ajellomyces capsulatus H143]
  misc_feature (2)..(545): NCBI GI: 258575891 Blast Desc: UREG_01643 [Uncinocarpus reesii 1704] gi|237902393|gb|EEP76794.1| UREG_01643 [Uncinocarpus reesii 1704]
  misc_feature (2)..(553): NCBI GI: 261359186 Blast Desc: choline dehydrogenase [Verticillium albo-atrum VaMs.102]
  misc_feature (2)..(545): NCBI GI: 119188731 Blast Desc: conserved [Coccidioides immitis RS]
  misc_feature (2)..(545): NCBI GI: 240111500 Blast Desc: choline dehydrogenase, [Coccidioides posadasii C735 delta SOWgp]
  misc_feature (12)..(530): SWISSPROT Homolog: EC 1.1.99.1 Choline dehydrogenase
MTTVQLPLSEADKYDYVVVGGGTAGCVVAARLAEYLPHKKVLLIEAGPSDFGDDRVLDLRKWLDLLGGELDYDYGTTEQPMGNSFIRHSRAKVLGGCSSHNTLISFKPFKYDMDIWQSLGAKGWDFPTVMKSLSKLKNTIQPVHARHRNQLCKDWVESCSTSLDIPVIPNFNKQIEENGALQTGVGFFSVSYNPDDGRRSSASVAYIHPILKGEEKRPNLTILTGAWVSKINVKGDEVSSLNVTLKDGSTREVKAKSETVLSAGAVDTPRLMLLSGLGPKEQLSSLGINVVKDIPGVGENLQDHPESIIMWELNKPVPANQTTMDSDAGIFLRREAPGAGSEKSTANPHGISDGDIADVMMHCYQIPFTLNTFRLGYPDIKDGYAFCMTPNIPRPRSRGRLYLTSADPKEKPALDFRYFTDAEGYDAATLVYGMKAARKVAEQAPFKDWIKQEVAPGPKVQTDEELSYYARKVAHTVYHPAGTTRMGDTEKDELAVVDAKLKVRGFKNLRIVDAGIFPTIPSINPMVTVLGCAERAAELIVEEAAALKERARL

SEQ ID NO: 8193 - DNA, 2550 bp, Muscodor strobelii
  misc_feature: SGI EST ID NO. CUFF.20021.0
  misc_feature: Variant of the nucleotide sequence at SEQ ID NO 8191
ctggattgaagcatccttcgagtaccaaaagtctatcagagctggcgagctggaagtaaagctgcgtatgcttgcctacttcggcagcaacaaggttgacaatgatcctggacgggcgtgataaacggcgacaggcggggtgcgtgcgggtcatcaacccattcctatctcccttacacgtatgtacaccgcctacgactccgaagcatagcaacgataggcgtttcgccagacaacctcgttccaccattccagcattgccccggctctgggcaaacaactaaacgttcctctaacgtcctagttcacagcaggatgcccacctcacgcaggtggccatcctaaatgcaagatgggccaatggaaagacacggaactagtcagatagctgcaagtggccaagtccgctagcccgctctcaccattatcatgacaaaggatttcagggacttgatgatgaaaagctttgatagataactaggtagctgtcatccacataatacatgctgttcgtcgaactttatcttttgctcgtctcgcccaccagtttttggaggcattttgttgagatttgtatatcatcgagctcggaattataaccatcatgaccactgttcagctccccttatctgaggctgacaagtacgactacgtcgtcgttggcggaggcactgctggttgtgttgttgctgctaggctagctgaatacctaccgcataaaaaggtccttctgattgaggcaggacctagtgattttggggatgaccgtgttttggaccttcggaaatggctcgatctgctgggcggcgagctagactatgactatggcacgactgagcaacctatgggcaattcgttcattcggcattcccgcgccaaagttctaggaggttgctcatcgcacaacactctaatttccttcaagccattcaagtatgacatggacatctggcaatcgctgggtgcaaagggctgggatttccccacagttatgaaatctctcagtaagctgaagaacactattcagccagttcacgctaggcatcgaaatcagttgtgcaaggattgggtagagtcgtgcagcacgtcacttgacattccagtgatccccaacttcaacaagcagattgaggagaatggcgcgctgcagaccggcgttggctttttctccgttagctacaacccggatgatggcaggagatctagtgcatcagtggcatacatccatcctatccttaagggagaggagaaacgaccgaacttgactattttgaccggtgcttgggtatccaagatcaacgtcaagggcgatgaggtcagcagcttgaatgtcacactcaaagacggctctacacgggaggtgaaggctaagagcgagacggttctcagcgctggcgctgtggacacaccacgtctgatgttactttcgggactggggcccaaagagcagctgtcatccctcggcatcaatgttgtcaaagatatcccaggtgtcggcgagaacttgcaagaccatcctgagagtattatcatgtgggagttgaacaagcctgtaccggcgaaccagacgacgatggactccgacgctggaatattcttgcggcgtgaggcaccaggggcgggatcagagaagtcaaccgcaaacccgcatggtatttcggacggcgatattgccgacgtcatgatgcactgctaccaaattccctttaccctcaacaccttccgtcttggctacccggatatcaaggacgggtatgctttctgcatgacacccaacatcccgcggccacgctctcgcggacgtctgtatctcacctctgctgacccgaaggaaaagcctgcgcttgacttccggtacttcacggatgcggaaggctatgacgcggcgacactggtgtatggtatgaaagcagcccgtaaggtcgcagagcaggcccctttcaaggattggatcaagcaggaggttgcgccaggacccaaggtgcagacggatgaggagttgagctactatgcgcgaaaggttgcccacactgtttatcacccggcgggaacgacccgaatgggcgatactgagaaggatgagctggccgtggtcgacgcgaagctcaaagtccgcggcttcaagaacctgcgcatcgtcgatgcgggtatcttcccgaccatcccttccatcaaccccatggtgacggttttgggatgtgccgaacgagctgctgaactgatcgtcgaagaggcagcagctctgaaggagagagcacgcctataattgtatagacatgtagggattatgtgggtttgatcttgggttggattggatggctcttattttcgatttgctacctataatcattctgacgaagcctgacgaagcctgacgaagcctgacgaagcaaagcatcttgtggcggacactttcagtcattttcaaataaaaaggtcgaaacatgttgggactttatgtatttaggtatcaatcagaacagacaaacgtggtgtgaacaggcaaactgcagcgtgacatcagtgctaaaatgcaacgtatcaaatcac

SEQ ID NO: 8194 - DNA, 1503 bp, Muscodor strobelii
  misc_feature: SGI cDNA ID NO. 562511
  misc_feature: Encodes the peptide sequence at SEQ ID NO 8195
atggttcagaaggaaccagaacggcatactttcttttcgggcaggccccagccagcctcgaagtcttctggcgacttcgtatccattgatccatccaatggcgaaattctggcaaggataaacacatcgtcacatgaatcgattgactcggctattcattcagcacaagaagcattctcttcgtggtcagccacgccgccggtcgaacgtgcaaggatactgcagcgtgctgtggttcttttacggcagcacaatgacgctctagctaagattgaaacccaggataccggcaagccgttttcagagacttcgacggtggatattgtaacgggagcagatgttcttgaatatttcgccaacatggtagcaagtgggggcctgaatggtgaagcatttcgtcttcggccctctgctatggtctacaccacgaaagagcctctgggtgtttgtgctggcattggagcgtggaactatccaattcagattgctctatggaaatctgccccttgccttgcagccggcaattgcatggtctacaagccaagcgagtcaacgccattgcatgcggaatatcttgcagagatctatcgcgaagccggtctaccagatggtgtatttaatgtcgtatatggcgctggtgatgttggtgcttacctaaccgcgcatccggccattgccaaggtcagcttcaccggtcaagttagcactgggaagaaggttgctggttccgcagctggtggtatgaaatacgtgacgatggagctgggcggaaagagcccactcgtcgtacttcccgatgcagcagtacatcaagcagtcgacgtggcaatgatggcaaattttttcagcactggacaagtctgcacgaacggcacgcgagttttcatccctaagtctatgaagaaggagtttgagaaggttcttttggagaaaatgcaattcgtccgcgcgggggatctgtatgatatgtcaacaaatttcggtcctctgaacagcaagatccaccacagcaaggtggttgattatatacgtcgcggaatcgaggaagacaaagcaactattttatgtggaggaccaaagcagccagctgacctgcctgccgagttacggaaaggatattgggttcagccaactgtatttaccgactgtaaggacgatatgactatcgtgcgcgaagaaatatttggcccggtcatgtcaattctcacctacgacaccgtcgacgaggctgtacaacgggccaacacaacagaactgggccttgctgctggtgtagttgggagagacatcgatcaatgccatttggtcatatccaaactcgaggcgggtataacttggatcaatacttggggcgagtcaccagctgagatggccgttggtggttggaagtcaagtggtgttggcgtcgagaatgggaagaagggcttggaagcttgggtcagaaataaaagcacgattgtcgaaatgggcggtgaggctgcaactgttttctcgaagctatga

SEQ ID NO: 8195 - protein, 500 aa, Muscodor strobelii
  misc_feature: SGI Peptide ID NO. 562511
  misc_feature (21)..(485): Pfam Id: PF00171 Pfam Desc: Aldehyde dehydrogenase family
  misc_feature (5)..(500): NCBI GI: 39959180 Blast Desc: MGG_09456 [Magnaporthe grisea 70-15] gi|145010181|gb|EDJ94837.1| MGG_09456 [Magnaporthe grisea 70-15]
  misc_feature (8)..(500): NCBI GI: 189205310 Blast Desc: betaine aldehyde dehydrogenase [Pyrenophora tritici-repentis Pt-1C-BFP] gi|187986089|gb|EDU51577.1| betaine aldehyde dehydrogenase [Pyrenophora tritici-repentis Pt-1C-BFP]
  misc_feature (8)..(500): NCBI GI: 169610645 Blast Desc: SNOG_08429 [Phaeosphaeria nodorum SN15] gi|160702119|gb|EAT84705.2| SNOG_08429 [Phaeosphaeria nodorum SN15]
  misc_feature (8)..(500): NCBI GI: 225681466 Blast Desc: betaine aldehyde dehydrogenase [Paracoccidioides brasiliensis Pb03]
  misc_feature (11)..(500): NCBI GI: 226283341 Blast Desc: betaine aldehyde dehydrogenase [Paracoccidioides brasiliensis Pb01]
  misc_feature (8)..(500): NCBI GI: 226288601 Blast Desc: 5-carboxymethyl-2-hydroxymuconate semialdehyde dehydrogenase [Paracoccidioides brasiliensis Pb18]
  misc_feature (8)..(500): NCBI GI: 238842117 Blast Desc: betaine aldehyde dehydrogenase [Microsporum canis CBS 113480]
  misc_feature (6)..(500): NCBI GI: 119188729 Blast Desc: CIMG_04412 [Coccidioides immitis RS]
  misc_feature (7)..(500): NCBI GI: 67521946 Blast Desc: AN1430.2 [Aspergillus nidulans FGSC A4] gi|40745404|gb|EAA64560.1| AN1430.2 [Aspergillus nidulans FGSC A4] gi|259486740|tpe|CBF84842.1| TPA: betaine aldehyde (BadH),
  misc_feature (6)..(500): NCBI GI: 145253380 Blast Desc: An16g09060 [Aspergillus niger] gi|134083768|emb|CAK47102.1| protein product [Aspergillus niger]
  misc_feature (20)..(489): SWISSPROT Homolog: EC 1.2.1.8 Betaine-aldehyde dehydrogenase
  misc_feature: Useful for introducing or modulating the production of volatile compounds
  misc_feature: Useful for fungicidal and/or biocontrol applications
MVQKEPERHTFFSGRPQPASKSSGDFVSIDPSNGEILARINTSSHESIDSAIHSAQEAFSSWSATPPVERARILQRAVVLLRQHNDALAKIETQDTGKPFSETSTVDIVTGADVLEYFANMVASGGLNGEAFRLRPSAMVYTTKEPLGVCAGIGAWNYPIQIALWKSAPCLAAGNCMVYKPSESTPLHAEYLAEIYREAGLPDGVFNVVYGAGDVGAYLTAHPAIAKVSFTGQVSTGKKVAGSAAGGMKYVTMELGGKSPLVVLPDAAVHQAVDVAMMANFFSTGQVCTNGTRVFIPKSMKKEFEKVLLEKMQFVRAGDLYDMSTNFGPLNSKIHHSKVVDYIRRGIEEDKATILCGGPKQPADLPAELRKGYWVQPTVFTDCKDDMTIVREEIFGPVMSILTYDTVDEAVQRANTTELGLAAGVVGRDIDQCHLVISKLEAGITWINTWGESPAEMAVGGWKSSGVGVENGKKGLEAWVRNKSTIVEMGGEAATVFSKL

SEQ ID NO: 8196 - DNA, 2228 bp, Muscodor strobelii
  misc_feature: SGI EST ID NO. CUFF.20023.0
  misc_feature: Variant of the nucleotide sequence at SEQ ID NO 8194
aaaacattcagagctccatttcaagggtccacgcagatatcacagatcggatgctgctcgccattgcagtttcgcgttgatgatatcggccaattgatagtaggcaaaaggaccgacgagtaataatcggaatcgtcgccgaggtttatctcgagctagaccagcagccttgttatcacggcgtccgtatacttgcaatcgattctgataaagattttcccacgcgccgctataagagtagaatcgtgagtggagtcgcgacactcgaagctcttgggttcgaagtacgtcaccgttgcatgcggtggctggttggctcggtcaacttcatccactctagggtctggggtggctatccacatgcaactgactaaggtagctcaaagcaacgattgcagtatctctatgccatcgccgggatctcagatagaacagcattttacatcgcatagcactaaagaattcccacaagatggttcagaaggaaccagaacggcatactttcttttcgggcaggccccagccagcctcgaagtcttctggcgacttcgtatccattgatccatccaatggcgaaattctggcaaggataaacacatcgtcacatgaatcgattgactcggctattcattcagcacaagaagcattctcttcgtggtcagccacgccgccggtcgaacgtgcaaggatactgcagcgtgctgtggttcttttacggcagcacaatgacgctctagctaagattgaaacccaggataccggcaagccgttttcagagacttcgacggtggatattgtaacgggagcagatgttcttgaatatttcgccaacatggtagcaagtgggggcctgaatggtgaagcatttcgtcttcggccctctgctatggtctacaccacgaaagagcctctgggtgtttgtgctggcattggagcgtggaactatccaattcagattgctctatggaaatctgccccttgccttgcagccggcaattgcatggtctacaagccaagcgagtcaacgccattgcatgcggaatatcttgcagagatctatcgcgaagccggtctaccagatggtgtatttaatgtcgtatatggcgctggtgatgttggtgcttacctaaccgcgcatccggccattgccaaggtcagcttcaccggtcaagttagcactgggaagaaggttgctggttccgcagctggtggtatgaaatacgtgacgatggagctgggcggaaagagcccactcgtcgtacttcccgatgcagcagtacatcaagcagtcgacgtggcaatgatggcaaattttttcagcactggacaagtctgcacgaacggcacgcgagttttcatccctaagtctatgaagaaggagtttgagaaggttcttttggagaaaatgcaattcgtccgcgcgggggatctgtatgatatgtcaacaaatttcggtcctctgaacagcaagatccaccacagcaaggtggttgattatatacgtcgcggaatcgaggaagacaaagcaactattttatgtggaggaccaaagcagccagctgacctgcctgccgagttacggaaaggatattgggttcagccaactgtatttaccgactgtaaggacgatatgactatcgtgcgcgaagaaatatttggcccggtcatgtcaattctcacctacgacaccgtcgacgaggctgtacaacgggccaacacaacagaactgggccttgctgctggtgtagttgggagagacatcgatcaatgccatttggtcatatccaaactcgaggcgggtataacttggatcaatacttggggcgagtcaccagctgagatggccgttggtggttggaagtcaagtggtgttggcgtcgagaatgggaagaagggcttggaagcttgggtcagaaataaaagcacgattgtcgaaatgggcggtgaggctgcaactgttttctcgaagctatgatacataacagacgtccctgactatggccaaaaaaaaacaaaaaaagaactccgcagatagcttgtgatagcaccagttctgtctgcgtttggttcaggtttatctttcggcatgtcgactggagaaatcacataatttcgaggaactcttgtcaactttgcttctcatacgctcattaaacaattgtgatatgatacatttaccactacatgtatgatttatgtttgtattttagcgacatcaacgaattctc

SEQ ID NO: 8197 - DNA, 2310 bp, Muscodor strobelii
  misc_feature: SGI cDNA ID NO. 562512
  misc_feature: Encodes the peptide sequence at SEQ ID NO 8198
atggcagcagtgcagtccaattcctcgctgctgcgaacccggtcgctgcgtgctccggcgaaaccagcggcgttgaccgctcccacagcagcatcacatttatcacattcatcacattcgcaacgcagcacgccactgcaggtcccgacatgcacctccaacgtcgtcctcttcctctcgaacctccgactgctcgacctcgacctcgatcccgactggcctgacatcactgccaccacattttccgccaaagatgccgtcggcggccagaagaaacgcatccactgcgtcgaatgggctctgtaccgcctcttcgacctctgggatcatgccgagacccagaacaaactccgccctttctacccgcctaccgaccaggtgcaatccatcaacctgcgagctgctctggtgcgaagtctagagcaagcaaaaaaggctggggtcttgggtcgcgatgctatcgttcgcaaaaccatgcttgacgagtgcaagggcgagaggctggaggaagtcctcgctgtcttctcctctgccgtcctcaagaaactcgtagctgaacgtgccttgaacggcggctcagaatacagacccactgtgtcagagagcatatcactggagaactggggctattcgggcaatcgcactgagctcaacgggctcctgcttgcacacaaggcttccctccgatccaccctggaccggaggagcgctgcacgggatcgctatcgcagtttcgaggaattgctagccgccaaagaacgagacatcgcgagacgccaagcacatgccagactggaggctccaagtcgagctcccgacatatcagagacagccaaagcagaagtacgacgcgtccttcggggcaactggaccgtaaatgagcagtggcttgatggcttactcctgagccaagttcaatcgcggaagagcggtttattgactactccttttgatcaagtgtggagcagcgtaaaagacggcgatatcacagatctagcagacgaaacgactgatttgctcgaacagctggaccaacgagttcatcgtcagaaagcccgacttcagaaatgggacgactttcataagtgtacattcggcgacgccaaaatgagagagtcccgcaaggccgcggagcagccaaggaaaaagggtgtcgatttgggattgaccgcccactttgacacccactcgaatacgcaaagaatatcaaaatacacacaatccgagagtctaccgcccgattatacggcacttattagtcgcctagaaaataaagtggaaggcccaaaacaacccaatgtcccaagcttctcaaacttactggctggcatgagaaggaggcctgcgggcgtgattcctcgattcatcccaccaccgccgtcagagcccaccgctgagccgatttctgatctgagcgaatgggaggacgagccagaggaaaaggttgtcgtacccaaggaagctgggaaacctaacaatcagtccatcaccggcggggttcgcccaagtaatattcctgccgtagtgacaggttcgcgaagacaaatgatcagaaccaggcctcaacctaagggacgtcaaataagtccggttcgtcaccccgaatccaccgagaatcatagtgagcctatgctacatcaaatacatgctagccctacatccactcagcatctacggtcgtctacagattctatcgttcctagttctatctcaagttatgacgcagctccctcgcccccttcaagggcctcggatgacgatattacacttactgtccagcgacctccttctcccacacaagctcttgctgatgagatcgttgcttccatgaacaacacatctccttcgccaaacaaaaaatcacgatacactctttccttggcagagaggacacgcatgtctatggcacgcacgaagcctcttcaacccgaggacgcgacaccacctgtctcccctcagaaaatgagccatgcagaggtgagtgatgatcctttggcagaaaagagtgcggagcccggtgagcagtacgaggatctcattgcccgaactcgacgctccatggccggctttgaagcagcgagacaaaaagctcagctggaaaggcgacggtcccagaggaagagtaaagtggtgcaaaggaaagatagctactttcccaaggttgaggaagaaggggtgggcgatgtttctattgctgaggagttgatcgaggctggagaagaggactatgctgctgtctttatgagtagaccacgcattgccacgagcccagcaccgaggcctggcgcctcaagatgggatgaagaatag

SEQ ID NO: 8198 - protein, 769 aa, Muscodor strobelii
  misc_feature: SGI Peptide ID NO. 562512
  misc_feature (1)..(761): NCBI GI: 170940221 Blast Desc: protein product [Podospora anserina]
  misc_feature (21)..(759): NCBI GI: 85108588 Blast Desc: NCU06957 [Neurospora crassa OR74A] gi|28924207|gb|EAA33361.1| conserved [Neurospora crassa OR74A]
  misc_feature (1)..(437): NCBI GI: 116195514 Blast Desc: CHGG_04355 [Chaetomium globosum CBS 148.51] gi|88180268|gb|EAQ87736.1| CHGG_04355 [Chaetomium globosum CBS 148.51]
  misc_feature (24)..(759): NCBI GI: 156030468 Blast Desc: SS1G_14458 [Sclerotinia sclerotiorum 1980] gi|154700849|gb|EDO00588.1| SS1G_14458 [Sclerotinia sclerotiorum 1980]
  misc_feature (54)..(759): NCBI GI: 154291267 Blast Desc: BC1G_15123 [Botryotinia fuckeliana B05.10] gi|150847026|gb|EDN22219.1| BC1G_15123 [Botryotinia fuckeliana B05.10]
  misc_feature (1)..(461): NCBI GI: 256731163 Blast Desc: NECHADRAFT_49158 [Nectria haematococca mpVI 77-13-4]
  misc_feature (1)..(396): NCBI GI: 261352620 Blast Desc: conserved [Verticillium albo-atrum VaMs.102]
  misc_feature (1)..(446): NCBI GI: 145607659 Blast Desc: MGG_12243 [Magnaporthe grisea 70-15] gi|145015172|gb|EDJ99740.1| MGG_12243 [Magnaporthe grisea 70-15]
  misc_feature (52)..(762): NCBI GI: 189210345 Blast Desc: conserved [Pyrenophora tritici-repentis Pt-1C-BFP] gi|187977597|gb|EDU44223.1| conserved [Pyrenophora tritici-repentis Pt-1C-BFP]
  misc_feature (12)..(392): NCBI GI: 46122995 Blast Desc: FG05875.1 [Gibberella zeae PH-1]
MAAVQSNSSLLRTRSLRAPAKPAALTAPTAASHLSHSSHSQRSTPLQVPTCTSNVVLFLSNLRLLDLDLDPDWPDITATTFSAKDAVGGQKKRIHCVEWALYRLFDLWDHAETQNKLRPFYPPTDQVQSINLRAALVRSLEQAKKAGVLGRDAIVRKTMLDECKGERLEEVLAVFSSAVLKKLVAERALNGGSEYRPTVSESISLENWGYSGNRTELNGLLLAHKASLRSTLDRRSAARDRYRSFEELLAAKERDIARRQAHARLEAPSRAPDISETAKAEVRRVLRGNWTVNEQWLDGLLLSQVQSRKSGLLTTPFDQVWSSVKDGDITDLADETTDLLEQLDQRVHRQKARLQKWDDFHKCTFGDAKMRESRKAAEQPRKKGVDLGLTAHFDTHSNTQRISKYTQSESLPPDYTALISRLENKVEGPKQPNVPSFSNLLAGMRRRPAGVIPRFIPPPPSEPTAEPISDLSEWEDEPEEKVVVPKEAGKPNNQSITGGVRPSNIPAVVTGSRRQMIRTRPQPKGRQISPVRHPESTENHSEPMLHQIHASPTSTQHLRSSTDSIVPSSISSYDAAPSPPSRASDDDITLTVQRPPSPTQALADEIVASMNNTSPSPNKKSRYTLSLAERTRMSMARTKPLQPEDATPPVSPQKMSHAEVSDDPLAEKSAEPGEQYEDLIARTRRSMAGFEAARQKAQLERRRSQRKSKVVQRKDSYFPKVEEEGVGDVSIAEELIEAGEEDYAAVFMSRPRIATSPAPRPGASRWDEE

SEQ ID NO: 8199 - DNA, 2931 bp, Muscodor strobelii
  misc_feature: SGI EST ID NO. CUFF.20035.0
  misc_feature: Variant of the nucleotide sequence at SEQ ID NO 8197
gagcaacacgagggtaaataacacaactccgttcgttcttacaagggcactgcgtcgatcgctgtgactctgcttagaggtattgaaatcaggcgtcaaatatgtcgccatggcagcagtgcagtccaattcctcgctgctgcgaacccggtcgctgcgtgctccggcgaaaccagcggcgttgaccgctcccacagcagcatcacatttatcacattcatcacattcgcaacgcagcacgccactgcaggtcccgacatgcacctccaacgtcgtcctcttcctctcgaacctccgactgctcgacctcgacctcgatcccgactggcctgacatcactgccaccacattttccgccaaagatgccgtcggcggccagaagaaacgcatccactgcgtcgaatgggctctgtaccgcctcttcgacctctgggatcatgccgagacccagaacaaactccgccctttctacccgcctaccgaccaggtgcaatccatcaacctgcgagctgctctggtgcgaagtctagagcaagcaaaaaaggctggggtcttgggtcgcgatgctatcgttcgcaaaaccatgcttgacgagtgcaagggcgagaggctggaggaagtcctcgctgtcttctcctctgccgtcctcaagaaactcgtagctgaacgtgccttgaacggcggctcagaatacagacccactgtgtcagagagcatatcactggagaactggggctattcgggcaatcgcactgagctcaacgggctcctgcttgcacacaaggcttccctccgatccaccctggaccggaggagcgctgcacgggatcgctatcgcagtttcgaggaattgctagccgccaaagaacgagacatcgcgagacgccaagcacatgccagactggaggctccaagtcgagctcccgacatatcagagacagccaaagcagaagtacgacgcgtccttcggggcaactggaccgtaaatgagcagtggcttgatggcttactcctgagccaagttcaatcgcggaagagcggtttattgactactccttttgatcaagtgtggagcagcgtaaaagacggcgatatcacagatctagcagacgaaacgactgatttgctcgaacagctggaccaacgagttcatcgtcagaaagcccgacttcagaaatgggacgactttcataagtgtacattcggcgacgccaaaatgagagagtcccgcaaggccgcggagcagccaaggaaaaagggtgtcgatttgggattgaccgcccactttgacacccactcgaatacgcaaagaatatcaaaatacacacaatccgagagtctaccgcccgattatacggcacttattagtcgcctagaaaataaagtggaaggcccaaaacaacccaatgtcccaagcttctcaaacttactggctggcatgagaaggaggcctgcgggcgtgattcctcgattcatcccaccaccgccgtcagagcccaccgctgagccgatttctgatctgagcgaatgggaggacgagccagaggaaaaggttgtcgtacccaaggaagctgggaaacctaacaatcagtccatcaccggcggggttcgcccaagtaatattcctgccgtagtgacaggttcgcgaagacaaatgatcagaaccaggcctcaacctaagggacgtcaaataagtccggttcgtcaccccgaatccaccgagaatcatagtgagcctatgctacatcaaatacatgctagccctacatccactcagcatctacggtcgtctacagattctatcgttcctagttctatctcaagttatgacgcagctccctcgcccccttcaagggcctcggatgacgatattacacttactgtccagcgacctccttctcccacacaagctcttgctgatgagatcgttgcttccatgaacaacacatctccttcgccaaacaaaaaatcacgatacactctttccttggcagagaggacacgcatgtctatggcacgcacgaagcctcttcaacccgaggacgcgacaccacctgtctcccctcagaaaatgagccatgcagaggtgagtgatgatcctttggcagaaaagagtgcggagcccggtgagcagtacgaggatctcattgcccgaactcgacgctccatggccggctttgaagcagcgagacaaaaagctcagctggaaaggcgacggtcccagaggaagagtaaagtggtgcaaaggaaagatagctactttcccaaggttgaggaagaaggggtgggcgatgtttctattgctgaggagttgatcgaggctggagaagaggactatgctgctgtctttatgagtagaccacgcattgccacgagcccagcaccgaggcctggcgcctcaagatgggatgaagaatagccagtcgtcgtgctgtcgattggactggcggtcatgattacaccgatgatagaatgagctatgtttatgatactctcacgataaaatacgatactgctaatccacaagtgaccccatgcaatgcaaaatccccctcgtggcatatcttcgcagcctggaaacaactagctcatacctgaagtgttatgaatacagtaccagagccctaacctcaatgctctcacgatgatcccgatccgccatctgcggatcttcaaaagccgagtggggagaacggcgcgcaaggcctggggcggtagacgagtcgaagcacttaatcagcaacgcctcatcaggtctctgcgcatacttgtaataccacatgtgtctctcattcgggagtatagtccaagtctcgtctcggtcgcctttaggatacaagatcgaggctgcgatcaggtcatcgtcgtcaatagaggttgcgtctgccacggcaaagggatccttctcgattttcttcaggggtcgccaga

SEQ ID NO: 8200 - DNA, 843 bp, Muscodor strobelii
  misc_feature: SGI cDNA ID NO. 562513
  misc_feature: Encodes the peptide sequence at SEQ ID NO 8201
atgactatcgagtatcaaaaacacgatgtatcaacatgcataaactattatcgcgacccaggagatggcctaccaccagagcccgtccgaatctcagacaaaacagtaaaaaacgagcgcccgaaaattgcgattccgaagatcatacaagatgtcacaggcgaggaggacaaatacacactagatagaaacggcttccaattcatttaccatgagacaaagctgcacgagacagatttccacgacagcgagatagtagaacggatatattacgccgaagcggcgaaacttttgaaggacatcaccggagcagatcaagcccatatcttcgaccacaaagtccgcgtcggaccctcaaactggcacaaactgggcgaaggcaaccggggagctcgcggccccttattcagagcacacgtcgaccaatcctacgccggcgcagaaatcgtcctgcgaaggaatttccccgatgactcggaaaaactactagagggccggtatcaaatcatcaatatctggcgacccctgaagaaaatcgagaaggatccctttgccgtggcagacgcaacctctattgacgacgatgacctgatcgcagcctcgatcttgtatcctaaaggcgaccgagacgagacttggactatactcccgaatgagagacacatgtggtattacaagtatgcgcagagacctgatgaggcgttgctgattaagtgcttcgactcgtctaccgccccaggccttgcgcgccgttctccccactcggcttttgaagatccgcagatggcggatcgggatcatcgtgagagcattgaggttagggctctggtactgtattcataa

SEQ ID NO: 8201 - protein, 280 aa, Muscodor strobelii
  misc_feature: SGI Peptide ID NO. 562513
  misc_feature (1)..(279): NCBI GI: 261359872 Blast Desc: conserved [Verticillium albo-atrum VaMs.102]
  misc_feature (3)..(280): NCBI GI: 39940198 Blast Desc: MGG_05141 [Magnaporthe grisea 70-15] gi|145010602|gb|EDJ95258.1| MGG_05141 [Magnaporthe grisea 70-15]
  misc_feature (6)..(280): NCBI GI: 171685310 Blast Desc: protein product [Podospora anserina] gi|170942616|emb|CAP68268.1| protein product [Podospora anserina]
  misc_feature (6)..(279): NCBI GI: 116200931 Blast Desc: CHGG_08350 [Chaetomium globosum CBS 148.51] gi|88176868|gb|EAQ84336.1| CHGG_08350 [Chaetomium globosum CBS 148.51]
  misc_feature (6)..(279): NCBI GI: 169608550 Blast Desc: SNOG_07357 [Phaeosphaeria nodorum SN15] gi|160701670|gb|EAT84823.2| SNOG_07357 [Phaeosphaeria nodorum SN15]
  misc_feature (6)..(279): NCBI GI: 261358032 Blast Desc: conserved [Verticillium albo-atrum VaMs.102]
  misc_feature (8)..(279): NCBI GI: 171695802 Blast Desc: protein product [Podospora anserina] gi|170948143|emb|CAP60307.1| protein product [Podospora anserina]
  misc_feature (7)..(279): NCBI GI: 171676302 Blast Desc: protein product [Podospora anserina] gi|170936217|emb|CAP60876.1| protein product [Podospora anserina]
  misc_feature (8)..(279): NCBI GI: 119489980 Blast Desc: NFIA_062100 [Neosartorya fischeri NRRL 181] gi|119411106|gb|EAW21049.1| conserved [Neosartorya fischeri NRRL 181]
  misc_feature (8)..(279): NCBI GI: 70998803 Blast Desc: conserved [Aspergillus fumigatus Af293] gi|66851760|gb|EAL92085.1| conserved [Aspergillus fumigatus Af293] gi|159127143|gb|EDP52258.1| conserved [Aspergillus A1163]
MTIEYQKHDVSTCINYYRDPGDGLPPEPVRISDKTVKNERPKIAIPKIIQDVTGEEDKYTLDRNGFQFIYHETKLHETDFHDSEIVERIYYAEAAKLLKDITGADQAHIFDHKVRVGPSNWHKLGEGNRGARGPLFRAHVDQSYAGAEIVLRRNFPDDSEKLLEGRYQIINIWRPLKKIEKDPFAVADATSIDDDDLIAASILYPKGDRDETWTILPNERHMWYYKYAQRPDEALLIKCFDSSTAPGLARRSPHSAFEDPQMADRDHRESIEVRALVLYS

SEQ ID NO: 8202 - DNA, 252 bp, Muscodor strobelii
  misc_feature: SGI cDNA ID NO. 562514
  misc_feature: Encodes the peptide sequence at SEQ ID NO 8203
atgtctgctgacggtcacggactacccgataatgcggttagaagcgcgcatgacatgattcatcatgccgagcaagaggaacatgaacatgaagccgccgccaaacgtggtctatctgacgaggctgcggaagcagaatatgatttaatacatcatgccgaagaagaacaggaaaagctggaaaagaagcagcacggagcgggcagcaagattaagaaaacaatcgacaaactcataccaggtaaacattga

SEQ ID NO: 8203 - protein, 83 aa, Muscodor strobelii
  misc_feature: SGI Peptide ID NO. 562514
MSADGHGLPDNAVRSAHDMIHHAEQEEHEHEAAAKRGLSDEAAEAEYDLIHHAEEEQEKLEKKQHGAGSKIKKTIDKLIPGKH

SEQ ID NO: 8204 - DNA, 516 bp, Muscodor strobelii
  misc_feature: SGI cDNA ID NO. 562515
  misc_feature: Encodes the peptide sequence at SEQ ID NO 8205
atgctcaaggaagcacaggtggccggaagatctgccctgcgctgtgccgttcgagcagccgcatacgccgacaaaagtaaagttatcaatagccacaagctcgcccgtgaggcattttattactacggactggcacttgtcgctctcggtgaatcattagccgaatcgtccaagatgcctgacgattatgacctgatgacggtcgtcatgctcgacatatttgagacatttcataatcaagatcgcaccatgaaagggatgcacgctcaaggcatggcgcaaatattaagacttcgagaagatcgtaagttaagcaccggatctgctcttactgagcactttgttgcttatttggataagcttgtgttcactgacaatgttctcccaaagtgtgtcagtctccccgtggctggagccttttcaggcttgctcatcacaggattcaaaaagaacagctcgcctttaatattgcatcatattccttcgcggaatcggagaattggatcgctcatctaa

SEQ ID NO: 8205 - protein, 171 aa, Muscodor strobelii
  misc_feature: SGI Peptide ID NO. 562515
  misc_feature (1)..(106): NCBI GI: 242809918 Blast Desc: C6 transcription factor, [Talaromyces stipitatus ATCC 10500] gi|218716099|gb|EED15521.1| C6 transcription factor, [Talaromyces stipitatus ATCC 10500]
  misc_feature (1)..(104): NCBI GI: 212537207 Blast Desc: C6 transcription factor, [Penicillium marneffei ATCC 18224] gi|210068501|gb|EEA22592.1| C6 transcription factor, [Penicillium marneffei ATCC 18224]
  misc_feature (8)..(99): NCBI GI: 146322942 Blast Desc: C6 transcription factor [Aspergillus fumigatus Af293] gi|129558537|gb|EAL93501.2| C6 transcription factor, [Aspergillus fumigatus Af293] gi|159129603|gb|EDP54717.1| C6 transcription
MLKEAQVAGRSALRCAVRAAAYADKSKVINSHKLAREAFYYYGLALVALGESLAESSKMPDDYDLMTVVMLDIFETFHNQDRTMKGMHAQGMAQILRLREDRKLSTGSALTEHFVAYLDKLVFTDNVLPKCVSLPVAGAFSGLLITGFKKNSSPLILHHIPSRNRRIGSLI

SEQ ID NO: 8206 - DNA, 1712 bp, Muscodor strobelii
  misc_feature: SGI EST ID NO. CUFF.20038.1
  misc_feature: Variant of the nucleotide sequence at SEQ ID NO 8204
tgcagacttgctaaactcgattgggaacctttccaacctcagcgcatcacttctgtgcgataaattaccgaattgactaacactgactgttgcaaatgtcgcgtctcagccgtggctgtctcaaatgtaggcaaagacgtgtcagatgtgatgagggacgaccagtctgccagcgttgcatcaagcgcaatgaggtttgtgaggggtatcgcgacaccgggtctctcatctttcgggacgaaacgacgaaaacgaaagatcggttcaacgcttacgttccatcaagagcgccagtttcagagcaccagtatcttgctacgcgccaacggagtcgatcagttgaagcattgccaactcacggggttccaagaatctctgcaatcccgttatattcggaaaaagacaaggctagcagcatccagtttccaaaccaagggcaatcgcctaccaagagcccagctgaggatgggttagttgatgtgttcgtggaaaaatatgttttctatcctagcaacgacatatcttcatcaggagggtttctagagcatcttcctaccatgctcaaggaagcacaggtggccggaagatctgccctgcgctgtgccgttcgagcagccgcatacgccgacaaaagtaaagttatcaatagccacaagctcgcccgtgaggcattttattactacggactggcacttgtcgctctcggtgaatcattagccgaatcgtccaagatgcctgacgattatgacctgatgacggtcgtcatgctcgacatatttgaggtatttccgaacgcttaagtctcctactaatacacttaccatacccagacatttcataatcaagatcgcaccatgaaagggatgcacgctcaaggcatggcgcaaatattaagacttcgagaagatctgtgtcagtctccccgtggctggagccttttcaggcttgctcatcacaggattcaaaaagaacagctcgcctttaatattgcatcatattccttcgcggaatcggagaattggatcgctcatctaaacgatgacatacccttcgtacatctggaaaaggatgcaatgcgaatttccaaaatatgcaagcgcgcacgatgcttccaaaatgcgtctgacgttgacgaaaatgtgtctgcgctacttgaagtgacgaacgagctgcttgcgcttgatcgcgaagtttccggttggagacaaagccccatatgggcttataccaccgtacatacttctaccctcgcgccttttgatcattgttgcatgcccttgacggaaactatcgagatacaccgagacatttggctcatttatgagtggaattagtaagttgcagacaccgttttgtaacccgactcggagacatccgcagcataaaagcccagatcctttgcaaagagcaatttaaatcgtgttttgacacatcaaagccatcgaacagcacgtatgattgcccatgagcacatcctcaaatgcattcatcttgcactcgagtctcctggcctagatccagctggtgttgaaacgctagaagttgtggctcagcagtccacggacaccctacacaccctcgccgaggaaattctcgctacagtgccacagtcatttggtgacatagactcatccggccgcgttcatgatcatgtcgccgaaggcccaccaagatgtcgagccatcggcgcatacttccaattatggccagtg

SEQ ID NO: 8207 - DNA, 759 bp, Muscodor strobelii
  misc_feature: SGI cDNA ID NO. 562516
  misc_feature: Encodes the peptide sequence at SEQ ID NO 8208
atgctttcgtccatcacgttcgctcaagcttctttagctaccgccataggggtcggtgccatcggtatctgggctggcgcgacaccgccacgaacaacaccagacattcacaaaacgcccacgacaggtgactcgattcgtcgactcattcgcctgcaggagaaatatggaagcctgcttttcatgccattcgctcgcactaatctgcgtatcgcagcactgcatcatgtgtcgctagttctgacgtaccccaatgctcctgccaatctcatcagacatggtggtgagaatgggctcaacgctcgctatcttacgtggtcgacggcgacggcgctaccgctggcagcgataatctgtgttggcgtacctcttcgccttttctcttacgctggactcgggaagaacttcacatttggcctcgcagagcctgaccgcctgaacacgggcggattgtatagatatcttcaacacccgagttacacaggtatggctgccatcatgattggtgtgtacgggctttggggccgagcagatggtgtgctgagttgctttatatctcccaaccggtatccgagcttggtaatgagtgaatttttgagcgccttggaaccagttgttgttccttgcatggccgccgtattcttctacggaatctggacaagagtgaaggaggaagaacggatgctacacgcaaaatttggttccgactgggagacttggcatgcgcagactgcacgatttatcccatttctctgttag

SEQ ID NO: 8208 - protein, 252 aa, Muscodor strobelii
  misc_feature: SGI Peptide ID NO. 562516
  misc_feature (115)..(162): Pfam Id: PF04140 Pfam Desc: Isoprenylcysteine carboxyl methyltransferase (ICMT) family
  misc_feature (1)..(251): NCBI GI: 46111137 Blast Desc: FG02450.1 [Gibberella zeae PH-1]
  misc_feature (5)..(251): NCBI GI: 256725636 Blast Desc: NECHADRAFT_70163 [Nectria haematococca mpVI 77-13-4]
  misc_feature (79)..(249): NCBI GI: 171682534 Blast Desc: protein product [Podospora anserina] gi|170941226|emb|CAP66876.1| protein product [Podospora anserina]
  misc_feature (25)..(249): NCBI GI: 121716186 Blast Desc: prenyl cysteine carboxyl methyltransferase, [Aspergillus clavatus NRRL 1] gi|119403859|gb|EAW14276.1| prenyl cysteine carboxyl methyltransferase, [Aspergillus clavatus NRRL
  misc_feature (65)..(249): NCBI GI: 119481733 Blast Desc: prenyl cysteine carboxyl methyltransferase, [Neosartorya fischeri NRRL 181] gi|119409049|gb|EAW18998.1| prenyl cysteine carboxyl methyltransferase, [Neosartorya fischeri
  misc_feature (97)..(241): NCBI GI: 145235181 Blast Desc: An03g03570 [Aspergillus niger] gi|134057920|emb|CAK47797.1| protein product [Aspergillus niger]
  misc_feature (38)..(249): NCBI GI: 145235613 Blast Desc: An03g05760 [Aspergillus niger] gi|134058142|emb|CAK38336.1| protein product [Aspergillus niger]
  misc_feature (71)..(245): NCBI GI: 71002180 Blast Desc: prenyl cysteine carboxyl methyltransferase [Aspergillus fumigatus Af293] gi|66853409|gb|EAL93733.1| prenyl cysteine carboxyl methyltransferase, [Aspergillus fumigatus
  misc_feature (71)..(245): NCBI GI: 159129826 Blast Desc: prenyl cysteine carboxyl methyltransferase, [Aspergillus fumigatus A1163]
  misc_feature (28)..(251): NCBI GI: 242208958 Blast Desc: [Postia placenta Mad-698-R] gi|220730635|gb|EED84489.1| [Postia placenta Mad-698-R]
MLSSITFAQASLATAIGVGAIGIWAGATPPRTTPDIHKTPTTGDSIRRLIRLQEKYGSLLFMPFARTNLRIAALHHVSLVLTYPNAPANLIRHGGENGLNARYLTWSTATALPLAAIICVGVPLRLFSYAGLGKNFTFGLAEPDRLNTGGLYRYLQHPSYTGMAAIMIGVYGLWGRADGVLSCFISPNRYPSLVMSEFLSALEPVVVPCMAAVFFYGIWTRVKEEERMLHAKFGSDWETWHAQTARFIPFLC

SEQ ID NO: 8209 - DNA, 1197 bp, Muscodor strobelii
  misc_feature: SGI EST ID NO. CUFF.20050.0
  misc_feature: Variant of the nucleotide sequence at SEQ ID NO 8207
gccgttgcggcccggagtgagtcccagaagccagtatcagaatctcagacaacgacaacattaattagcaggctttggcttacagtgttttccttgcagacagtagggatttgaatgccgcaaacactcttagcgatcggcatcgggattcatgaccgtcaattccgtttctggcctacttatgggtcccttgtcatgcccctttggtatcacgccgccaaattgagttaccggcatagggaatatacaaataaataggctttgcctaagcagtaacattgcgcgcgagttcaatggatcgaaggtgtagtcgcagaatcggactgtaaacagaaatttgtgaatagcttctgtaacgcgggatacaattcactcattttgtgacatctaggacccctatcgtgacccggggtatcttgaagaggttaagttgaaatttacaaagatagggaagctctaagttcttcgtcactcgacacatttaaaagccccaacgtctgctcttcgagagaatcactggatatctcgtcatttccccattccgttcagctacgtctagacgctgatattaatctgttcatctcacaattggagacccctgctccacaatgctttcgtccatcacgttcgctcaagcttctttagctaccgccataggggtcggtgccatcggtatctgggctggcgcgacaccgccacgaacaacaccagacattcacaaaacgcccacgacaggtgactcgattcgtcgactcattcgcctgcaggagaaatatggaagcctgcttttcatgccattcgctcggtaagtgtgcaccccattggactagacaactcttaaggagaccttccgcgcacagcactaatctgcgtatcgcagtatgtgtatactcctcccgctaaataggccaagataaggtctcgagtggcagattaagtgttcaagctaatgtgccacgtgctatcatcaagtccaggcactgcatcatgtgtcgctagttctgacgtaccccaatgctcctgccaatctcatcagacatggtggtgagaatgggctcaacgctcgctatcttacgtggtcgacggcgacggcgctaccgctggcagcgataatctgtgttggcgtacctcttcgccttttctcttacgctggactcgggaagaacttcacatttggcctcgcagagcctgaccgcc

SEQ ID NO: 8210 - DNA, 951 bp, Muscodor strobelii
  misc_feature: SGI cDNA ID NO. 562517
  misc_feature: Reduced expression when VOC is produced
  misc_feature: Encodes the peptide sequence at SEQ ID NO 8211
atgtccaaagcggtggatgttcttatcctagggagcggccctgccggcctctcgacggcgggtggtatcgcacgtcaacttcacacagcaatcgtattcaatactggaacgtttcgaaacagcggcgttccacacatgcacaatgaatctatgctaagacgtgctatagttgcaggatttgatcacgaagacccagcttctttccgatccaaggcccaggaggacataacaaaacgctaccagaccatctcattccacaattctgctgttaagagcgtacggaagcttgagaatggacacttcgaagctgttgacgagactggtcagacatatgagggtcggagagtagttgtggccagtggcattaaggatattatgcccgatatccgtgggtattcggacctctggggaaagggcatatttcactgccttttctgccacgggttcgaagagcgtggtgccgtttcagcaggtgtgttggctgctgggttattcgcaaatgcaatgttcccaccagctatcgcgcgaatggcaaatcggcttgcgggctctgtcaatgtctacacggaaggcgatgaatcactcggcagcgaaattagagctctccttaagagcacgaaaagatttcacattgaaacacgcaaaatcaaaagtttagccaaggatcccgatgtcgagggcgatgccggtgtcattgtaactctcgaagatggaacaatcaataaggagggattcattgctcatgtccctgactttgaactcaatggctcttttgctacggatctgggactcgagatcgcacttcagtataatacaaatgtcccgggggtttttgctgctggcgactgcgcgacgatgatgagagctgtcccaatggcaactgccatgggatcctttgtcgctgctggactggctcattcaattcaagccgatgatgatgttgaagattga

SEQ ID NO: 8211 - protein, 316 aa, Muscodor strobelii
  misc_feature: SGI Peptide ID NO. 562517
  misc_feature (6)..(287): Pfam Id: PF07992 Pfam Desc: Pyridine nucleotide-disulphide oxidoreductase
  misc_feature (2)..(316): NCBI GI: 256726440 Blast Desc: NECHADRAFT_39395 [Nectria haematococca mpVI 77-13-4]
  misc_feature (6)..(309): NCBI GI: 169772729 Blast Desc: [Aspergillus oryzae RIB40] gi|83768694|dbj|BAE58831.1| protein product [Aspergillus oryzae]
  misc_feature (6)..(309): NCBI GI: 238490638 Blast Desc: thioredoxin reductase GliT-like, [Aspergillus flavus NRRL3357] gi|220696969|gb|EED53310.1| thioredoxin reductase GliT-like, [Aspergillus flavus NRRL3357]
  misc_feature (2)..(314): NCBI GI: 67527011 Blast Desc: AN3963.2 [Aspergillus nidulans FGSC A4] gi|40740244|gb|EAA59434.1| AN3963.2 [Aspergillus nidulans FGSC A4] gi|259481459|tpe|CBF74996.1| TPA: thioredoxin reductase GliT
  misc_feature (5)..(311): NCBI GI: 119470772 Blast Desc: pyridine nucleotide-disulphide oxidoreductase, [Neosartorya fischeri NRRL 181] gi|119406243|gb|EAW16194.1| pyridine nucleotide-disulphide oxidoreductase, [Neosartorya NRRL
  misc_feature (5)..(311): NCBI GI: 70992029 Blast Desc: thioredoxin reductase GliT [Aspergillus fumigatus Af293] gi|56609349|gb|AAW03299.1| GliT [Aspergillus fumigatus] gi|66848496|gb|EAL88825.1| thioredoxin reductase GliT fumigatus
  misc_feature (1)..(316): NCBI GI: 46124241 Blast Desc: FG06498.1 [Gibberella zeae PH-1]
  misc_feature (6)..(314): NCBI GI: 242805748 Blast Desc: thioredoxin reductase GliT [Talaromyces stipitatus ATCC 10500] gi|218715221|gb|EED14643.1| thioredoxin reductase GliT [Talaromyces stipitatus ATCC 10500]
  misc_feature (6)..(311): NCBI GI: 115397443 Blast Desc: ATEG_05135 [Aspergillus terreus NIH2624] gi|114192504|gb|EAU34204.1| ATEG_05135 [Aspergillus terreus NIH2624]
  misc_feature (6)..(311): NCBI GI: 39972893 Blast Desc: MGG_07741 [Magnaporthe grisea 70-15] gi|145012508|gb|EDJ97162.1| MGG_07741 [Magnaporthe grisea 70-15]
  misc_feature: Useful for introducing or modulating the production of volatile compounds
MSKAVDVLILGSGPAGLSTAGGIARQLHTAIVFNTGTFRNSGVPHMHNESMLRRAIVAGFDHEDPASFRSKAQEDITKRYQTISFHNSAVKSVRKLENGHFEAVDETGQTYEGRRVVVASGIKDIMPDIRGYSDLWGKGIFHCLFCHGFEERGAVSAGVLAAGLFANAMFPPAIARMANRLAGSVNVYTEGDESLGSEIRALLKSTKRFHIETRKIKSLAKDPDVEGDAGVIVTLEDGTINKEGFIAHVPDFELNGSFATDLGLEIALQYNTNVPGVFAAGDCATMMRAVPMATAMGSFVAAGLAHSIQADDDVED

SEQ ID NO: 8212 - DNA, 745 bp, Muscodor strobelii
  misc_feature: SGI EST ID NO. CUFF.20059.0
  misc_feature: Variant of the nucleotide sequence at SEQ ID NO 8210
caatcggcgggaaatttcaggatggaacaaaacaattctaagccatgacgaattgggagcagactaatatgttttcatacaccaggttgcaggatttgatcacgaagacccagcttctttccgatccaaggcccaggaggacataacaaaacgctaccagaccatctcattccacaattctgctgttaagagcgtacggaagcttgagaatggacacttcgaagctgttgacgagactggtcagacatatgagggtcggagagtagttgtggccagtggcattaaggatattatgcccgatatccgtgggtattcggacctctggggaaagggcatatttcactgccttttctgccacgggttcgaagagcgtggtgccgtttcagcaggtgtgttggctgctgggttattcgcaaatgcaatgttcccaccagctatcgcgcgaatggcaaatcggcttgcgggctctgtcaatgtctacacggaaggcgatgaatcactcggcagcgaaattagagctctccttaagagcacgaaaagatttcacattgaaacacgcaaaatcaaaagtttagccaaggatcccgatgtcgagggcgatgccggtgtcattgtaactctcgaagatggaacaatcaataaggagggattcattgctcatgtccctgactttgaactcaatggctcttttgctacggatctgggactcgagatcgcacttcagggccatataaatgcactaccg

SEQ ID NO: 8213 - DNA, 1182 bp, Muscodor strobelii
  misc_feature: SGI cDNA ID NO. 562518
  misc_feature: Encodes the peptide sequence at SEQ ID NO 8214
atgtttcaaggcttcgtaatactgtttttggctctagtggcggagacacaggcacttagccagtcatcaaaggcgaagaagaggcccattatacttgactcatcaggtggcttcaatgtagctggcaaagtgatcaagagcccgttcaatccaagcatgacactgtcgtgcgatcatggctatatggagtacttcattccatggagaccacgaaagacgagtctagtcatgtggcatagctcatcgactcagacttggcaaaatcgtttcgatgggggcgaagggtataaagacatgttcttgcgtcgggactaccctgtgtatctatgggatgcaccaagacttggtcgggcgaactgggcctgtgagcctgagttctacacgcctgactatcgagaccaaggcaatttcgtcgcttggaactttggaccttcgtatggacacttttggaacgatacgcagttccctgcggcaaacaaaactgcctgggagcaagccacgcgctctcgctacgtcgaatatgataacaatgcgaatatctggcttcaagcagaggcagccgcgatcgccgcagactcaggacagatcggcgatagcgtcgtttatttgactaattcggctgcaggcctccgcgctcagctggctgcaatactgagcaacacaacacacacaaaggctatcgtggcatatgagagtttcggatacgtctttcccgataacatcaatatgaccgcgggtacgccgtttgggcccctgatcgtgcctgttgcacagttcaagaaattggcaaagctatctgctattcaatacatatttagtgatcaccgcgaagaatcatttatctacttaaaacaggcacggcagtccgcgaagctcatcaactcgtacggtgggaacgcacaggtgcttctcctcggcaagcaggctggattgaaagggagcacacatattgcattcgcagatatggataatgcgaaggttgcaggtctcctagataggttcttggagaggaatgatcttgatggatacgtagacgatgatgaagatgacgacgacgacgacgacgacgacgatgatggctggacagacaaaagttgtatacggcgaaagcgacgtcacaggcgcgactggacagatcatacgaatcatcgcaagtcttggcctagagttagactgtggtga

SEQ ID NO: 8214 - protein, 393 aa, Muscodor strobelii
  misc_feature: SGI Peptide ID NO. 562518
  misc_feature (7)..(354): NCBI GI: 116205189 Blast Desc: CHGG_10478 [Chaetomium globosum CBS 148.51] gi|88176606|gb|EAQ84074.1| CHGG_10478 [Chaetomium globosum CBS 148.51]
  misc_feature (16)..(355): NCBI GI: 217978012 Blast Desc: Msil_1852 [Methylocella silvestris BL2] gi|217503388|gb|ACK50797.1| conserved [Methylocella silvestris BL2]
  misc_feature (29)..(343): NCBI GI: 255334026 Blast Desc: conserved [Hyphomicrobium denitrificans ATCC 51888] gi|255275669|gb|EET68751.1| conserved [Hyphomicrobium denitrificans ATCC 51888]
  misc_feature (26)..(343): NCBI GI: 171688160 Blast Desc: protein product [Podospora anserina] gi|170944042|emb|CAP70152.1| protein product [Podospora anserina]
  misc_feature (25)..(343): NCBI GI: 217976871 Blast Desc: Msil_0685 [Methylocella silvestris BL2] gi|217502247|gb|ACK49656.1| conserved [Methylocella silvestris BL2]
  misc_feature (1)..(341): NCBI GI: 116622028 Blast Desc: Acid_2913 [Solibacter usitatus Ellin6076] gi|116225190|gb|ABJ83899.1| conserved [Candidatus Solibacter usitatus Ellin6076]
  misc_feature (7)..(341): NCBI GI: 89901219 Blast Desc: Rfer_2442 [Rhodoferax ferrireducens T118] gi|89345956|gb|ABD70159.1| conserved [Rhodoferax ferrireducens T118]
  misc_feature (20)..(343): NCBI GI: 217978145 Blast Desc: Msil_1988 [Methylocella silvestris BL2] gi|217503521|gb|ACK50930.1| conserved [Methylocella silvestris BL2]
  misc_feature (29)..(342): NCBI GI: 217977950 Blast Desc: Msil_1789 [Methylocella silvestris BL2] gi|217503326|gb|ACK50735.1| conserved [Methylocella silvestris BL2]
  misc_feature (6)..(341): NCBI GI: 86130398 Blast Desc: MED134_05744 [Dokdonia donghaensis MED134] gi|85819073|gb|EAQ40232.1| MED134_05744 [Dokdonia donghaensis MED134]
MFQGFVILFLALVAETQALSQSSKAKKRPIILDSSGGFNVAGKVIKSPFNPSMTLSCDHGYMEYFIPWRPRKTSLVMWHSSSTQTWQNRFDGGEGYKDMFLRRDYPVYLWDAPRLGRANWACEPEFYTPDYRDQGNFVAWNFGPSYGHFWNDTQFPAANKTAWEQATRSRYVEYDNNANIWLQAEAAAIAADSGQIGDSVVYLTNSAAGLRAQLAAILSNTTHTKAIVAYESFGYVFPDNINMTAGTPFGPLIVPVAQFKKLAKLSAIQYIFSDHREESFIYLKQARQSAKLINSYGGNAQVLLLGKQAGLKGSTHIAFADMDNAKVAGLLDRFLERNDLDGYVDDDEDDDDDDDDDDDGWTDKSCIRRKRRHRRDWTDHTNHRKSWPRVRLW

SEQ ID NO: 8215 - DNA, 549 bp, Muscodor strobelii
  misc_feature: SGI cDNA ID NO. 562519
  misc_feature: Encodes the peptide sequence at SEQ ID NO 8216
atgcctatctactatgggtcgacgaccatcagcgacgaagagcgccgcaacctcattgagcagagcgagcagcaggccagacgcatgttcacggggtttgttgacttcgcattctccggcaacattcttgaaattgccttcggtctgatcctagcaaatgcgttcaccagcgtgacaaactcgttcgtcaacgacatcctcctaccgccgttgtccgtacttctcccgttgaatcgcaacatggatgaaaagttcgccgttctaaaacccggtccgaactatgataagcatagtggctacacgactattgacttagcgcatgaagatggcgccatagtcatggcttacggtggcttcatcagcaccgtggtcagcttcttatgccttggacttgcgctctatctcctcgcctgcctttaccaatggggctccaaagattctatcatcaaacacactgtcggttgcaagtactgcaagaaacgtgtcagcgagaaggtgcgttacgatgatgtctctattttgtcaagagacgctgatctgtctacctag

SEQ ID NO: 8216 - protein, 182 aa, Muscodor strobelii
  misc_feature: SGI Peptide ID NO. 562519
  misc_feature (29)..(75): Pfam Id: PF01741 Pfam Desc: Large-conductance mechanosensitive channel, MscL
  misc_feature (21)..(165): NCBI GI: 46136271 Blast Desc: FG09651.1 [Gibberella zeae PH-1]
  misc_feature (21)..(166): NCBI GI: 171683277 Blast Desc: protein product [Podospora anserina] gi|170941598|emb|CAP67252.1| protein product [Podospora anserina]
  misc_feature (1)..(162): NCBI GI: 145613616 Blast Desc: MGG_01480 [Magnaporthe grisea 70-15] gi|145020677|gb|EDK04806.1| MGG_01480 [Magnaporthe grisea 70-15]
  misc_feature (20)..(165): NCBI GI: 119473979 Blast Desc: ion channel, [Neosartorya fischeri NRRL 181] gi|119407018|gb|EAW16968.1| ion channel, [Neosartorya fischeri NRRL 181]
  misc_feature (20)..(165): NCBI GI: 121712146 Blast Desc: ion channel, [Aspergillus clavatus NRRL 1] gi|119401840|gb|EAW12262.1| ion channel, [Aspergillus clavatus NRRL 1]
  misc_feature (20)..(165): NCBI GI: 70986068 Blast Desc: ion channel [Aspergillus fumigatus Af293] gi|66846163|gb|EAL86496.1| ion channel, [Aspergillus fumigatus Af293]
  misc_feature (20)..(165): NCBI GI: 159128332 Blast Desc: ion channel, [Aspergillus fumigatus A1163]
  misc_feature (20)..(164): NCBI GI: 255954151 Blast Desc: Pc21g07880 [Penicillium chrysogenum Wisconsin 54-1255] gi|211589539|emb|CAP95685.1| Pc21g07880 [Penicillium chrysogenum Wisconsin 54-1255]
  misc_feature (33)..(163): NCBI GI: 164429285 Blast Desc: NCU09933 [Neurospora crassa OR74A] gi|157073013|gb|EAA28654.2| conserved [Neurospora crassa OR74A]
  misc_feature (33)..(163): NCBI GI: 16945414 Blast Desc: related to large-conductance mechanosensitive channel [Neurospora crassa]
MPIYYGSTTISDEERRNLIEQSEQQARRMFTGFVDFAFSGNILEIAFGLILANAFTSVTNSFVNDILLPPLSVLLPLNRNMDEKFAVLKPGPNYDKHSGYTTIDLAHEDGAIVMAYGGFISTVVSFLCLGLALYLLACLYQWGSKDSIIKHTVGCKYCKKRVSEKVRYDDVSILSRDADLST

SEQ ID NO: 8217 - DNA, 960 bp, Muscodor strobelii
  misc_feature: SGI cDNA ID NO. 562520
  misc_feature: Reduced expression when VOC is produced
  misc_feature: Encodes the peptide sequence at SEQ ID NO 8218
atgggaagggcgaagttcttgttggcagtgcctgctgccgttttctcactcgttgccttcgtgctcgcactcatactgttacttgctggcactgggccacagcaacgtcaacttgagccctaccacatcattgcagtcaatatctctggattcggacaagacctcgtatcctccgcgacgcaaacatcgtctagctcagagtcgtctccgtctccgacaagcatttgggaggaaatccagcaaggggccggtgacatcggccaagacatccaagatgagctaaatgacctcgtcggcgatgccgcagatgagattattgaggagcttggcatctctgattggtatagcttgcacatcatagctctctgcgagggaatgttcgcaaactcgtcgaatgtctataacaccaccaactgtaccgttcaagagacaggcctccgattcaacctcagtgcagtcttagatcatgagattgacgtaggaccgctcgacctcaaccttaatcaagttccaatcccggaaaaagtgcagaaagcgattaaccttgtcaatgacgcgctaaaagccctattcgttatttatgtcttggcaatcgccttctcgggtctgtccgttctgtcaagttcattggctggaattgctatgctgttcaagaactcggaacacccgaagtcagaacaccagctcaagattctgtatctgagtaacgtggctatttcgtcgatcgccactctgcttctcctgatcagcagtgccatcgtgacgtctgtcaacaacaagggcgttgaagagatcaatgatgccggcaaggacgttggaatctccggtatcaaggggttgaaattcattcaactcacatgggtcgcctttggcctggcgggtgcctcgacgttgatttggaccttggttttcttccacagcaggcgtggtcgtttctctaaaaaccattctcatatctga

SEQ ID NO: 8218 - protein, 319 aa, Muscodor strobelii
  misc_feature: SGI Peptide ID NO. 562520
  misc_feature (4)..(311): NCBI GI: 256731881 Blast Desc: NECHADRAFT_69663 [Nectria haematococca mpVI 77-13-4]
  misc_feature (4)..(311): NCBI GI: 46121827 Blast Desc: FG05291.1 [Gibberella zeae PH-1]
  misc_feature (14)..(315): NCBI GI: 261352445 Blast Desc: conserved [Verticillium albo-atrum VaMs.102]
  misc_feature (7)..(208): NCBI GI: 154290155 Blast Desc: BC1G_15770 [Botryotinia fuckeliana B05.10] gi|150848431|gb|EDN23624.1| BC1G_15770 [Botryotinia fuckeliana B05.10]
  misc_feature (16)..(318): NCBI GI: 85114980 Blast Desc: NCU00872 [Neurospora crassa OR74A] gi|28926582|gb|EAA35552.1| [Neurospora crassa OR74A]
  misc_feature (16)..(309): NCBI GI: 156030536 Blast Desc: SS1G_14492 [Sclerotinia sclerotiorum 1980] gi|154700883|gb|EDO00622.1| SS1G_14492 [Sclerotinia sclerotiorum 1980]
  misc_feature (5)..(314): NCBI GI: 189204159 Blast Desc: conserved [Pyrenophora tritici-repentis Pt-1C-BFP] gi|187985514|gb|EDU51002.1| conserved [Pyrenophora tritici-repentis Pt-1C-BFP]
  misc_feature (7)..(318): NCBI GI: 169623909 Blast Desc: SNOG_15203 [Phaeosphaeria nodorum SN15] gi|111056308|gb|EAT77428.1| SNOG_15203 [Phaeosphaeria nodorum SN15]
  misc_feature (8)..(308): NCBI GI: 171683259 Blast Desc: protein product [Podospora anserina] gi|170941589|emb|CAP67243.1| protein product [Podospora anserina]
  misc_feature (6)..(289): NCBI GI: 212543693 Blast Desc: conserved [Penicillium marneffei ATCC 18224] gi|210066908|gb|EEA21001.1| conserved [Penicillium marneffei ATCC 18224]
  misc_feature: Useful for introducing or modulating the production of volatile compounds
MGRAKFLLAVPAAVFSLVAFVLALILLLAGTGPQQRQLEPYHIIAVNISGFGQDLVSSATQTSSSSESSPSPTSIWEEIQQGAGDIGQDIQDELNDLVGDAADEIIEELGISDWYSLHIIALCEGMFANSSNVYNTTNCTVQETGLRFNLSAVLDHEIDVGPLDLNLNQVPIPEKVQKAINLVNDALKALFVIYVLAIAFSGLSVLSSSLAGIAMLFKNSEHPKSEHQLKILYLSNVAISSIATLLLLISSAIVTSVNNKGVEEINDAGKDVGISGIKGLKFIQLTWVAFGLAGASTLIWTLVFFHSRRGRFSKNHSHI

SEQ ID NO: 8219 - DNA, 2194 bp, Muscodor strobelii
  misc_feature: SGI EST ID NO. CUFF.20081.0
  misc_feature: Variant of the nucleotide sequence at SEQ ID NO 8217
tggagattgccatcgccagactagaggtgatgtttactcgtggaagaatgcacttacctacctacgaaatacatgtaacaatgatgtagatagaagtggaattgcgcattaagttcgactagtactcatgtatcagtagatacacagatctcacattcagcatgccatcacttgcacgagaatctagtacaacatggaccgtcgaagaaaggataatagtatgagcaacgtggttgagccaagggtcaaggtcggtgagctaatactagaccgtttaacccaccaaagttaacccggttattacgactagtggttggtgtcttgatttcagggtcttatgcgagtatgagtctatctcttggcatacgacggatcatcaacggttcagtcccatccagtcaatataattcaaccgctctattggcctgttgcagaaacaggtttgcgacagtcatagcttgaggtgaggtgcacgcaatgcaagtcactgttgctgcgagataatagcacgattgttgttggcctcgcgtggcctcccattatttcccgttgcctttatttgctctttgttctcaaatttccctttaacctacaaatttctcaaccaacccgctactcttgagctgccacctgatttctcaacatagaacaacaacaatatctcctcacctttttcttgtcacttcgttttgtttcactttcacgacaacatcaatcatactcttgagtgttcttcagcaggtctgatcacccatagccaccatgggaagggcgaagttcttgttggcagtgcctgctgccgttttctcactcgttgccttcgtgctcgcactcatactgttacttgctggcactgggccacagcaacgtcaacttgagccctaccacatcattgcagtcaatatctctggattcggacaagacctcgtatcctccgcgacgcaaacatcgtctagctcagagtcgtctccgtctccgacaagcatttgggaggaaatccagcaaggggccggtgacatcggccaagacatccaagatgagctaaatgacctcgtcggcgatgccgcagatgagattattgaggagcttggcatctctgattggtatagcttgcacatcatagctctctgcgagggaatgttcgcaaactcgtcgaatgtctataacaccaccaactgtaccgttcaagagacaggcctccgattcaacctcagtgcagtcttagatcatgagattgacgtaggaccgctcgacctcaaccttaatcaagttccaatcccggaaaaagtgcagaaagcgattaaccttgtcaatgacgcgctaaaagccctattcgttatttatgtcttggcaatcgccttctcgggtctgtccgttctgtcaagttcattggctggaattgctatgctgttcaagaactcggaacacccgaagtcagaacaccagctcaagattctgtatctgagtaacgtggctatttcgtcgatcgccactctgcttctcctgatcagcagtgccatcgtgacgtctgtcaacaacaagggcgttgaagagatcaatgatgccggcaaggacgttggaatctccggtatcaaggggttgaaattcattcaactcacatgggtcgcctttggcctggcgggtgcctcgacgttgatttggaccttggttttcttccacagcaggcgtggtcgtttctctaaaaaccattctcatatctgaggttataaggtgggacgtcccgcaggagacccgatattcttcagaagaagctcgagtcacgtcagttgacgatgggtcgatcctgtagcatggattcgacccgacgcgactactaatcttctaccattaatgatgtcgcgactggttatgaaggaatgactgatagacccgatcgacacacgtcgacactggaatgaattggcgttgggctgactacttgtttcaaaatgataccttttgcaggcggcaagattagattgattttgtatgtaattcagaaaaggcaagctcgagtcgttcgtttttctagatccgtaaggaagggggatgataggatccgccaatcttagtcaactacttcgtatgaccttggctgtagatgccaaatttgccaacaactagcaattgggaagtttcagtcacgactgtgatcgcccgctcatgtgctatcgtctctctcacaatctgctcg

SEQ ID NO: 8220 - DNA, 1473 bp, Muscodor strobelii
  misc_feature: SGI cDNA ID NO. 562521
  misc_feature: Encodes the peptide sequence at SEQ ID NO 8221
atgcctaagaaacgacaccagtccctctactccaaacccccctcagtggcgcccgcgtctctgcgtctgtcttcgtcgtcgcaaacatcgccagaccgccgcgaacgttctgtcaatgagctgctcaacaatctgcgagtgagcagcagcacccctcacgcgaacacgcctcatagcgctgttcttgcttccgctcctagtctcccaccgacgctgcgccacatcttccagcttcccgagactcccgctcccccaccacgccgtgcgtctgcctaccgtcgaacccgagatggccgtcgtctgccgcctggcccgccgcccccacgaagctggctagacttatcgcagtcccgacatgcaccggttcgctctggacacgatgctccgggccactacatccagcattggccgctccctggtgcctatgccccagatgcggcaagtctgatggacgtggccttgcgacacctggcccttgactggactcagcagcgcgactggaatcgattctacctatacgccttgccgagcaggctgcgatcggccctcttgcgccatgtctctgagttgcacggccccggagtgtccatcgaggatctacgcttagtattgctgggtccaccagatgaggagcttgccgaatacggcctcgagtcaccggatgttggggttgcgaatgcagatgtcttctatcttgaactcaccggttctccgggcaagtctttcagtctgaaagaacttagtgactttttgttcggtccgaagcatgctcccactgcggttgaagatgatgttcaagattcatgggatgcgccaccggcccctgccgtgctgcgcccggctgtgctgctacccaacttaacacatctgtcgcttgccgttgacccaggctctccactctctgtatcgtggaagcaattgctgtcactcgcagcgaaactaacgggactcacgcacttgagtttggctggttggcctgaaccgtcactgacacccaatgccaaatttgccaagatcacctcacccacaacaggacagcacctacagtacggaggaacgggaccttatagtcacaacctcgataacgactggaccgagggcattctcttattaaagcggctgagcaagttactgtacggtctcgagtaccttgacctcactggttgcgctgattggtttccggccctcagagagcagtcggatggtgagttccaaattgatgccgtagactgggttggtgactggggtaaaatcaccactttgcgtctcaactcaggatatgccgcagacgatacttccaagacacagattttacaaattgcagattggattgctgcggcggtggcagtggagaaacacatccgcgcgcaacgagcgggacgaggtcgttggatcaccatcgagcgagatcaactatcggaccatgcgcagaagattgtagatggcgagaaggccatatctacggtctggtag

SEQ ID NO: 8221 - protein, 490 aa, Muscodor strobelii
  misc_feature: SGI Peptide ID NO. 562521
  misc_feature (1)..(472): NCBI GI: 256727496 Blast Desc: NECHADRAFT_58133 [Nectria haematococca mpVI 77-13-4]
  misc_feature (1)..(474): NCBI GI: 46136385 Blast Desc: FG09708.1 [Gibberella zeae PH-1]
  misc_feature (36)..(468): NCBI GI: 116194640 Blast Desc: CHGG_03918 [Chaetomium globosum CBS 148.51] gi|88179831|gb|EAQ87299.1| CHGG_03918 [Chaetomium globosum CBS 148.51]
  misc_feature (1)..(463): NCBI GI: 145613618 Blast Desc: MGG_01478 [Magnaporthe grisea 70-15] gi|145020679|gb|EDK04808.1| MGG_01478 [Magnaporthe grisea 70-15]
  misc_feature (1)..(467): NCBI GI: 85089997 Blast Desc: NCU09922 [Neurospora crassa OR74A] gi|28919545|gb|EAA28972.1| [Neurospora crassa OR74A]
  misc_feature (144)..(471): NCBI GI: 171683337 Blast Desc: protein product [Podospora anserina] gi|170941628|emb|CAP67282.1| protein product [Podospora anserina]
  misc_feature (1)..(476): NCBI GI: 261352444 Blast Desc: conserved [Verticillium albo-atrum VaMs.102]
  misc_feature (1)..(467): NCBI GI: 16945420 Blast Desc: [Neurospora crassa]
  misc_feature (37)..(470): NCBI GI: 156030508 Blast Desc: SS1G_14478 [Sclerotinia sclerotiorum 1980] gi|154700869|gb|EDO00608.1| SS1G_14478 [Sclerotinia sclerotiorum 1980]
  misc_feature (1)..(463): NCBI GI: 212526268 Blast Desc: tafazzin [Penicillium marneffei ATCC 18224] gi|210072689|gb|EEA26776.1| tafazzin [Penicillium marneffei ATCC 18224]
MPKKRHQSLYSKPPSVAPASLRLSSSSQTSPDRRERSVNELLNNLRVSSSTPHANTPHSAVLASAPSLPPTLRHIFQLPETPAPPPRRASAYRRTRDGRRLPPGPPPPRSWLDLSQSRHAPVRSGHDAPGHYIQHWPLPGAYAPDAASLMDVALRHLALDWTQQRDWNRFYLYALPSRLRSALLRHVSELHGPGVSIEDLRLVLLGPPDEELAEYGLESPDVGVANADVFYLELTGSPGKSFSLKELSDFLFGPKHAPTAVEDDVQDSWDAPPAPAVLRPAVLLPNLTHLSLAVDPGSPLSVSWKQLLSLAAKLTGLTHLSLAGWPEPSLTPNAKFAKITSPTTGQHLQYGGTGPYSHNLDNDWTEGILLLKRLSKLLYGLEYLDLTGCADWFPALREQSDGEFQIDAVDWVGDWGKITTLRLNSGYAADDTSKTQILQIADWIAAAVAVEKHIRAQRAGRGRWITIERDQLSDHAQKIVDGEKAISTVW

SEQ ID NO: 8222 - DNA, 1888 bp, Muscodor strobelii
  misc_feature: SGI EST ID NO. CUFF.20083.0
  misc_feature: Variant of the nucleotide sequence at SEQ ID NO 8220
aaacaccatcagcgcagtggcacagcacttaagaggcatgagtcattggcacatgcgtcacaagttggccatcacattagtaattgctattgttggacatcttgggtagaacttgggtccacgtgtgtttataacagctcggtcgtcgtgggttcattcggcctgtctcctgcggcattgcatcgcgcgacagtacaggcagctatgccttctcttgtctcctggtatgcctaagaaacgacaccagtccctctactccaaacccccctcagtggcgcccgcgtctctgcgtctgtcttcgtcgtcgcaaacatcgccagaccgccgcgaacgttctgtcaatgagctgctcaacaatctgcgagtgagcagcagcacccctcacgcgaacacgcctcatagcgctgttcttgcttccgctcctagtctcccaccgacgctgcgccacatcttccagcttcccgagactcccgctcccccaccacgccgtgcgtctgcctaccgtcgaacccgagatggccgtcgtctgccgcctggcccgccgcccccacgaagctggctagacttatcgcagtcccgacatgcaccggttcgctctggacacgatgctccgggccactacatccagcattggccgctccctggtgcctatgccccagatgcggcaagtctgatggacgtggccttgcgacacctggcccttgactggactcagcagcgcgactggaatcgattctacctatacgccttgccgagcaggctgcgatcggccctcttgcgccatgtctctgagttgcacggccccggagtgtccatcgaggatctacgcttagtattgctgggtccaccagatgaggagcttgccgaatacggcctcgagtcaccggatgttggggttgcgaatgcagatgtcttctatcttgaactcaccggttctccgggcaagtctttcagtctgaaagaacttagtgactttttgttcggtccgaagcatgctcccactgcggttgaagatgatgttcaagattcatgggatgcgccaccggcccctgccgtgctgcgcccggctgtgctgctacccaacttaacacatctgtcgcttgccgttgacccaggctctccactctctgtatcgtggaagcaattgctgtcactcgcagcgaaactaacgggactcacgcacttgagtttggctggttggcctgaaccgtcactgacacccaatgccaaatttgccaagatcacctcacccacaacaggacagcacctacagtacggaggaacgggaccttatagtcacaacctcgataacgactggaccgagggcattctcttattaaagcggctgagcaagttactgtacggtctcgagtaccttgacctcactggttgcgctgattggtttccggccctcagagagcagtcggatggtgagttccaaattgatgccgtagactgggttggtgactggggtaaaatcaccactttgcgtctcaactcaggatatgccgcagacgatacttccaagacacagattttacaaattgcagattggattgctgcggcggtggcagtggagaaacacatccgcgcgcaacgagcgggacgaggtcgttggatcaccatcgagcgagatcaactatcggaccatgcgcagaagattgtagatggcgagaaggccatatctacggtctggtagacggggcatactcgtcggggcgtcgggatagagggtgttgagcccactgatcattgtacattgcatctcaagaatctttgcataggacattgagaatagaataatcatgaaataacctctcgaatataactcttcaatgtcttgaaatcaacttgaagccatcacgagaaagcaatttgaagagtagaa

SEQ ID NO: 8223 - DNA, 891 bp, Muscodor strobelii
  misc_feature: SGI cDNA ID NO. 562522
  misc_feature: Reduced expression when VOC is produced
  misc_feature: Encodes the peptide sequence at SEQ ID NO 8224
atggcagaaacacaccacttcgacgcacaaaagctgttcaatgtcaagggctacgtggctgtagtgacaggcggtggaacaggaatcggtctgatgacctcgcaagctctcgcagccaatggcgcaaaagtctacatcacggggcgacgagaggacgctcttgcaaaggcagcagaatcacatcaacctacatctggtgaaggcgcgatcatccccgttggtccatgcgacgtgacgaaaaaggaagatctcgacaatcttgttgcagagattcagaagaaggaatcatgcatacatctgctgtgttgcaatgcgggtatctcaggacctaaggccgagccggagcacagcgacgctgaggacttgcgcaagcgtctttgggacaacgagagcgtcagcgaatggcaggagaactaccaaactaacgttactgccgtctactttacaactgtcgcattcttgccccttctacaagccgccatgcagcctaagggtccgctcgagaagttttctgcttctgtcatcactacttcgagtatgtcgggcatcatgcgccacgctcagggacacttcagctacaacactgcaaagggagctacagtacatctcacgaaactcatgtcggcagagttccagaaggctgggatacgtgtgaactcgatagcaccgggttacttccccagcgagatgacggcgaaggagagcgatgagcgccagaagagtcatgtccccgatgagaagatccaagataagggtcacgttccgcttatgcgtcccggtagggaggaagagattggcatgacggttctttatcttgcacgaaatcaatatgtcaatggcgagatcattgctgtagacggaggagtgctgaatgtgctagctggacggtaa

SEQ ID NO: 8224 - protein, 296 aa, Muscodor strobelii
  misc_feature: SGI Peptide ID NO. 562522
  misc_feature (18)..(212): Pfam Id: PF00106 Pfam Desc: short chain dehydrogenase
  misc_feature (18)..(124): Pfam Id: PF00106 Pfam Desc: short chain dehydrogenase
  misc_feature (1)..(296): NCBI GI: 169604322 Blast Desc: SNOG_05172 [Phaeosphaeria nodorum SN15] gi|111066443|gb|EAT87563.1| SNOG_05172 [Phaeosphaeria nodorum SN15]
  misc_feature (1)..(296): NCBI GI: 156043083 Blast Desc: SS1G_10544 [Sclerotinia sclerotiorum 1980] gi|154694932|gb|EDN94670.1| SS1G_10544 [Sclerotinia sclerotiorum 1980]
  misc_feature (1)..(296): NCBI GI: 85068392 Blast Desc: NCU08057 [Neurospora crassa OR74A] gi|28926993|gb|EAA35952.1| NCU08057 [Neurospora crassa OR74A]
  misc_feature (2)..(294): NCBI GI: 189196124 Blast Desc: short chain dehydrogenase/reductase [Pyrenophora tritici-repentis Pt-1C-BFP] gi|187980279|gb|EDU46905.1| short chain dehydrogenase/reductase [Pyrenophora tritici-repentis
  misc_feature (7)..(288): NCBI GI: 38636424 Blast Desc: related to NAD(P)H-dependent oxidoreductase [Neurospora crassa]
  misc_feature (2)..(288): NCBI GI: 145248007 Blast Desc: An13g01130 [Aspergillus niger] gi|134080999|emb|CAK41513.1| protein product [Aspergillus niger]
  misc_feature (7)..(295): NCBI GI: 85118720 Blast Desc: NCU01861 [Neurospora crassa OR74A] gi|28927302|gb|EAA36256.1| NCU01861 [Neurospora crassa OR74A]
  misc_feature (6)..(288): NCBI GI: 67540208 Blast Desc: AN6274.2 [Aspergillus nidulans FGSC A4] gi|40739468|gb|EAA58658.1| AN6274.2 [Aspergillus nidulans FGSC A4] gi|259479514|tpe|CBF69805.1| TPA: short chain family nidulans
  misc_feature (2)..(290): NCBI GI: 242795657 Blast Desc: short chain dehydrogenase/reductase family [Talaromyces stipitatus ATCC 10500] gi|218719225|gb|EED18645.1| short chain dehydrogenase/reductase family [Talaromyces ATCC
  misc_feature (2)..(288): NCBI GI: 169765560 Blast Desc: [Aspergillus oryzae RIB40] gi|83765106|dbj|BAE55249.1| protein product [Aspergillus oryzae]
  misc_feature (34)..(289): SWISSPROT Homolog: EC 1.1.1.100 3-oxoacyl-[acyl-carrier-protein] reductase
  misc_feature: Useful for introducing or modulating the production of volatile compounds
MAETHHFDAQKLFNVKGYVAVVTGGGTGIGLMTSQALAANGAKVYITGRREDALAKAAESHQPTSGEGAIIPVGPCDVTKKEDLDNLVAEIQKKESCIHLLCCNAGISGPKAEPEHSDAEDLRKRLWDNESVSEWQENYQTNVTAVYFTTVAFLPLLQAAMQPKGPLEKFSASVITTSSMSGIMRHAQGHFSYNTAKGATVHLTKLMSAEFQKAGIRVNSIAPGYFPSEMTAKESDERQKSHVPDEKIQDKGHVPLMRPGREEEIGMTVLYLARNQYVNGEIIAVDGGVLNVLAGR

SEQ ID NO: 8225 - DNA, 1284 bp, Muscodor strobelii
  misc_feature: SGI EST ID NO. CUFF.20092.0
  misc_feature: Variant of the nucleotide sequence at SEQ ID NO 8223
cctaatcatagccgtccgacatataatgttgatagttcacctccctctcggtttctacaggcggcaagctgttcttactcaatcacacccatcgtcgagcattgttacccacgaatagcaactcatctccaaattacacctgcattgcgcatctcaccataatggcagaaacacaccacttcgacgcacaaaagctgttcaatgtcaagggctacgtggctgtagtgacaggcggtggaacaggaatcggtctgatgacctcgcaagctctcgcagccaatggcgcaaaagtctacatcacggggcgacgagaggacgctcttgcaaaggcagcagaatcacatcaacctacatctggtgaaggcgcgatcatccccgttggtccatgcgacgtgacgaaaaaggaagatctcgacaatcttgttgcagagattcagaagaaggaatcatgcatacatctgctgtgttgcaatgcgggtatctcaggacctaaggccgagccggagcacagcgacgctgaggacttgcgcaagcgtctttgggacaacgagagcgtcagcgaatggcaggagaactaccaaactaacgttactgccgtctactttacaactgtcgcattcttgccccttctacaagccgccatgcagcctaagggtccgctcgagaagttttctgcttctgtcatcactacttcgagtatgtcgggcatcatgcgccacgctcagggacacttcagctacaacactgcaaagggagctacagtacatctcacgaaactcatgtcggcagagttccagaaggctgggatacgtgtgaactcgatagcaccgggttacttccccagcgagatgacggcgaaggagagcgatgagcgccagaagagtcatgtccccgatgagaagatccaagataagggtcacgttccgcttatgcgtcccggtagggaggaagagattggcatgacggttctttatcttgcacgaaatcaatatgtcaatggcgagatcattgctgtagacggaggagtgctgaatgtgctagctggacggtaatggagtttctagcaaagcgcagtttttgagtgacatagctcaacgccgcaggtttttcagctcagagaaattcaatacgggaagagaggcttcaatctgattcagttgcagagaactcgttgttgtcgagtttcaacctctagtataaattccggcccgccccagtcttagcttctatttcaagtaggtagacaggaaggtagagagaatggcagtatcagtcaaattctaa

SEQ ID NO: 8226 - DNA, 1113 bp, Muscodor strobelii
  misc_feature: SGI cDNA ID NO. 562523
  misc_feature: Reduced expression when VOC is produced
  misc_feature: Encodes the peptide sequence at SEQ ID NO 8227
atggcatctccacagaagatccgaacccctataaccgacctgttcggaatcaagcacccgatcctgttagctggcatgaacgttgccgctggtcccaagcttgccgccgccgttaccaatgctggcggcctgggcgttatcggaggcatgtcctacagccccgaaatgttgaaggaacagatcgacgagatgaagtcatatatgcacgacaagaatgcccccttcggcattgacctgcttttgccccaggttggcggcaacgcgcgcaagaccaactatgactacacaaagggtaagctggatcaacttatcgatatcatcattgagtccggcgccaagctcttcgtctctgctgtcggtgttccacccaaagctgttgtcgagaagcttcacaaggccggtatcctctacatgaacatggttggacaccccaagcacgttcagaaggccttggatattggctgtgatatcatctgtgctcagggtggagagggcggcggccataccggagacgtccctaccacagttctcatccctgcctgtgttcagatttgcaagggcaagaagagccctttgactggcaagcaggtagaagtcgttgccgctggcggtatccacaatggccagatgctggctgcttctctcatgatgggagctggtggtgtttgggtcggtacccgcttcatccttgttgaggaagccggagctcccgaatcacacaaagaggcagtccgaactgccagcttcgatgatacaatccgcactctgatctttactggaaggcctcttcgcgtacggaagaatgcttacattgagaactgggaagaagagcgacgcgtcgagttgaaggagctcacatcgaagggaatattaccctacgaggccgatttggagaaggttgccaacggcacctccgaaggcaaggagggctccggagatgctgagagcgaggaagatgtagacgacttgatggaccaattccgtccctacttgatgggcaagtgtgccgcgctcgttagcgaagagaaaagcgccaaggctgttgtcgacgaattcgtcaacgatgcttccgcggctttgaaggcaggctctcaaatgactgccaagttgtaa

SEQ ID NO: 8227 - protein, 370 aa, Muscodor strobelii
  misc_feature: SGI Peptide ID NO. 562523
  misc_feature (8)..(355): Pfam Id: PF03060 Pfam Desc: 2-nitropropane dioxygenase
  misc_feature (8)..(276): Pfam Id: PF03060 Pfam Desc: 2-nitropropane dioxygenase
  misc_feature (1)..(370): NCBI GI: 116194644 Blast Desc: conserved [Chaetomium globosum CBS 148.51] gi|88179833|gb|EAQ87301.1| conserved [Chaetomium globosum CBS 148.51]
  misc_feature (1)..(366): NCBI GI: 164429283 Blast Desc: NCU09931 [Neurospora crassa OR74A] gi|16945415|emb|CAB91335.2| conserved [Neurospora crassa] gi|157073012|gb|EAA28652.2| NCU09931 [Neurospora crassa OR74A]
  misc_feature (1)..(370): NCBI GI: 171683257 Blast Desc: protein product [Podospora anserina] gi|170941588|emb|CAP67242.1| protein product [Podospora anserina]
  misc_feature (1)..(370): NCBI GI: 46136391 Blast Desc: FG09711.1 [Gibberella zeae PH-1]
  misc_feature (1)..(370): NCBI GI: 256726925 Blast Desc: NECHADRAFT_66376 [Nectria haematococca mpVI 77-13-4]
  misc_feature (1)..(370): NCBI GI: 145613632 Blast Desc: conserved [Magnaporthe grisea 70-15] gi|145020686|gb|EDK04815.1| conserved [Magnaporthe grisea 70-15]
  misc_feature (1)..(370): NCBI GI: 59803158 Blast Desc: 2-nitropropane dioxygenase-like protein [Magnaporthe grisea]
  misc_feature (1)..(370): NCBI GI: 121715364 Blast Desc: oxidoreductase, 2-nitropropane dioxygenase family, [Aspergillus clavatus NRRL 1] gi|119403448|gb|EAW13865.1| oxidoreductase, 2-nitropropane dioxygenase family, [Aspergillus
  misc_feature (1)..(370): NCBI GI: 71001274 Blast Desc: oxidoreductase, 2-nitropropane dioxygenase family [Aspergillus fumigatus Af293] gi|66852956|gb|EAL93280.1| oxidoreductase, 2-nitropropane dioxygenase family, [Aspergillus
  misc_feature (1)..(370): NCBI GI: 115395916 Blast Desc: ATEG_04419 [Aspergillus terreus NIH2624] gi|114193166|gb|EAU34866.1| ATEG_04419 [Aspergillus terreus NIH2624]
  misc_feature (6)..(276): SWISSPROT Homolog: EC 1.13.11.32 2-nitropropane dioxygenase
  misc_feature: Useful for introducing or modulating the production of volatile compounds
MASPQKIRTPITDLFGIKHPILLAGMNVAAGPKLAAAVTNAGGLGVIGGMSYSPEMLKEQIDEMKSYMHDKNAPFGIDLLLPQVGGNARKTNYDYTKGKLDQLIDIIIESGAKLFVSAVGVPPKAVVEKLHKAGILYMNMVGHPKHVQKALDIGCDIICAQGGEGGGHTGDVPTTVLIPACVQICKGKKSPLTGKQVEVVAAGGIHNGQMLAASLMMGAGGVWVGTRFILVEEAGAPESHKEAVRTASFDDTIRTLIFTGRPLRVRKNAYIENWEEERRVELKELTSKGILPYEADLEKVANGTSEGKEGSGDAESEEDVDDLMDQFRPYLMGKCAALVSEEKSAKAVVDEFVNDASAALKAGSQMTAKL

SEQ ID NO: 8228 - DNA, 1563 bp, Muscodor strobelii
  misc_feature: SGI EST ID NO. CUFF.20096.0
  misc_feature: Variant of the nucleotide sequence at SEQ ID NO 8226
gtcctgcgacactagtagatgcctcggtatcatcgacgtactagatatttcaacttgcccgtcccatttcccatttgaacgctttcttgacttcttttgctacttccttgctcatctcaccgtcaagcctgccgaccgtatcggcctctattttctattcatctctatcatctactccaacctcacagtcggcttcgtcaagatggcatctccacagaagatccgaacccctataaccgacctgttcggaatcaagcacccgatcctgttagctggcatgaacgttgccgctggtcccaagcttgccgccgccgttaccaatgctggcggcctgggcgttatcggaggcatgtcctacagccccgaaatgttgaaggaacagatcgacgagatgaagtcatatatgcacgacaagaatgcccccttcggcattgacctgcttttgccccaggttggcggcaacgcgcgcaagaccaactatgactacacaaagggtaagctggatcaacttatcgatatcatcattgagtccggcgccaagctcttcgtctctgctgtcggtgttccacccaaagctgttgtcgagaagcttcacaaggccggtatcctctacatgaacatggttggacaccccaagcacgttcagaaggccttggatattggctgtgatatcatctgtgctcagggtggagagggcggcggccataccggagacgtccctaccacagttctcatccctgcctgtgttcagatttgcaagggcaagaagagccctttgactggcaagcaggtagaagtcgttgccgctggcggtatccacaatggccagatgctggctgcttctctcatgatgggagctggtggtgtttgggtcggtacccgcttcatccttgttgaggaagccggagctcccgaatcacacaaagaggcagtccgaactgccagcttcgatgatacaatccgcactctgatctttactggaaggcctcttcgcgtacggaagaatgcttacattgagaactgggaagaagagcgacgcgtcgagttgaaggagctcacatcgaagggaatattaccctacgaggccgatttggagaaggttgccaacggcacctccgaaggcaaggagggctccggagatgctgagagcgaggaagatgtagacgacttgatggaccaattccgtccctacttgatgggcaagtgtgccgcgctcgttagcgaagagaaaagcgccaaggctgttgtcgacgaattcgtcaacgatgcttccgcggctttgaaggcaggctctcaaatgactgccaagttgtaaagctgaagtatgcatcggtggactatagaaagaataatggtctcccgcgaagttaccagatacccacatggttggtttgtatatacataaccaatacccatttccgtcaaggttataagcgagaaatgcataacgattatgatgtgtaatatagacatcttgttcaatgctatgaaagctgggaatccacttgtgagtgatattgcatggaaacatgtgtactggatgcagccgatgctatgcaagca

SEQ ID NO: 8229 - DNA, 1524 bp, Muscodor strobelii
  misc_feature: SGI cDNA ID NO. 562524
  misc_feature: Encodes the peptide sequence at SEQ ID NO 8230
atggaccaatcgctgctagacgacctcaagacgcagccaagagctgcgcagttactagacaaggaaaatggaacgccagagtcgcccaagatccaagttgcttacattgccctaggcagcaatcttggggatcgcgtttccatgatcgagcaggcttgtcgcgaaatggatgcccgtggtatcaaagtcaagcggacaagcagcttgtgggagactgagcctatgtacgtccttgatcaagaccgcttcgtgaacggagcctgtgaggtagagacagagcttcagcccctggccctcctagatgctctgcaggacatcgaaaaatcgatgggtcgcaagaagattatagagaagggaccacgtaacatcgaccttgatattctcctgtatggggctgagccgcacgcgcaggccgtgtcgcatcccagactacaaatcccgcatcctttaattacagagcgggaatttgtgcttcggcccctcgcagagcttatacctcatcgcgcgctggataaatcacgtccttggaaactcatacaagatcatttgaatgagctatcgccttcggaacatgccgcagagcctttatcaactctgacgccattgggagcttccaggacgaaattacatgcgttaagatcatctcgcgccacgcaagtcatggctatcctgaatgtgacaccagactcattcagcgatggtggagtacacctccctcagaagaggaaggcggaaccagactcgcctccatcctcgtcacctaaatctgtagatcttgcaaccctgaaagagacaatcttaagcttcgttagagatggcgcaagcatcatagatgtaggtggtcagtcaactgcccccggagcgccagaagttagcacatcagaggaactttcgcgagtcttgcctgcaattcgcctcatccgtagcttgccagggacatcgcatatagcgattagtgttgatacataccgagcagctgtggccgaggccgcagtggaagccggcgccgatatcgtaaatgatgtctctgctggtctcatggacagcgagatgctgcccaccgttgcccgactcggatgcactatctgtctgatgcacatgcgtggcacgccagcaacaatgagtaaactaaacacatacccatcaggtctaatcccgaccttggcagaggaactcatcacacgcgtccaagccgccgaggccgacggtatcaggcgctggcgtatcattttggacccaggaatgggatttgctaaaataggggatcagaatcttgagatccttcgacacatgcctgaacttcgacgctggccaggtctagaggggctcccatggcttttggggtcaagtcgcaaaagctttgtgggtaagatcacaggtgttgcgaagcccgaggagcgcgtgtttggcactgcggccactgttgttgcggcggttcaaggtggtgctgacattgtacgtgttcatgatgtcttggctatgacgcaagtggtcaagatgtcagatgccatctatcggggttga

SEQ ID NO: 8230 - protein, 507 aa, Muscodor strobelii
  misc_feature: SGI Peptide ID NO. 562524
  misc_feature (35)..(165): Pfam Id: PF01288 Pfam Desc: 7,8-dihydro-6-hydroxymethylpterin-pyrophosphokinase (HPPK)
  misc_feature (223)..(459): Pfam Id: PF00809 Pfam Desc: Pterin binding enzyme
  misc_feature (29)..(506): NCBI GI: 46136389 Blast Desc: FG09710.1 [Gibberella zeae PH-1]
  misc_feature (29)..(506): NCBI GI: 226500384 Blast Desc: LOC100273066 [Zea mays] gi|194701700|gb|ACF84934.1| [Zea mays] gi|194702050|gb|ACF85109.1| [Zea mays]
  misc_feature (29)..(506): NCBI GI: 256727497 Blast Desc: [Nectria haematococca mpVI 77-13-4]
  misc_feature (26)..(506): NCBI GI: 261352442 Blast Desc: folic acid synthesis protein [Verticillium albo-atrum VaMs.102]
  misc_feature (26)..(506): NCBI GI: 164429281 Blast Desc: NCU09930 [Neurospora crassa OR74A] gi|16945416|emb|CAB91336.2| multifunctional folic acid synthesis protein [Neurospora crassa] gi|157073011|gb|EAA28651.2| NCU09930
  misc_feature (26)..(506): NCBI GI: 116194642 Blast Desc: CHGG_03919 [Chaetomium globosum CBS 148.51] gi|88179832|gb|EAQ87300.1| CHGG_03919 [Chaetomium globosum CBS 148.51]
  misc_feature (26)..(506): NCBI GI: 171683255 Blast Desc: protein product [Podospora anserina] gi|170941587|emb|CAP67241.1| protein product [Podospora anserina]
  misc_feature (34)..(506): NCBI GI: 238842083 Blast Desc: folic acid synthesis protein [Microsporum canis CBS 113480]
  misc_feature (28)..(506): NCBI GI: 255950196 Blast Desc: Pc22g19630 [Penicillium chrysogenum Wisconsin 54-1255] gi|211592882|emb|CAP99251.1| Pc22g19630 [Penicillium chrysogenum Wisconsin 54-1255]
  misc_feature (20)..(506): NCBI GI: 242795094 Blast Desc: folic acid synthesis protein [Talaromyces stipitatus ATCC 10500] gi|218719097|gb|EED18517.1| folic acid synthesis protein [Talaromyces stipitatus ATCC 10500]
  misc_feature (32)..(506): SWISSPROT Homolog: EC 4.1.2.25 Dihydroneopterin aldolase
  misc_feature (32)..(506): SWISSPROT Homolog: EC 2.7.6.3 2-amino-4-hydroxy-6-hydroxymethyldihydropteridine diphosphokinase
  misc_feature (32)..(506): SWISSPROT Homolog: EC 2.5.1.15 Dihydropteroate synthase
MDQSLLDDLKTQPRAAQLLDKENGTPESPKIQVAYIALGSNLGDRVSMIEQACREMDARGIKVKRTSSLWETEPMYVLDQDRFVNGACEVETELQPLALLDALQDIEKSMGRKKIIEKGPRNIDLDILLYGAEPHAQAVSHPRLQIPHPLITEREFVLRPLAELIPHRALDKSRPWKLIQDHLNELSPSEHAAEPLSTLTPLGASRTKLHALRSSRATQVMAILNVTPDSFSDGGVHLPQKRKAEPDSPPSSSPKSVDLATLKETILSFVRDGASIIDVGGQSTAPGAPEVSTSEELSRVLPAIRLIRSLPGTSHIAISVDTYRAAVAEAAVEAGADIVNDVSAGLMDSEMLPTVARLGCTICLMHMRGTPATMSKLNTYPSGLIPTLAEELITRVQAAEADGIRRWRIILDPGMGFAKIGDQNLEILRHMPELRRWPGLEGLPWLLGSSRKSFVGKITGVAKPEERVFGTAATVVAAVQGGADIVRVHDVLAMTQVVKMSDAIYRG

SEQ ID NO: 8231 - DNA, 2021 bp, Muscodor strobelii
  misc_feature: SGI EST ID NO. CUFF.20101.0
  misc_feature: Variant of the nucleotide sequence at SEQ ID NO 8229
ggaggtacagtcagcaaagatcagccataccgaccgcggacattccacaactgcaatcctaagcacatatgtagacagcttgatcacttggctcggatttgggagtttcaatgagtctgtcgcgttggcctcgacgagcatggagccttcacagccgccacgctcgaccagcgccatcgaccacctgcaccaccactgtagccctaagatgtaaaaaagtcttcacaaatacattgcaaaacccccccacgtcgccattggcgcaatttcgtacgtacggcagcttcaagcgatacacaatggaccaatcgctgctagacgacctcaagacgcagccaagagctgcgcagttactagacaaggaaaatggaacgccagagtcgcccaagatccaagttgcttacattgccctaggcagcaatcttggggatcgcgtttccatgatcgagcaggcttgtcgcgaaatggatgcccgtggtatcaaagtcaagcggacaagcagcttgtgggagactgagcctatgtacgtccttgatcaagaccgcttcgtgaacggagcctgtgaggtagagacagagcttcagcccctggccctcctagatgctctgcaggacatcgaaaaatcgatgggtcgcaagaagattatagagaagggaccacgtaacatcgaccttgatattctcctgtatggggctgagccgcacgcgcaggccgtgtcgcatcccagactacaaatcccgcatcctttaattacagagcgggaatttgtgcttcggcccctcgcagagcttatacctcatcgcgcgctggataaatcacgtccttggaaactcatacaagatcatttgaatgagctatcgccttcggaacatgccgcagagcctttatcaactctgacgccattgggagcttccaggacgaaattacatgcgttaagatcatctcgcgccacgcaagtcatggctatcctgaatgtgacaccagactcattcagcgatggtggagtacacctccctcagaagaggaaggcggaaccagactcgcctccatcctcgtcacctaaatctgtagatcttgcaaccctgaaagagacaatcttaagcttcgttagagatggcgcaagcatcatagatgtaggtggtcagtcaactgcccccggagcgccagaagttagcacatcagaggaactttcgcgagtcttgcctgcaattcgcctcatccgtagcttgccagggacatcgcatatagcgattagtgttgatacataccgagcagctgtggccgaggccgcagtggaagccggcgccgatatcgtaaatgatgtctctgctggtctcatggacagcgagatgctgcccaccgttgcccgactcggatgcactatctgtctgatgcacatgcgtggcacgccagcaacaatgagtaaactaaacacatacccatcaggtctaatcccgaccttggcagaggaactcatcacacgcgtccaagccgccgaggccgacggtatcaggcgctggcgtatcattttggacccaggaatgggatttgctaaaataggggatcagaatcttgagatccttcgacacatgcctgaacttcgacgctggccaggtctagaggggctcccatggcttttggggtcaagtcgcaaaagctttgtgggtaagatcacaggtgttgcgaagcccgaggagcgcgtgtttggcactgcggccactgttgttgcggcggttcaaggtggtgctgacattgtacgtgttcatgatgtcttggctatgacgcaagtggtcaagatgtcagatgccatctatcggggttgatcgaattatagctatggtgtccggtctctccatggagtcttcaaagcgtgtatatatacaacacgaagaacaagaattcatcttgtcttatgaagacctgctggacattctgtgctcttcactttacaacacttaaaagaggggcataggcatatagacgactatttagatacccaatgcaagcaacttcaacaacag

SEQ ID NO: 8232 - DNA, 1722 bp, Muscodor strobelii
  misc_feature: SGI cDNA ID NO. 562525
  misc_feature: Encodes the peptide sequence at SEQ ID NO 8233
atgtggccgcggctcaccttccagtcctcaatgctcgccacgttggccgtatttgctgcatacaaccaagagtcttccggtatcacatctctggctttggaaaatcctccacagcctccgtctgtgctaagcagtggttttcctgcgcctctgctcaacaataacacagggtactcccctgacgccggacacttctatcctccagcttcacagctttttcctgcagcagttgatcccaggtcacgtttgggctctagcacttccacgacggggatggctcatgcccctcgtactactgcgctaccacacccaggatacgctaccagagacgtttacgcggggtcgcgaccatctttcatgagaccggcggagcacacgatcaggtctccctcttttgcaactcctttacgacgtcatcctctatcgccaacgccaagtccaaacatcggatttaccagccccgtcagaatggaaggcgttcattcctacggaaaggcccaggcggcaactgttcctccgttgctaccagtaacatcacacggccagctgatgattggagacgtaggaaccccgggctcaggtacgatggtcaagcctgatatccacggtgttattgacaaaggatttttcctttcggagggagaatggacgtgttaccgtcgcaattacttctcttgcatatgctcgtatagcctgacgccgtactatccgaccgcaacgatgcattttgttcctacgggatctgccacctcctatcaggttacaggatttgcaatgacgatttctgcagtagtttccgatagcgactctcagactattgatttagtgcaacatacacccaaaagagacaagggaccgactgcaaaaccggaaaaggtcaggctcttacccaaaactcagcagtcggcaacacactccgcgctgggtatgtatcaagaccatcatggtatggcagggggcccaagagctatctacgagggcggatatagtcaaaccgggcaatcttcgtactcgacagagcacacattcgaacgcattcagttcaagcaggcaactgcaaacaacggcaagcgaagggcggcacaacaatactaccatttagtcgttgagctctatgccgatgttggcagtggcagccccgatcaatatatcaaagtggcagagcgaaaatcagccaagatgattgtgcgtggtcgatctccagggcattaccaatccgaacgtcgcggcagtacgagcagtggtccaggaggttcgagtggtatgggcagttacacaagctcccaggttctaggaactgagtatggggcggggccgtcttcgcttcttcctagcacatattccgggagctatgatgctcgatctgggcattatggcgcaagccgacatcacgatctgggaatggagtcgatcatgtctgccgaggaagcaaaggccattgacaatacgaaagactatcagtattacccgtccaccatctatgagggcatagagagcagacaggcgattgatatgtttcctcaccggcatgaaccggagagcatgctatcctcaacagcttccggggctgattcggcaatctcgaaagtcaaacacgaatacgacgctctcccgagtccgtatcagcctggtcctgcccactttcatagagcctgcagccgatttgagggcaaggcaacttccgctggatattaccctactccactttcgcagtcagggtga

SEQ ID NO: 8233 - protein, 573 aa, Muscodor strobelii
  misc_feature: SGI Peptide ID NO. 562525
  misc_feature (215)..(407): Pfam Id: PF05224 Pfam Desc: NDT80 / PhoG like DNA-binding family
  misc_feature (338)..(407): Pfam Id: PF05224 Pfam Desc: NDT80 / PhoG like DNA-binding family
  misc_feature (215)..(299): Pfam Id: PF05224 Pfam Desc: NDT80 / PhoG like DNA-binding family
  misc_feature (2)..(567): NCBI GI: 171683339 Blast Desc: protein product [Podospora anserina] gi|170941629|emb|CAP67283.1| protein product [Podospora anserina]
  misc_feature (92)..(569): NCBI GI: 164429275 Blast Desc: NCU09915 [Neurospora crassa OR74A] gi|16945421|emb|CAB91351.2| related to meiosis-specific protein NDT80 [Neurospora crassa] gi|157073009|gb|EAA28965.2| [Neurospora
  misc_feature (85)..(569): NCBI GI: 256726924 Blast Desc: NECHADRAFT_33281 [Nectria haematococca mpVI 77-13-4]
  misc_feature (38)..(570): NCBI GI: 46136387 Blast Desc: FG09709.1 [Gibberella zeae PH-1]
  misc_feature (60)..(570): NCBI GI: 145613626 Blast Desc: MGG_01475 [Magnaporthe grisea 70-15] gi|145020683|gb|EDK04812.1| MGG_01475 [Magnaporthe grisea 70-15]
  misc_feature (91)..(409): NCBI GI: 261352443 Blast Desc: conserved [Verticillium albo-atrum VaMs.102]
  misc_feature (85)..(569): NCBI GI: 116194632 Blast Desc: CHGG_03914 [Chaetomium globosum CBS 148.51] gi|88179827|gb|EAQ87295.1| CHGG_03914 [Chaetomium globosum CBS 148.51]
  misc_feature (172)..(456): NCBI GI: 238842080 Blast Desc: conserved [Microsporum canis CBS 113480]
  misc_feature (194)..(566): NCBI GI: 189210277 Blast Desc: conserved [Pyrenophora tritici-repentis Pt-1C-BFP] gi|187977563|gb|EDU44189.1| conserved [Pyrenophora tritici-repentis Pt-1C-BFP]
  misc_feature (171)..(462): NCBI GI: 212536156 Blast Desc: NDT80 / PhoG like DNA-binding family protein [Penicillium marneffei ATCC 18224] gi|210070633|gb|EEA24723.1| NDT80 / PhoG like DNA-binding family protein [Penicillium ATCC
MWPRLTFQSSMLATLAVFAAYNQESSGITSLALENPPQPPSVLSSGFPAPLLNNNTGYSPDAGHFYPPASQLFPAAVDPRSRLGSSTSTTGMAHAPRTTALPHPGYATRDVYAGSRPSFMRPAEHTIRSPSFATPLRRHPLSPTPSPNIGFTSPVRMEGVHSYGKAQAATVPPLLPVTSHGQLMIGDVGTPGSGTMVKPDIHGVIDKGFFLSEGEWTCYRRNYFSCICSYSLTPYYPTATMHFVPTGSATSYQVTGFAMTISAVVSDSDSQTIDLVQHTPKRDKGPTAKPEKVRLLPKTQQSATHSALGMYQDHHGMAGGPRAIYEGGYSQTGQSSYSTEHTFERIQFKQATANNGKRRAAQQYYHLVVELYADVGSGSPDQYIKVAERKSAKMIVRGRSPGHYQSERRGSTSSGPGGSSGMGSYTSSQVLGTEYGAGPSSLLPSTYSGSYDARSGHYGASRHHDLGMESIMSAEEAKAIDNTKDYQYYPSTIYEGIESRQAIDMFPHRHEPESMLSSTASGADSAISKVKHEYDALPSPYQPGPAHFHRACSRFEGKATSAGYYPTPLSQSG

SEQ ID NO: 8234 - DNA, 3621 bp, Muscodor strobelii
  misc_feature: SGI EST ID NO. CUFF.20175.0
  misc_feature: Variant of the nucleotide sequence at SEQ ID NO 8232
tattgcttgactacccatgactccctctcttaatcagactgtgtgcgctgtgccgcagtcgacactgtattggtcatgtaatttacactgcactgtctgcctcctgccggatcgttagtatccaccctgtctgcccatcgtcattgttgaggaaggcatccgccgaagcaaacactagagtgtcattctacctcgtcgctgattcatacctatgcttcaacgtccactcacttttccgacaccctctctccatgccttgtgaagcctgtcgagccctgaccctggctcgagtctgtctcattcactttgttcctttactagaatcaccatcattcattgcctccctcttgtctctgcacttagtgtagataccttctatcctttcatgcgcctcacatacttcatcaacacttccatgcctgcgaactctttgttgaattgacaccactgaccactaccatttccagctgctgctgtatgtttgattgtcgacacactctctgtcggctcttggccagcgatgtccatggcctggtgacgtccacaccatcgctcatattcgaaaaagcagaggaagtgtatactggggccgggggcaagcgacgaaagaacatcactcggatcatctaacatcaccgcctgaaagcaaccacaaattgtcttcgcgttgttttcacggtttcttactgcctgcatccatattcggtttcttttgctccccagtgaacatgaactgaccatatccgcccgtttctctagcaggactttgagccttcgccgcctacctgcaacgggctggaatacctggaaatcccggctatagctgatatgcgatacaaccaagagtcttccggtatcacatctctggctttggaaaatcctccacagcctccgtctgtgctaagcagtggttttcctgcgcctctgctcaacaataacacagggtactcccctgacgccggacacttctatcctccagcttcacagctttttcctgcagcagttgatcccaggtcacgtttgggctctagcacttccacgacggggatggctcatgcccctcgtactactgcgctaccacacccaggatacgctaccagagacgtttacgcggggtcgcgaccatctttcatgagaccggcggagcacacgatcaggtctccctcttttgcaactcctttacgacgtcatcctctatcgccaacgccaagtccaaacatcggatttaccagccccgtcagaatggaaggcgttcattcctacggaaaggcccaggcggcaactgttcctccgttgctaccagtaacatcacacggccagctgatgattggagacgtaggaaccccgggctcaggtacgatggtcaagcctgatatccacggtgttattgacaaaggatttttcctttcggagggagaatggacgtgttaccgtcgcaattacttctcttgcatatgctcgtatagcctgacgccgtactatccgaccgcaacgatgcattttgttcctacgggatctgccacctcctatcaggttacaggatttgcaatgacgatttctgcagtagtttccgatagcgactctcagactattgatttagtgcaacatacacccaaaagagacaagggaccgactgcaaaaccggaaaaggtcaggctcttacccaaaactcagcagtcggcaacacactccgcgctgggtatgtatcaagaccatcatggtatggcagggggcccaagagctatctacgagggcggatatagtcaaaccgggcaatcttcgtactcgacagagcacacattcgaacgcattcagttcaagcaggcaactgcaaacaacggcaagcgaagggcggcacaacaatactaccatttagtcgttgagctctatgccgatgttggcagtggcagccccgatcaatatatcaaagtggcagagcgaaaatcagccaagatgattgtgcgtggtcgatctccagggcattaccaatccgaacgtcgcggcagtacgagcagtggtccaggaggttcgagtggtatgggcagttacacaagctcccaggttctaggaactgagtatggggcggggccgtcttcgcttcttcctagcacatattccgggagctatgatgctcgatctgggcattatggcgcaagccgacatcacgatctgggaatggagtcgatcatgtctgccgaggaagcaaaggccattgacaatacgaaagactatcagtattacccgtccaccatctatgagggcatagagagcagacaggcgattgatatgtttcctcaccggcatgaaccggagagcatgctatcctcaacagcttccggggctgattcggcaatctcgaaagtcaaacacgaatacgacgctctcccgagtccgtatcagcctggtcctgcccactttcatagagcctgcagccgatttgagggcaaggcaacttccgctggatattaccctactccactttcgcagtcagggtgattattgcgtctctagatgtccatcaatctgtggtgcattaaagagctatatacaactctcacatggccacgagtgctacgtcgtattgcatcccagttagcattgcatgaaatgtgggtgtatcggaaaggaaaagcatatctggttttgattttaacgtcttcggacataagaccgaagtcggcatggaggcgtacggaatggaatcacaagaaatattaggtacggagttcaaatcttatggatggtctcgggacatgacaagcgagatttcggaggactggaggcatggtgtaatacgtacgattccatcaaggacgcacgaaggggcatacggcaatgggaccagggagtacggcagggatacccgcaacacacaatgttttaccacaggacttgaaatttcggagctgggagttgacggagagatatactggcttcccttgggcatttccccccagagaaagcgccacatgaggacgagcatcatggcaggcgttcgacaaagacgggtggactggaagaatcatagttttgattccggttttcctcttccatttatttccttcgttaaagcagaggacgcgggcggacgatggattaagatggcaagggggatatgactctcaaccaaaacctgacttccatgtcggatattctctctggcttgggcaatagggcggtttatttgtttgccaacctgcaaatgacagcaacggtagtatgtaagcgaatgtggtccaatcagtcgcctaccacgcagagaggtttaaacgtgctagcgttaacggtgatctcatcactgttgctaagcagaccgctctctgaggctcgtaaaggaggtggcagatagccatatcgctaggacgactccataccgttacaattgcaaccagaatagctttaacgacattcccactgaaaagcgatcttgtggtgaagcagggcctcaaacataaaaaccgaagccatatacagtctggcaggggtctcgactggagtgcgtttgcagccagcctcatctggatccacagcgggaactagagagacgctaggtattagagcatcgccagacaccctgcggatgcaggctcggcgggaaaagtacaagcatgtacttggccg

SEQ ID NO: 8235 - DNA, 792 bp, Muscodor strobelii
  misc_feature: SGI cDNA ID NO. 562526
  misc_feature: Encodes the peptide sequence at SEQ ID NO 8236
atgccccaccattcaccctctaccgttgaaccactcactgagcaagtggtggtacggtttgcgacactcaaggcctcagtcggccccgatggcctcccatccgccgtcatgaagctcatcattccttccaccaccacctacctcccgcagttgcgcccgctcctccttccccgatcctatgccacccagcacggctccaccagctccgccaacaccacccggagacgggctgtgacccctttcaacgacaccggttacgtgccctggcaccagctgtctgccgccgagaaagcctcgcgcaccacccagcagtccttcaacttcggtctcatcttagtcgggctcggcctgaccggcggcgtcgcctacgtcctctaccaggacgtcttctcgcccgacagcaagaccgcatatttcaaccgagctgtggatcgcatcaagaaggaccctgcttgtctggcagctttgggcgacgccaagaagatcaaggctcacggagaggcaacctcgaataaatgggctcgcgcagggcccattgcctccaccctgaagaaggatgcccaaggaaacgatcatttgaggttgcgcttctacgtcgaaggtccgctgagcaacggtaccgttcatgtctatctcgtcaaggccgccggccaggcagacttcgagtatagacacctgttcgtggacatcaaaggccatcagcgcatctatctcgaaaatgccgaggcacagagctccgccaccggctctaagggtttcaagttattcggggtaaattggggcaaaccgtga

SEQ ID NO: 8236 - protein, 263 aa, Muscodor strobelii
  misc_feature: SGI Peptide ID NO. 562526
  misc_feature (97)..(242): Pfam Id: PF08294 Pfam Desc: TIM21
  misc_feature (32)..(261): NCBI GI: 261352439 Blast Desc: import inner membrane translocase subunit tim-21, mitochondrial [Verticillium albo-atrum VaMs.102]
  misc_feature (50)..(261): NCBI GI: 256726926 Blast Desc: NECHADRAFT_103421 [Nectria haematococca mpVI 77-13-4]
  misc_feature (51)..(260): NCBI GI: 46136395 Blast Desc: FG09713.1 [Gibberella zeae PH-1] gi|83305919|sp|Q4HZ95.1|TIM21_GIBZE RecName: Full=Mitochondrial import inner membrane translocase subunit TIM21; Flags: Precursor
  misc_feature (58)..(260): NCBI GI: 85105583 Blast Desc: import inner membrane translocase subunit tim-21, mitochondrial [Neurospora crassa OR74A] gi|74616711|sp|Q7S8S5.1|TIM21_NEUCR RecName: Full=Mitochondrial
  misc_feature (60)..(260): NCBI GI: 154290145 Blast Desc: BC1G_15765 [Botryotinia fuckeliana B05.10] gi|150848426|gb|EDN23619.1| BC1G_15765 [Botryotinia fuckeliana B05.10]
  misc_feature (51)..(260): NCBI GI: 156030502 Blast Desc: SS1G_14475 [Sclerotinia sclerotiorum 1980] gi|154700866|gb|EDO00605.1| SS1G_14475 [Sclerotinia sclerotiorum 1980]
  misc_feature (34)..(260): NCBI GI: 145613634 Blast Desc: MGG_01471 [Magnaporthe grisea 70-15] gi|145020688|gb|EDK04817.1| MGG_01471 [Magnaporthe grisea 70-15]
  misc_feature (36)..(260): NCBI GI: 171683333 Blast Desc: protein product [Podospora anserina] gi|170941626|emb|CAP67280.1| protein product [Podospora anserina]
  misc_feature (52)..(260): NCBI GI: 238842085 Blast Desc: import inner membrane translocase subunit tim-21, mitochondrial [Microsporum canis CBS 113480]
  misc_feature (58)..(260): NCBI GI: 212536192 Blast Desc: conserved [Penicillium marneffei ATCC 18224] gi|210070651|gb|EEA24741.1| conserved [Penicillium marneffei ATCC 18224]
MPHHSPSTVEPLTEQVVVRFATLKASVGPDGLPSAVMKLIIPSTTTYLPQLRPLLLPRSYATQHGSTSSANTTRRRAVTPFNDTGYVPWHQLSAAEKASRTTQQSFNFGLILVGLGLTGGVAYVLYQDVFSPDSKTAYFNRAVDRIKKDPACLAALGDAKKIKAHGEATSNKWARAGPIASTLKKDAQGNDHLRLRFYVEGPLSNGTVHVYLVKAAGQADFEYRHLFVDIKGHQRIYLENAEAQSSATGSKGFKLFGVNWGKP

SEQ ID NO: 8237 - DNA, 1238 bp, Muscodor strobelii
  misc_feature: SGI EST ID NO. CUFF.20166.0
  misc_feature: Variant of the nucleotide sequence at SEQ ID NO 8235
ctaatacagtaaggtagcttgacttcgagatcatcgacctcgaaatctagagctcccatcgtcaatctcatcattcgacgtcccatctagaggctttgtcttcaagcattgagtcgcccaaatcaatcccacaagtggctaatagaggctagcggtttgcgacactcaaggcctcagtcggccccgatggcctcccatccgccgtcatgaagctcatcattccttccaccaccacctacctcccgcagttgcgcccgctcctccttccccgatcctatgccacccagcacggctccaccagctccgccaacaccacccggagacgggctgtgacccctttcaacgacaccggttacgtgccctggcaccagctgtctgccgccgagaaagcctcgcgcaccacccagcagtccttcaacttcggtctcatcttagtcgggctcggcctgaccggcggcgtcgcctacgtcctctaccaggacgtcttctcgcccgacagcaagaccgcatatttcaaccgagctgtggatcgcatcaagaaggaccctgcttgtctggcagctttgggcgacgccaagaagatcaaggctcacggagaggcaacctcgaataaatgggctcgcgcagggcccattgcctccaccctgaagaaggatgcccaaggaaacgatcatttgaggttgcgcttctacgtcgaaggtccgctgagcaacggtaccgttcatgtctatctcgtcaaggccgccggccaggcagacttcgagtatagacacctgttcgtggacatcaaaggccatcagcgcatctatctcgaaaatgccgaggcacagagctccgccaccggctctaagggtttcaagttattcggggtaaattggggcaaaccgtgagattatggacgaaagcgagtcttgtatattaacgtgtttacaacaaaattcttgcatggaacgaatagctctatttttggcactaatcggaagaactgatcttctgcgagcaagtatatggactaccacaggtgctggaggtgttaactgggatgttatatggcaacctgaacattagttatcacggaatggaaagctctcgcagaaagtcactggatgatagtctcgaagactctacgcatagtctagcaaaacccagttttgtggttatctatgtaaactatcccaaaattgctgatatggctattgctccctagcgaatcggtgaatgtccactggcaagtgttt

SEQ ID NO: 8238 - DNA, 1464 bp, Muscodor strobelii
  misc_feature: SGI cDNA ID NO. 562527
  misc_feature: Reduced expression when VOC is produced
  misc_feature: Encodes the peptide sequence at SEQ ID NO 8239
atgagtgcgagtgcgctggcgaccaagcagcagtctcagaagatcttcgagaagctgaagaccaacaaagccaacagaatatgcttcgactgcggccagaataaccccacctggacatcggtgcctctcggcatctacctctgcctcgactgctccgcaaaccaccgaaatctcggtgtgcacatctcctttgtgcgctccacaaacctcgatcagtggcaatgggaccagctgcgagtcatgaaggtcggcggcaacgagtctgccaccaagttcttccgcgccaatggcggcagctctgccctcgccagcaaggaccccaagactaaataccagtcccccgccgccaccaagtacaaagaagagcttaagaagcgcgctgctcgtgatgctatcgaatatcccgatgaggtcgtcatcaccgaagctaccggcgaaggcgtcgatggctcagccacgcctgctagcgagcctgccgatgatttcttctcttcgtgggataagcccaccatcaagaagcccagcccgcctatctcccggaccggcacgcctcccgttgttggccgaacagcatcgccctttctaaatgcgggcaaagacatctcgagatcctcatcgccgctcgcaaggtccgactcggcttctgaagccaagccagccgttgccaagaccaccacttctgccgctctccggaagaccaccactgccggacctcgcaaagctaacattctcggcgcgaagaagaccacgtccaagcttggtgccaagaaggtcacgagcgacttcattgatttcgacgaagcggagaagcgtgccaaggaagaggccgagcgcattgagaagcttggttacgaccccgaagccgaagcggccgaagccaaagcggcagccaccacatccaaagccgaggcatccaacgttgcagcaccgactcccgcaagctcaagtggctacggatccagccatacccgccaaaagtcagcggccgaggtggagcggctgggcatgggttttgggagactcggattcggccaggtcggagggagcaaggctgctgcggctccggccaagaagaacgccggcggattcggctctgtcggccctgtcaaagcggcccctgaagcggacgaagagcgatatgcgcgaaacaagtttggcacgcaaaagggcatctcatctgacgagttcttcggcaagggcgcattcgaccccaacgcgcaggccgaggccaagacgcgtctgcaagggtttgagggagccagcgcgatctcatccaatgcctactttggccgaaacgaagaagaggaggccggcgatgactacggtgatctggagtcggcggccaaggactttgtgcggaaattcggaatcactgcgggtgatgatctcgaccaactgacgaacgcgctgggcgagggtgctacccggctccagggagccattcgcaattacctcaacagctaa

SEQ ID NO: 8239 - protein, 487 aa, Muscodor strobelii
  misc_feature: SGI Peptide ID NO. 562527
  misc_feature (13)..(132): Pfam Id: PF01412 Pfam Desc: GTPase activating protein for Arf
  misc_feature (4)..(486): NCBI GI: 156030504 Blast Desc: SS1G_14476 [Sclerotinia sclerotiorum 1980] gi|154700867|gb|EDO00606.1| SS1G_14476 [Sclerotinia sclerotiorum 1980]
  misc_feature (4)..(486): NCBI GI: 154290143 Blast Desc: BC1G_15764 [Botryotinia fuckeliana B05.10] gi|150848425|gb|EDN23618.1| BC1G_15764 [Botryotinia fuckeliana B05.10]
  misc_feature (4)..(485): NCBI GI: 46136393 Blast Desc: FG09712.1 [Gibberella zeae PH-1]
  misc_feature (4)..(485): NCBI GI: 256727498 Blast Desc: NECHADRAFT_66377 [Nectria haematococca mpVI 77-13-4]
  misc_feature (4)..(487): NCBI GI: 39951659 Blast Desc: MGG_01472 [Magnaporthe grisea 70-15] gi|145020687|gb|EDK04816.1| MGG_01472 [Magnaporthe grisea 70-15]
  misc_feature (4)..(485): NCBI GI: 171683331 Blast Desc: protein product [Podospora anserina] gi|170941625|emb|CAP67279.1| protein product [Podospora anserina]
  misc_feature (4)..(487): NCBI GI: 261352440 Blast Desc: GTPase-activating protein ZNF289 [Verticillium albo-atrum VaMs.102]
  misc_feature (4)..(487): NCBI GI: 116194628 Blast Desc: CHGG_03912 [Chaetomium globosum CBS 148.51] gi|88179825|gb|EAQ87293.1| CHGG_03912 [Chaetomium globosum CBS 148.51]
  misc_feature (4)..(487): NCBI GI: 85105587 Blast Desc: NCU08811 [Neurospora crassa OR74A] gi|28923588|gb|EAA32762.1| NCU08811 [Neurospora crassa OR74A]
  misc_feature (7)..(487): NCBI GI: 115395920 Blast Desc: conserved [Aspergillus terreus NIH2624] gi|114193168|gb|EAU34868.1| conserved [Aspergillus terreus NIH2624]
  misc_feature: Useful for introducing or modulating the production of volatile compounds
MSASALATKQQSQKIFEKLKTNKANRICFDCGQNNPTWTSVPLGIYLCLDCSANHRNLGVHISFVRSTNLDQWQWDQLRVMKVGGNESATKFFRANGGSSALASKDPKTKYQSPAATKYKEELKKRAARDAIEYPDEVVITEATGEGVDGSATPASEPADDFFSSWDKPTIKKPSPPISRTGTPPVVGRTASPFLNAGKDISRSSSPLARSDSASEAKPAVAKTTTSAALRKTTTAGPRKANILGAKKTTSKLGAKKVTSDFIDFDEAEKRAKEEAERIEKLGYDPEAEAAEAKAAATTSKAEASNVAAPTPASSSGYGSSHTRQKSAAEVERLGMGFGRLGFGQVGGSKAAAAPAKKNAGGFGSVGPVKAAPEADEERYARNKFGTQKGISSDEFFGKGAFDPNAQAEAKTRLQGFEGASAISSNAYFGRNEEEEAGDDYGDLESAAKDFVRKFGITAGDDLDQLTNALGEGATRLQGAIRNYLNS

SEQ ID NO: 8240 - DNA, 2088 bp, Muscodor strobelii
  misc_feature: SGI EST ID NO. CUFF.20254.3
  misc_feature: Variant of the nucleotide sequence at SEQ ID NO 8238
gggcgggctcttggcattatcctggaagtggcatcttgattcgcgagtggacaatctggcccaactcctgaactagagaataattcaactgcggactctcctgtctcgacgctctcgtttggcactccctaacttccgcctccgccgcccttcaccaacaccatcatcgaccaccgacttcagccccctgtgtcgcttctcctattccaaaatgagtgcgagtgcgctggcgaccaagcagcagtctcagaagatcttcgagaagctgaagaccaacaaagccaacagaatatgcttcgactgcggccagaataaccccacctggacatcggtgcctctcggcatctacctctgcctcgactgctccgcaaaccaccgaaatctcggtgtgcacatctcctttgtgcgctccacaaacctcgatcagtggcaatgggaccagctgcgagtcatgaaggtcggcggcaacgagtctgccaccaagttcttccgcgccaatggcggcagctctgccctcgccagcaaggaccccaagactaaataccagtcccccgccgccaccaagtacaaagaagagcttaagaagcgcgctgctcgtgatgctatcgaatatcccgatgaggtcgtcatcaccgaagctaccggcgaaggcgtcgatggctcagccacgcctgctagcgagcctgccgatgatttcttctcttcgtgggataagcccaccatcaagaagcccagcccgcctatctcccggaccggcacgcctcccgttgttggccgaacagcatcgccctttctaaatgcgggcaaagacatctcgagatcctcatcgccgctcgcaaggtccgactcggcttctgaagccaagccagccgttgccaagaccaccacttctgccgctctccggaagaccaccactgccggacctcgcaaagctaacattctcggcgcgaagaagaccacgtccaagcttggtgccaagaaggtcacgagcgacttcattgatttcgacgaagcggagaagcgtgccaaggaagaggccgagcgcattgagaagcttggttacgaccccgaagccgaagcggccgaagccaaagcggcagccaccacatccaaagccgaggcatccaacgttgcagcaccgactcccgcaagctcaagtggctacggatccagccatacccgccaaaagtcagcggccgaggtggagcggctgggcatgggttttgggagactcggattcggccaggtcggagggagcaaggctgctgcggctccggccaagaagaacgccggcggattcggctctgtcggccctgtcaaagcggcccctgaagcggacgaagagcgatatgcgcgaaacaagtttggcacgcaaaagggcatctcatctgacgagttcttcggcaagggcgcattcgaccccaacgcgcaggccgaggccaagacgcgtctgcaagggtttgagggagccagcgcgatctcatccaatgcctactttggccgaaacgaagaagaggaggccggcgatgactacggtgatctggagtcggcggccaaggactttgtgcggaaattcggaatcactgcgggtgatgatctcgaccaactgacgaacgcgctgggcgagggtgctacccggctccagggagccattcgcaattacctcaacagctaaaaatcgcattgcacggaatctacggagtcgctatgcgagctggcaactgacattactacccacgtaagtaaaatacatgtagacatgggaaaaggaccgcgttggcgtatatggagacatgatgaggagagcatgtctacagaaagcaagcgagcgagacgggatggcgagcatgaaatagcgctagatctccgtacgggacacacgaaatacacgaaacacacgaaaacctgatgcgcttctagacactggatcccggattggtcaaggacaaaagggcggtgcggtttgcacggcaatggcgacggcaactaatgcgcgtcatctacctttatgttcgtctggttaaaaacttagtaatagtgggcgaagtgacagcatggaatataattcgatcttcatgtacaagttca

SEQ ID NO: 8241 - DNA, 1293 bp, Muscodor strobelii
  misc_feature: SGI cDNA ID NO. 562528
  misc_feature: Reduced expression when VOC is produced
  misc_feature: Encodes the peptide sequence at SEQ ID NO 8242
atggagttcgtcacagccctccggggcaacttcgacgatcagaagccgtcactcttcgagcttctctctgaacagcagctgaatgctctgctgccgccgacgctgcgttatcttctgaccgttgccacccagcgccatccgcgttacctcctccgcgccctgaactccttcgacgagctctacgctctggccatgatcgtcatcgagcgtcactacctgcgcacgcgcggcgggagcttcaccgagcacttctatggcttgaaacgagagatgggcctgcatgccgagatccctcgtgcggcggctactgcgccggcgctcgtgcgggagacgctcaagctgcgcgagaaggacgtgtggaagaacctggccgtgatggtcgccatcccatttttcaagcgcaagctcgacgagtcgcacgagatcgaggcaccacgagctctgctcggcaccaactacacccgcatgcccgcaaacccgactattcggcagaggatcgtgcactactacaaatggttcatccggaacatatatccaagcgtacacgcagcttattatttcagcatcatcgcattcaatcttgcctatcttttcgacaacaccaaataccacaatccgttcctgtggctgataggcaccaggatacgccgcatgaatgccgctgatttccaagccatcgacgccttgagccaaccgaaacccggccacccgcctgcgcctacgagcctgttcaatcccaggaccttggggcctaaactactcggcagtctgtccctcttgcttccgacgagcatctttgcgctcaagttcctggagtggtggtatgcgtccgattttgcaaaacaactatctcgaaaggcagccgaaaatctcgagctcccaccccccatcgtatccggattagcggcgttgggcctcaaaatgcaacagaaggaaaaaacaaatggcaccactcagagccaggagagatctgagaacgccaagaaggcaacccttgctgaagatgcgccggttgcgactccttcgctcttacctatattcacggtgccgccagcacacgactcggagctgtgccctatttgcgaaggcgagatcacaacggccacagcttgccagacaggttttgtatactgctacacatgcattcatagatgggtagaagggatgcatccccgacaggaggaattcatggctgacaaggccaaccaatgggaaagtggttacggtcgctgtgctgtcacggggcgacgtatcctaggtggtacggagggtctaagaagaatcatgatttga

SEQ ID NO: 8242 - protein, 430 aa, Muscodor strobelii
  misc_feature: SGI Peptide ID NO. 562528
  misc_feature (20)..(278): Pfam Id: PF04757 Pfam Desc: Pex2 / Pex12 amino terminal region
  misc_feature (20)..(88): Pfam Id: PF04757 Pfam Desc: Pex2 / Pex12 amino terminal region
  misc_feature (1)..(430): NCBI GI: 256726953 Blast Desc: NECHADRAFT_58214 [Nectria haematococca mpVI 77-13-4]
  misc_feature (1)..(430): NCBI GI: 46136481 Blast Desc: FG09756.1 [Gibberella zeae PH-1]
  misc_feature (1)..(430): NCBI GI: 261355880 Blast Desc: peroxisome assembly protein [Verticillium albo-atrum VaMs.102]
  misc_feature (1)..(430): NCBI GI: 85105638 Blast Desc: NCU05245 [Neurospora crassa OR74A] gi|28923600|gb|EAA32773.1| conserved [Neurospora crassa OR74A]
  misc_feature (1)..(430): NCBI GI: 39952257 Blast Desc: MGG_01771 [Magnaporthe grisea 70-15] gi|145020375|gb|EDK04504.1| MGG_01771 [Magnaporthe grisea 70-15]
  misc_feature (1)..(430): NCBI GI: 116196536 Blast Desc: CHGG_04866 [Chaetomium globosum CBS 148.51] gi|88180779|gb|EAQ88247.1| CHGG_04866 [Chaetomium globosum CBS 148.51]
  misc_feature (1)..(430): NCBI GI: 121716920 Blast Desc: peroxisome biosynthesis protein (PAS10/Peroxin-12), [Aspergillus clavatus NRRL 1] gi|119404108|gb|EAW14525.1| peroxisome biosynthesis protein (PAS10/Peroxin-12), [Aspergillus
  misc_feature (1)..(430): NCBI GI: 225555938 Blast Desc: peroxin 12 [Ajellomyces capsulatus G186AR]
  misc_feature (1)..(430): NCBI GI: 240107027 Blast Desc: Pex2 / Pex12 amino terminal region containing protein [Coccidioides posadasii C735 delta SOWgp]
  misc_feature (1)..(430): NCBI GI: 71002658 Blast Desc: peroxisome biosynthesis protein (PAS10/Peroxin-12) [Aspergillus fumigatus Af293] gi|66853648|gb|EAL93972.1| peroxisome biosynthesis protein (PAS10/Peroxin-12), [Aspergillus
  misc_feature: Useful for introducing or modulating the production of volatile compounds
MEFVTALRGNFDDQKPSLFELLSEQQLNALLPPTLRYLLTVATQRHPRYLLRALNSFDELYALAMIVIERHYLRTRGGSFTEHFYGLKREMGLHAEIPRAAATAPALVRETLKLREKDVWKNLAVMVAIPFFKRKLDESHEIEAPRALLGTNYTRMPANPTIRQRIVHYYKWFIRNIYPSVHAAYYFSIIAFNLAYLFDNTKYHNPFLWLIGTRIRRMNAADFQAIDALSQPKPGHPPAPTSLFNPRTLGPKLLGSLSLLLPTSIFALKFLEWWYASDFAKQLSRKAAENLELPPPIVSGLAALGLKMQQKEKTNGTTQSQERSENAKKATLAEDAPVATPSLLPIFTVPPAHDSELCPICEGEITTATACQTGFVYCYTCIHRWVEGMHPRQEEFMADKANQWESGYGRCAVTGRRILGGTEGLRRIMI

SEQ ID NO: 8243 - DNA, 2492 bp, Muscodor strobelii
  misc_feature: SGI EST ID NO. CUFF.20171.0
  misc_feature: Variant of the nucleotide sequence at SEQ ID NO 8241
cgacgcgcaacggcagcttttccagtttttaaactttgtgcttgagcatttgaagcaggatatccttcgaggttgcgtcagctacgaacttgcgcgatctatgcccatgtaggcttcacgacatagcaggcagagcggttagaacttggaggagctgtcaagatggagttcgtcacagccctccggggcaacttcgacgatcagaagccgtcactcttcgagcttctctctgaacagcagctgaatgctctgctgccgccgacgctgcgttatcttctgaccgttgccacccagcgccatccgcgttacctcctccgcgccctgaactccttcgacgagctctacgctctggccatgatcgtcatcgagcgtcactacctgcgcacgcgcggcgggagcttcaccgagcacttctatggcttgaaacgagagatgggcctgcatgccgagatccctcgtgcggcggctactgcgccggcgctcgtgcgggagacgctcaagctgcgcgagaaggacgtgtggaagaacctggccgtgatggtcgccatcccatttttcaagcgcaagctcgacgagtcgcacgagatcgaggcaccacgagctctgctcggcaccaactacacccgcatgcccgcaaacccgactattcggcagaggatcgtgcactactacaaatggttcatccggaacatatatccaagcgtacacgcagcttattatttcagcatcatcgcattcaatcttgcctatcttttcgacaacaccaaataccacaatccgttcctgtggctgataggcaccaggatacgccgcatgaatgccgctgatttccaagccatcgacgccttgagccaaccgaaacccggccacccgcctgcgcctacgagcctgttcaatcccaggaccttggggcctaaactactcggcagtctgtccctcttgcttccgacgagcatctttgcgctcaagttcctggagtggtggtatgcgtccgattttgcaaaacaactatctcgaaaggcagccgaaaatctcgagctcccaccccccatcgtatccggattagcggcgttgggcctcaaaatgcaacagaaggaaaaaacaaatggcaccactcagagccaggagagatctgagaacgccaagaaggcaacccttgctgaagatgcgccggttgcgactccttcgctcttacctatattcacggtgccgccagcacacgactcggagctgtgccctatttgcgaaggcgagatcacaacggccacagcttgccagacaggttttgtatactgctacacatgcattcatagatgggtagaagggatgcatccccgacaggaggaattcatggctgacaaggccaaccaatgggaaagtggttacggtcgctgtgctgtcacggggcgacgtatcctaggtggtacggagggtctaagaagaatcatgatttgatcaggtcgtatgagcatgcccactcagcgtcgcagcacatcggtcttgatatgctaagctatcgtggaagcgctcgtactgggcgatacgatctgggacttactaatgaggtggccgcggtgcctatttcgttacgtgggccaaacatggacctcagggatccgactttgtcaggactatgtcttcgactggcccagaaggttcggccttgattaattagaacaaggccctgcggcatctagatggaccgcgtccgaaatacagaagctggcgccacggtccagatcagacaataatgagcttaaatctgcccagctgcgtccaaattccagctagccaggacatcacgcaacagcgagaccgccggcgaatgaactgcgatctgttccctcttttccgtaatgcagggtccacgacactactgcattacaattaacagatatttattgaggctgacatctggactgccctacacttccgactctggggatgaggccaccgagttggtttagttgggtcaaattatccggcacaagcgcaggcaagaaaagaccagaagctttcgcttgctatttttgtcgtaattttccagtgctcgctcgttacaggcatgggcatttcgttttcccgggtctagtcgtgggagctgggctagaaccctactttagccatattaaccattacgtcgtttgctattgaaaagggacctcgaacatgttttgtagtggcgaatgcggaacgtcattacgtccggccaaatgattttcgaatctgtctttggttcgctggacgagcaatgtccgattagaaattgggaaagacagaaacaatggtacgagccaaactgacagccaggcatcgtgtaatggtgtgattgagcagtcccgaccagcaacgctgcgagatgaaggtcgcaacgagagtatttgaccacgatagtattccgtctataaagacagggccatcctcttacgacgaagatgagcgaaatgtctatgtcatccaaatagcagaaacaacatactcatcaatatctt

SEQ ID NO: 8244 - DNA, 372 bp, Muscodor strobelii
  misc_feature: SGI cDNA ID NO. 562529
  misc_feature: Encodes the peptide sequence at SEQ ID NO 8245
atgcaacagaaggaaaaaacaaatggcaccactcagagccaggagagatctgagaacgccaagaaggcaacccttgctgaagatgcgccggttgcgactccttcgctcttacctatattcacggtgccgccagcacacgactcggagctgtgccctatttgcgaaggcgagatcacaacggccacagcttgccagacaggttttgtatactgctacacatgcattcatagatgggtagaagggatgcatccccgacaggaggaattcatggctgacaaggccaaccaatgggaaagtggttacggtcgctgtgctgtcacggggcgacgtatcctaggtggtacggagggtctaagaagaatcatgatttga

SEQ ID NO: 8245 - protein, 123 aa, Muscodor strobelii
  misc_feature: SGI Peptide ID NO. 562529
  misc_feature (24)..(123): NCBI GI: 261355880 Blast Desc: peroxisome assembly protein [Verticillium albo-atrum VaMs.102]
  misc_feature (26)..(123): NCBI GI: 46136481 Blast Desc: FG09756.1 [Gibberella zeae PH-1]
  misc_feature (12)..(123): NCBI GI: 39952257 Blast Desc: MGG_01771 [Magnaporthe grisea 70-15] gi|145020375|gb|EDK04504.1| MGG_01771 [Magnaporthe grisea 70-15]
  misc_feature (12)..(123): NCBI GI: 256726953 Blast Desc: NECHADRAFT_58214 [Nectria haematococca mpVI 77-13-4]
  misc_feature (27)..(123): NCBI GI: 116196536 Blast Desc: CHGG_04866 [Chaetomium globosum CBS 148.51] gi|88180779|gb|EAQ88247.1| CHGG_04866 [Chaetomium globosum CBS 148.51]
  misc_feature (27)..(123): NCBI GI: 85105638 Blast Desc: NCU05245 [Neurospora crassa OR74A] gi|28923600|gb|EAA32773.1| conserved [Neurospora crassa OR74A]
  misc_feature (36)..(123): NCBI GI: 171688448 Blast Desc: protein product [Podospora anserina] gi|170944186|emb|CAP70296.1| protein product [Podospora anserina]
  misc_feature (4)..(123): NCBI GI: 169611676 Blast Desc: SNOG_08951 [Phaeosphaeria nodorum SN15] gi|111062999|gb|EAT84119.1| SNOG_08951 [Phaeosphaeria nodorum SN15]
  misc_feature (28)..(123): NCBI GI: 189212178 Blast Desc: peroxisome assembly protein 12 [Pyrenophora tritici-repentis Pt-1C-BFP] gi|187979613|gb|EDU46239.1| peroxisome assembly protein 12 [Pyrenophora tritici-repentis
  misc_feature (4)..(123): NCBI GI: 259483342 Blast Desc: TPA: microbody (peroxisome) biogenesis protein peroxin 12 (Eurofung) [Aspergillus nidulans FGSC A4]
MQQKEKTNGTTQSQERSENAKKATLAEDAPVATPSLLPIFTVPPAHDSELCPICEGEITTATACQTGFVYCYTCIHRWVEGMHPRQEEFMADKANQWESGYGRCAVTGRRILGGTEGLRRIMI

SEQ ID NO: 8246 - DNA, 2492 bp, Muscodor strobelii; identical to SEQ ID NO: 8243
  misc_feature: SGI EST ID NO. CUFF.20171.0
  misc_feature: Variant of the nucleotide sequence at SEQ ID NO 8244

SEQ ID NO: 8247 - DNA, 648 bp, Muscodor strobelii
  misc_feature: SGI cDNA ID NO. 562530
  misc_feature: Encodes the peptide sequence at SEQ ID NO 8248
atgcatctaaaatccaaccccctactcatcatcctccccaccacatcccttgtagcagcccgctcgatacccgccatcgtggcacgggatgcaccagccagccttccacacatcacatccatctcatactctgggacaggctgcccgtcgtcctcccccggtgtagtccgcatggggacggcattcagcgacagcaccttccgactcaacagtttcgaggcctcgctgccaagcatcgagacctcgtcggcaaactgccaggtccacatccagtccgccggctgcacgtcaggttggcaggttggcgtcaagggcgttacggtgaagggccaccttgtgcttgaccccggcgctagcttagactggtatctcactagcttctggagctcggcggccgctgatactggcacgatctcgggcacagttcctaatactggcgcggcgcgcctcaccgcagatatcaacgtccacgccacgacggccgatgtggcttggtcgccttgcacgggtgccgatggcgtgcttgatattctgaatgtcaactttcgcgtcgcgcttgatgcgcccggtaatcagtatgggtactttggcaaggatgctgataccgcgaccgctgagagttgggagtatgtctggagacgatgctga

SEQ ID NO: 8248 - protein, 215 aa, Muscodor strobelii
  misc_feature: SGI Peptide ID NO. 562530
  misc_feature (30)..(215): NCBI GI: 85111891 Blast Desc: NCU00757 [Neurospora crassa OR74A] gi|28925923|gb|EAA34918.1| [Neurospora crassa OR74A]
  misc_feature (35)..(215): NCBI GI: 171695792 Blast Desc: protein product [Podospora anserina] gi|170948138|emb|CAP60302.1| protein product [Podospora anserina]
  misc_feature (36)..(215): NCBI GI: 116181114 Blast Desc: CHGG_01185 [Chaetomium globosum CBS 148.51] gi|88185482|gb|EAQ92950.1| CHGG_01185 [Chaetomium globosum CBS 148.51]
  misc_feature (3)..(215): NCBI GI: 169621257 Blast Desc: SNOG_13837 [Phaeosphaeria nodorum SN15] gi|111057741|gb|EAT78861.1| SNOG_13837 [Phaeosphaeria nodorum SN15]
  misc_feature (30)..(215): NCBI GI: 39972983 Blast Desc: MGG_07786 [Magnaporthe grisea 70-15] gi|145012561|gb|EDJ97215.1| MGG_07786 [Magnaporthe grisea 70-15]
  misc_feature (10)..(215): NCBI GI: 39941306 Blast Desc: [Magnaporthe grisea 70-15] gi|145022233|gb|EDK06253.1| [Magnaporthe grisea 70-15]
  misc_feature (81)..(215): NCBI GI: 189206612 Blast Desc: conserved [Pyrenophora tritici-repentis Pt-1C-BFP] gi|187975733|gb|EDU42359.1| conserved [Pyrenophora tritici-repentis Pt-1C-BFP]
  misc_feature (37)..(215): NCBI GI: 261355448 Blast Desc: [Verticillium albo-atrum VaMs.102]
  misc_feature (24)..(215): NCBI GI: 223469446 Blast Desc: candidate effector 16 [Venturia inaequalis]
  misc_feature (3)..(215): NCBI GI: 189191862 Blast Desc: PTRG_01937 [Pyrenophora tritici-repentis Pt-1C-BFP] gi|187973876|gb|EDU41375.1| PTRG_01937 [Pyrenophora tritici-repentis Pt-1C-BFP]
MHLKSNPLLIILPTTSLVAARSIPAIVARDAPASLPHITSISYSGTGCPSSSPGVVRMGTAFSDSTFRLNSFEASLPSIETSSANCQVHIQSAGCTSGWQVGVKGVTVKGHLVLDPGASLDWYLTSFWSSAAADTGTISGTVPNTGAARLTADINVHATTADVAWSPCTGADGVLDILNVNFRVALDAPGNQYGYFGKDADTATAESWEYVWRRC

SEQ ID NO: 8249 - DNA, 2607 bp, Muscodor strobelii
  misc_feature: SGI EST ID NO. CUFF.20195.0
  misc_feature: Variant of the nucleotide sequence at SEQ ID NO 8247
ctctcatatatctgacaatcaaaacaattctgccgaccgactcacgttgatcctttctatcaacatgcatctaaaatccaaccccctactcatcatcctccccaccacatcccttgtagcagcccgctcgatacccgccatcgtggcacgggatgcaccagccagccttccacacatcacatccatctcatactctgggacaggctgcccgtcgtcctcccccggtgtagtccgcatggggacggcattcagcgacagcaccttccgactcaacagtttcgaggcctcgctgccaagcatcgagacctcgtcggcaaactgccaggtccacatccagtccgccggctgcacgtcaggttggcaggttggcgtcaagggcgttacggtgaagggccaccttgtgcttgaccccggcgctagcttagactggtatctcactagcttctggagctcggcggccgctgatactggcacgatctcgggcacagttcctaatactggcgcggcgcgcctcaccgcagatatcaacgtccacgccacgacggccgatgtggcttggtcgccttgcacgggtgccgatggcgtgcttgatattctgaatgtcaactttcgcgtcgcgcttgatgcgcccggtaatcagtatgggtactttggcaaggatgctgataccgcgaccgctgagagttgggagtatgtctggagacgatgctgatttgatgatgttgtaagagcgatgtagattattggagttgttaggtcggagatgagatggtgaaagaggtgcggagataccctcgagatttgcgatgtgcttttaggctccagggtcgaggaccagagtcatgatttctcttctcctattattctgtctatactagcccgttcttcatcattgagttcaccatagtttcaatgctgtaccgaagaaaaatagagagtgtttggaaacttcgtcttttgttacatgaacgcatgtcttttcgcaatccctcttgactaataatgtacagaaaccaagacaccatggtgaagctacatcgagtggcagcagcttgcagcggcaattagttcttctctatctcttctacaatttattaaacgccatctagttctcttcagatctcgagtgtgaaaggagccttgtttgtcaatttgcccgaggtgcccgcttgcatagcagcattgactagaacacttccattgctcgcaccaccgagccacagtctctgccaaatgataccctttaggccgtagcgaaacactcgcagaacatctaaccagccgcgattgggaaagaagtcaaggatgaggccccgcttcttgcgagacatggccgtctcgtaggctctctggcagtcatcccagtatgcagcttggataccacgaccccagtgaacatggccaaagacgtggactttgggttttgctttccagatctctgccaacagtcctgggcatccaatggaaaggtcccggtggtgcatctaggagcttcgttagcagatttggcaattcaggttattgagataactgaccgggggaccatgtgtaatgagtatctctgtgtcttgaggaactgtcccctcccatggatgttggtcaatcgtatattgaaacctgcgttctccttcatcagtacataaccaacatggtatcgaggtatggcatacgcgttatcagcacctccgcactgcggaatgtcaggcgcaccatagatattgagttttcgaccgcccttaaacgtcaaagagatcgatttacgctcgagataatgaaccgtcttgaggtccacggagcgatgtcctagcgcatcttcttccttgcgggagttgatgtcgaaccagctatcatgattcccagcgacgacaactttatgcctgtgaggcagtgaagtgagccagtcgatttgtttctgtatcgagccagcggtaccatcattggtcatgtcaccgcagtggatgagaaggtcgccatcgggcacatttggcacgatggactcgtgcgtatctgacaagaagacgattttgatgggtggtctgttcctaggtggctttacaggattgccgcgaagccagatgatgatcgcgtagagatagtagatgatgccttgaatgggcgattcgaaaagccagtcgattggcgtgcgtggttcccatctaatctgacgacgaagccctaggcttgtgagtagccccatgctcgatgacgtcgcactacgccctgtctcaactccaatggacggtgtcaatcagggtcaaatagaggttgatatgcaagtggcagagaggcgaagaatacaagcttgagagcatttagtaaactcgatgagatctgtacctggcttgagctggacgatggattttcactgggatgtaaatcaatattgcttttatccccttgtcattgcttccttcatagagattgctgcctttatgacttttgcgataaccccactataacttgacccctgttagagatcgcccagccgctattcctgtgacttgtgatatactacagattcggcagctttcagatggcttataaggtgtcacgttttctttgtccatgactgtagcatgttgattcacagtctttgtcttgaggaac

SEQ ID NO: 8250 - DNA, 978 bp, Muscodor strobelii
  misc_feature: SGI cDNA ID NO. 562531
  misc_feature: Reduced expression when VOC is produced
  misc_feature: Encodes the peptide sequence at SEQ ID NO 8251
atggggctactcacaagcctagggcttcgtcgtcagattagatgggaaccacgcacgccaatcgactggcttttcgaatcgcccattcaaggcatcatctactatctctacgcgatcatcatctggcttcgcggcaatcctgtaaagccacctaggaacagaccacccatcaaaatcgtcttcttgtcagatacgcacgagtccatcgtgccaaatgtgcccgatggcgaccttctcatccactgcggtgacatgaccaatgatggtaccgctggctcgatacagaaacaaatcgactggctcacttcactgcctcacaggcataaagttgtcgtcgctgggaatcatgatagctggttcgacatcaactcccgcaaggaagaagatgcgctaggacatcgctccgtggacctcaagacggttcattatctcgagcgtaaatcgatctctttgacgtttaagggcggtcgaaaactcaatatctatggtgcgcctgacattccgcagtgcggaggtgctgataacgcgtttcaatatacgattgaccaacatccatgggaggggacagttcctcaagacacagagatactcattacacatggtcccccgatgcaccaccgggacctttccattggatgcccaggactgttggcagagatctggaaagcaaaacccaaagtccacgtctttggccatgttcactggggtcgtggtatccaagctgcatactgggatgactgccagagagcctacgagacggccatgtctcgcaagaagcggggcctcatccttgacttctttcccaatcgcggctggttagatgttctgcgagtgtttcgctacggcctaaagggtatcatttggcagagactgtggctcggtggtgcgagcaatggaagtgttctagtcaatgctgctatgcaagcgggcacctcgggcaaattgacaaacaaggctcctttcacactcgagatctga

SEQ ID NO: 8251 - protein, 325 aa, Muscodor strobelii
  misc_feature: SGI Peptide ID NO. 562531
  misc_feature (57)..(236): Pfam Id: PF00149 Pfam Desc: Calcineurin-like phosphoesterase
  misc_feature (10)..(317): NCBI GI: 154294049 Blast Desc: BC1G_14058 [Botryotinia fuckeliana B05.10] gi|150845103|gb|EDN20296.1| BC1G_14058 [Botryotinia fuckeliana B05.10]
  misc_feature (10)..(317): NCBI GI: 156035787 Blast Desc: SS1G_13097 [Sclerotinia sclerotiorum 1980] gi|154698502|gb|EDN98240.1| SS1G_13097 [Sclerotinia sclerotiorum 1980]
  misc_feature (1)..(317): NCBI GI: 261356609 Blast Desc: metallophosphoesterase domain-containing protein [Verticillium albo-atrum VaMs.102]
  misc_feature (1)..(318): NCBI GI: 39952255 Blast Desc: MGG_01770 [Magnaporthe grisea 70-15] gi|145020376|gb|EDK04505.1| MGG_01770 [Magnaporthe grisea 70-15]
  misc_feature (1)..(319): NCBI GI: 46136477 Blast Desc: FG09754.1 [Gibberella zeae PH-1]
  misc_feature (14)..(319): NCBI GI: 256727527 Blast Desc: [Nectria haematococca mpVI 77-13-4]
  misc_feature (10)..(317): NCBI GI: 116196534 Blast Desc: CHGG_04865 [Chaetomium globosum CBS 148.51] gi|88180778|gb|EAQ88246.1| CHGG_04865 [Chaetomium globosum CBS 148.51]
  misc_feature (18)..(318): NCBI GI: 70981941 Blast Desc: phosphoric ester hydrolase [Aspergillus fumigatus Af293] gi|66844122|gb|EAL84461.1| phosphoric ester hydrolase, [Aspergillus fumigatus Af293] gi|159122276|gb|EDP47398.1| ester
  misc_feature (2)..(315): NCBI GI: 171688512 Blast Desc: protein product [Podospora anserina] gi|170944218|emb|CAP70328.1| protein product [Podospora anserina]
  misc_feature (18)..(318): NCBI GI: 119487409 Blast Desc: phosphoric ester hydrolase, [Neosartorya fischeri NRRL 181] gi|119410654|gb|EAW20600.1| phosphoric ester hydrolase, [Neosartorya fischeri NRRL 181]
  misc_feature: Useful for introducing or modulating the production of volatile compounds
MGLLTSLGLRRQIRWEPRTPIDWLFESPIQGIIYYLYAIIIWLRGNPVKPPRNRPPIKIVFLSDTHESIVPNVPDGDLLIHCGDMTNDGTAGSIQKQIDWLTSLPHRHKVVVAGNHDSWFDINSRKEEDALGHRSVDLKTVHYLERKSISLTFKGGRKLNIYGAPDIPQCGGADNAFQYTIDQHPWEGTVPQDTEILITHGPPMHHRDLSIGCPGLLAEIWKAKPKVHVFGHVHWGRGIQAAYWDDCQRAYETAMSRKKRGLILDFFPNRGWLDVLRVFRYGLKGIIWQRLWLGGASNGSVLVNAAMQAGTSGKLTNKAPFTLEI

SEQ ID NO: 8252 - DNA, 2585 bp, Muscodor strobelii
  misc_feature: SGI EST ID NO. CUFF.20196.1
  misc_feature: Variant of the nucleotide sequence at SEQ ID NO 8250
gttcctcaagacaaagactgtgaatcaacatgctacagtcatggacaaagaaaacgtgacaccttataagccatctgaaagctgccgaatctgtagtatatcacaagtcacaggaatagcggctgggcgatctctaacaggggtcaagttatagtggggttatcgcaaaagtcataaaggcagcaatctctatgaaggaagcaatgacaaggggataaaagcaatattgatttacatcccagtgaaaatccatcgtccagctcaagccaggtacagatctcatcgagtttactaaatgctctcaagcttgtattcttcgcctctctgccacttgcatatcaacctctatttgaccctgattgacaccgtccattggagttgagacagggcgtagtgcgacgtcatcgagcatggggctactcacaagcctagggcttcgtcgtcagattagatgggaaccacgcacgccaatcgactggcttttcgaatcgcccattcaaggcatcatctactatctctacgcgatcatcatctggcttcgcggcaatcctgtaaagccacctaggaacagaccacccatcaaaatcgtcttcttgtcagatacgcacgagtccatcgtgccaaatgtgcccgatggcgaccttctcatccactgcggtgacatgaccaatgatggtaccgctggctcgatacagaaacaaatcgactggctcacttcactgcctcacaggcataaagttgtcgtcgctgggaatcatgatagctggttcgacatcaactcccgcaaggaagaagatgcgctaggacatcgctccgtggacctcaagacggttcattatctcgagcgtaaatcgatctctttgacgtttaagggcggtcgaaaactcaatatctatggtgcgcctgacattccgcagtgcggaggtgctgataacgcgtttcaatatacgattgaccaacatccatgggaggggacagttcctcaagacacagagatactcattacacatggtcccccgatgcaccaccgggacctttccattggatgcccaggactgttggcagagatctggaaagcaaaacccaaagtccacgtctttggccatgttcactggggtcgtggtatccaagctgcatactgggatgactgccagagagcctacgagacggccatgtctcgcaagaagcggggcctcatccttgacttctttcccaatcgcggctggttagatgttctgcgagtgtttcgctacggcctaaagggtatcatttggcagagactgtggctcggtggtgcgagcaatggaagtgttctagtcaatgctgctatgcaagcgggcacctcgggcaaattgacaaacaaggctcctttcacactcgagatctgaagagaactagatggcgtttaataaattgtagaagagatagagaagaactaattgccgctgcaagctgctgccactcgatgtagcttcaccatggtgtcttggtttctgtacattattagtcaagagggattgcgaaaagacatgcgttcatgtaacaaaagacgaagtttccaaacactctctatttttcttcggtacagcattgaaactatggtgaactcaatgatgaagaacgggctagtatagacagaataataggagaagagaaatcatgactctggtcctcgaccctggagcctaaaagcacatcgcaaatctcgagggtatctccgcacctctttcaccatctcatctccgacctaacaactccaataatctacatcgctcttacaacatcatcaaatcagcatcgtctccagacatactcccaactctcagcggtcgcggtatcagcatccttgccaaagtacccatactgattaccgggcgcatcaagcgcgacgcgaaagttgacattcagaatatcaagcacgccatcggcacccgtgcaaggcgaccaagccacatcggccgtcgtggcgtggacgttgatatctgcggtgaggcgcgccgcgccagtattaggaactgtgcccgagatcgtgccctaacacagaaagaaacgttagctcatctcgtctttaaagagactataaacaactccaaatttaggctgaattgaaacgtacagtatcagcggccgccgagctccagaagctagtgagataccagtctaagctagcgccggggtcaagcacaaggtggcccttcaccgtaacgcccttgacgccaacctgccaacctgacgtgcagccggcggactggatgtggacctggcagtttgccgacgaggtctcgatgcttggcagcgaggcctcgaaactgttgagtcggaaggtgctgtcgctgaatgccgtccccatgcggactacaccgggggaggacgacgggcagcctgtcccagagtatgagatggatgtgatgtgtggaaggctggctggtgcatcccgtgccacgatggcgggtatcgagcgggctgctacaagggatgtggtggggaggatgatgagtagggggttggattttagatgcatgttgatagaaaggatcaacgtgagtcggtcggcagaattgttttgattgtcagatatatgagag

SEQ ID NO: 8253 - DNA, 2187 bp, Muscodor strobelii
  misc_feature: SGI cDNA ID NO. 562532
  misc_feature: Reduced expression when VOC is produced
  misc_feature: Encodes the peptide sequence at SEQ ID NO 8254
atgactgatttcaagactctctcgacgtctgagggtgcggatcttcccggcctcaagactaacatgaacgtggactatgtaatacattacaaagtatcttcagacaaggcccaggccgaagcaggcttcactcaacttatcgaagctctcacaaagattggcctcgctacggaagttcgcaatggtcgtgactcgtccgtcctcgttttcgtcaaagtcgcatctacccagtacctcaacagccagatttaccgcgatcgtgtccaagactggctctatggtgtgaggacttccgctccggaaaaagacgtaaacaaagctttcgaagatgaaccgattacggaagctgagcgactccgcttagtttacacgcttatcaccaagcccaaggacgacggcggtgctggtatcacccctggtgttggacaatggaaacaggtcgcttcaatttttccaatgcacgatcatgccttcaatagagattggatcaagcagtggagttccaaatacttcttagacgaacaggatctcgaccgtattcgcgacaagtttggagagagcgtcgccttctattttgcgtttttgcaatcctatttcgcctttcagctattaccggcagcttttggcttcggtgcgtggctcatccttggccaattttcatggctgtacgccatagtcacctcgatatggtcaatcgtatttttcgagtggtggaagaacaaggaggttgaccttgccgtacaatggggtgttcgaggtgtctcgcgcatacagcaccctcgagcgcaattcgaatggatccatgaggcccctgatccagttacaggcgagccagtcaagttctatccaccgatgaagaggctacaaacacagctattgacagttccgttcgcattggcttgcgttggcatccttggcgcactctacatattctgcttcggtgtagaaatcttcttgactcaggtttacgacggaccgtttaagtcctacttgacttttacacccactattatcttgagtagtgttctgccagtcctatccactgttctcggtaacttcgcacaaactctaactcatcgcgagaactatccatccaatgacgcgcatcaagcggcacttatcaggaagattttcatcatcaacttcgtcacgtcatatacaccgctgttcatcagtgcctttatttacatgccctttggcaacctaatggttccgtaccttaacattttcacgactacggctgagaaattctctagtggaaactccatctccactcaagagttccagatcaatcccaaccgattgaaagcccagatgatttacttcgcagtcactgcacaaattgtgaacttggcattggaggctgtagtgccttatttaaagcgctttgcttccaaggaagtgacgaaggttcagtccaagatcgcacatcgagaagaaaacacaattcaagacgctcccgaagaggccgcattcctgaaatgtgcgcgaaacgaagcggagttagaggtctacgatgtttctgtcgactatcgcgaaatggtggtccaattcggctatctctctctgttttcggcgatctggccattaacacccctagcttttttgattaacaactgggttgagctccgatccgatgcgatgaagattgccacaggatgtcagcgcccgattccttggcgatcggactcaattggaccctggttacatgctctcggcttcctgtcttggaccggtagccttgtaagctctgctattgtgtttctcttcagtggccagagcgaaggccccggtggagatccgtcgaatgtgaatgtcataggcttactcgttactatcttatttgccgagcatctatacctgggtgcgcagttcattgtcaggcacgctctcagcctagttgatagtcctggtctccagaaggagagagcgcaaaggttctccatgagaaagcgggttttagaagagacgcttgggccggacgcaatgaagtcggcaattcctcccaccgcccagaagggcgagaagattacacgggacgctcttgaagaggcacagcgaaacttgtcatcgggtggaaacaaggggacgcccgaacagatgttctggcttcgacaacaaggcatggatgagacgattcaaattggtcgaaagcttatttcagaagctaagacgccgaagaactag

SEQ ID NO: 8254 - protein, 728 aa, Muscodor strobelii
  misc_feature: SGI Peptide ID NO. 562532
  misc_feature (440)..(644): Pfam Id: PF04547 Pfam Desc: Domain of function, DUF590
  misc_feature (440)..(631): Pfam Id: PF04547 Pfam Desc: Domain of function, DUF590
  misc_feature (1)..(722): NCBI GI: 164423565 Blast Desc: NCU08273 [Neurospora crassa OR74A] gi|157070148|gb|EAA32665.2| NCU08273 [Neurospora crassa OR74A]
  misc_feature (1)..(728): NCBI GI: 145613259 Blast Desc: MGG_01769 [Magnaporthe grisea 70-15] gi|145020377|gb|EDK04506.1| MGG_01769 [Magnaporthe grisea 70-15]
  misc_feature (17)..(722): NCBI GI: 256726955 Blast Desc: [Nectria haematococca mpVI 77-13-4]
  misc_feature (1)..(728): NCBI GI: 46136475 Blast Desc: FG09753.1 [Gibberella zeae PH-1]
  misc_feature (21)..(701): NCBI GI: 116196334 Blast Desc: CHGG_04765 [Chaetomium globosum CBS 148.51] gi|88180678|gb|EAQ88146.1| CHGG_04765 [Chaetomium globosum CBS 148.51]
  misc_feature (23)..(728): NCBI GI: 171688654 Blast Desc: protein product [Podospora anserina] gi|170944289|emb|CAP70399.1| protein product [Podospora anserina]
  misc_feature (57)..(722): NCBI GI: 154294047 Blast Desc: BC1G_14057 [Botryotinia fuckeliana B05.10] gi|150845102|gb|EDN20295.1| BC1G_14057 [Botryotinia fuckeliana B05.10]
  misc_feature (1)..(700): NCBI GI: 156035789 Blast Desc: SS1G_13098 [Sclerotinia sclerotiorum 1980] gi|154698503|gb|EDN98241.1| SS1G_13098 [Sclerotinia sclerotiorum 1980]
  misc_feature (1)..(725): NCBI GI: 261356610 Blast Desc: transmembrane protein 16H [Verticillium albo-atrum VaMs.102]
  misc_feature (17)..(724): NCBI GI: 169598544 Blast Desc: SNOG_02077 [Phaeosphaeria nodorum SN15] gi|160704416|gb|EAT90289.2| SNOG_02077 [Phaeosphaeria nodorum SN15]
  misc_feature: Useful for introducing or modulating the production of volatile compounds
MTDFKTLSTSEGADLPGLKTNMNVDYVIHYKVSSDKAQAEAGFTQLIEALTKIGLATEVRNGRDSSVLVFVKVASTQYLNSQIYRDRVQDWLYGVRTSAPEKDVNKAFEDEPITEAERLRLVYTLITKPKDDGGAGITPGVGQWKQVASIFPMHDHAFNRDWIKQWSSKYFLDEQDLDRIRDKFGESVAFYFAFLQSYFAFQLLPAAFGFGAWLILGQFSWLYAIVTSIWSIVFFEWWKNKEVDLAVQWGVRGVSRIQHPRAQFEWIHEAPDPVTGEPVKFYPPMKRLQTQLLTVPFALACVGILGALYIFCFGVEIFLTQVYDGPFKSYLTFTPTIILSSVLPVLSTVLGNFAQTLTHRENYPSNDAHQAALIRKIFIINFVTSYTPLFISAFIYMPFGNLMVPYLNIFTTTAEKFSSGNSISTQEFQINPNRLKAQMIYFAVTAQIVNLALEAVVPYLKRFASKEVTKVQSKIAHREENTIQDAPEEAAFLKCARNEAELEVYDVSVDYREMVVQFGYLSLFSAIWPLTPLAFLINNWVELRSDAMKIATGCQRPIPWRSDSIGPWLHALGFLSWTGSLVSSAIVFLFSGQSEGPGGDPSNVNVIGLLVTILFAEHLYLGAQFIVRHALSLVDSPGLQKERAQRFSMRKRVLEETLGPDAMKSAIPPTAQKGEKITRDALEEAQRNLSSGGNKGTPEQMFWLRQQGMDETIQIGRKLISEAKTPKN

SEQ ID NO: 8255 - DNA, 2903 bp, Muscodor strobelii
  misc_feature: SGI EST ID NO. CUFF.20218.0
  misc_feature: Variant of the nucleotide sequence at SEQ ID NO 8253
acatcattgactaacgctctccttctgtatatcaatttcatacctaagaacagtttctcctctgaggggagcagttgaagtttgtacaatttctctcgtatcgtcgagaaagttgccggttccttatagcactggtctccgtcgctctcctgcacgaatgacaagcatcaccatataatacgactccacgccgtacctttcttacatgggcccctagtcaagtctcttcctggatcttagacctggtgatcaatatatattacctacagagagcttgaatctgcatttcgagaagaaatgactgatttcaagactctctcgacgtctgagggtgcggatcttcccggcctcaagactaacatgaacgtggactatgtaatacattacaaagtatcttcagacaaggcccaggccgaagcaggcttcactcaacttatcgaagctctcacaaagattggcctcgctacggaagttcgcaatggtcgtgactcgtccgtcctcgttttcgtcaaagtcgcatctacccagtacctcaacagccagatttaccgcgatcgtgtccaagactggctctatggtgtgaggacttccgctccggaaaaagacgtaaacaaagctttcgaagatgaaccgattacggaagctgagcgactccgcttagtttacacgcttatcaccaagcccaaggacgacggcggtgctggtatcacccctggtgttggacaatggaaacaggtcgcttcaatttttccaatgcacgatcatgccttcaatagagattggatcaagcagtggagttccaaatacttcttagacgaacaggatctcgaccgtattcgcgacaagtttggagagagcgtcgccttctattttgcgtttttgcaatcctatttcgcctttcagctattaccggcagcttttggcttcggtgcgtggctcatccttggccaattttcatggctgtacgccatagtcacctcgatatggtcaatcgtatttttcgagtggtggaagaacaaggaggttgaccttgccgtacaatggggtgttcgaggtgtctcgcgcatacagcaccctcgagcgcaattcgaatggatccatgaggcccctgatccagttacaggcgagccagtcaagttctatccaccgatgaagaggctacaaacacagctattgacagttccgttcgcattggcttgcgttggcatccttggcgcactctacatattctgcttcggtgtagaaatcttcttgactcaggtttacgacggaccgtttaagtcctacttgacttttacacccactattatcttgagtagtgttctgccagtcctatccactgttctcggtaacttcgcacaaactctaactcatcgcgagaactatccatccaatgacgcgcatcaagcggcacttatcaggaagattttcatcatcaacttcgtcacgtcatatacaccgctgttcatcagtgcctttatttacatgccctttggcaacctaatggttccgtaccttaacattttcacgactacggctgagaaattctctagtggaaactccatctccactcaagagttccagatcaatcccaaccgattgaaagcccagatgatttacttcgcagtcactgcacaaattgtgaacttggcattggaggctgtagtgccttatttaaagcgctttgcttccaaggaagtgacgaaggttcagtccaagatcgcacatcgagaagaaaacacaattcaagacgctcccgaagaggccgcattcctgaaatgtgcgcgaaacgaagcggagttagaggtctacgatgtttctgtcgactatcgcgaaatggtggtccaattcggctatctctctctgttttcggcgatctggccattaacacccctagcttttttgattaacaactgggttgagctccgatccgatgcgatgaagattgccacaggatgtcagcgcccgattccttggcgatcggactcaattggaccctggttacatgctctcggcttcctgtcttggaccggtagccttgtaagctctgctattgtgtttctcttcagtggccagagcgaaggccccggtggagatccgtcgaatgtgaatgtcataggcttactcgttactatcttatttgccgagcatctatacctgggtgcgcagttcattgtcaggcacgctctcagcctagttgatagtcctggtctccagaaggagagagcgcaaaggttctccatgagaaagcgggttttagaagagacgcttgggccggacgcaatgaagtcggcaattcctcccaccgcccagaagggcgagaagattacacgggacgctcttgaagaggcacagcgaaacttgtcatcgggtggaaacaaggggacgcccgaacagatgttctggcttcgacaacaaggcatggatgagacgattcaaattggtcgaaagcttatttcagaagctaagacgccgaagaactaggagtccagtctctttatgccactggctattgagacagtggaaggcgtggtgattaatgaagtggtaaacggaatgatggatgaactattaactagcgcagtgggtttggctggctaaaagcgcgttggagttgcaaacgtgagagcgagatcaaaaatacgttgcatgacctttttgcattattctggcttgtacagtataggttggatttttaatgagaatacggagttgaaggatgaaacagagcatcgaaaagtaaatcgataaatactacagtgaaactcgtgtattcgtagtcttaaacatactgctggcctcatagcctttcctaacgggttgaaaagcagagagaataataacctggaagatgtagacctaattgaatactctacctacctaattcatcatcccgcttctaa

SEQ ID NO: 8256 - DNA, 2010 bp, Muscodor strobelii
  misc_feature: SGI cDNA ID NO. 562533
  misc_feature: Encodes the peptide sequence at SEQ ID NO 8257
atggcgtattcactttcaacacattgggccgggcaaacgctcctcgacagcttcacattcttcacaggagatgacccgagtaatggatttgttgactatcagagtagagaagatgccgtggctatggacctcgtcgccgtagacgagtacaatagagtgacgctcggtgtggattctgtcacaacttatgcgactagcgataagggcagaccgagtgttcggatcactagcaaagatgatttcacccacggtctgttcattgctgatttcgcacacatgcccggctcatcctgcgggacatggccagctttttgggcattcaacaacgaagacgacgggacactttggccggtaggaggtgaaatagatatcatcgagggtgcaaacaccgcgcagaggaatctgttctctgcacatactgagcctggctgccaaaatccaagcagtggatttaccggagtccaaggacctgatgactgctctgtggatatagacaacatcgggtgtaactacgcagccccagtagccgactcggcaacatacggtgatgccttcaatgccgcgggaggtggtgtctacgctctggagtgggattccaagtttctgaaaatttggcacttccctcgatcaaccatcccggatgatatcaagatggcacctatgatcaaaccaaacccatcaagctggggtcttccacaagccgtatttgggggaccatcttgtgatcccgatacttatttctataacatgagtctcgtaatcaacaccaacttttgcggtggatatgctggccaaatttggggagatgctgatcgctgcgatgaacttgcgcctacatgcgaggaatacgtcgctggcaacccaagtgtcttcaataatgcattttggcagatcaactacatcgacgtctaccaaagggctccggttcctggcgacaacacgacatctcccttcccgaatagcacgatgaccacgagtggttcaggggcaacgagcatgcctgctggtaataacactattattccatctggcactcgaacagtgacacaaatgatctctacagcagagccaactcagacaggtggtttagttgatcctgcgactatcaacggctggtcgctcttgggatgcttcggctcattgggcggctatcagtcattctcgaagagcgcatcatttcctactatggataatgaagcttgcgtagctagctgtgcgagccataaatttgccggtgtctctggcgagaactgttattgctccgacattctcggtgacgcaagcgcagtcggaaacgacatgtgcgatatcccctgtccagggaaccccatggagtactgcggcggtctcctggaagccggcgagaaggactcatcaagcttcatcggcatgggcatcgcactcacaaactcgaccatgcaccaaaacggcacatcttccaactcgacatcccaccggaatccgtaccgcattgacaagcgtgcggcaccgtctaacatcctcctcacagtctacggcaaggtgaccgacgacgatctgcctcccggcgcaccgggaatgggcggttccgcgggaccatccagtacagatcccaaaggatcaacagtcacagtgacaagcgcagtaacagttacatacgtcgccatctgcccaacggactcagcgaaactcgtcacgctggaatactgcacgacgcccacggcacccataactgccgtccccatgacgacgtgcacagagacctgcgacgcctgcggtccacacggcgagagcacggtgacgctcaccgttcctgaagctgtgcacgctggaactggcggtggtaacgtcgttgctattgctgtgcagacagttgtccctatttccgaggcaagactaaatcagacgaatgctactttcgcgtcgatacctattggaggaactgcggcacgaggcgcaggagttatgaccactctggcgactgccgttggagtttggtttgtattttttattgtattagttactttgtaa

SEQ ID NO: 8257 - protein, 669 aa, Muscodor strobelii
  misc_feature: SGI Peptide ID NO. 562533
  misc_feature (374)..(449): Pfam Id: PF01822 Pfam Desc: WSC domain
  misc_feature (1)..(530): NCBI GI: 46136479 Blast Desc: FG09755.1 [Gibberella zeae PH-1]
  misc_feature (1)..(447): NCBI GI: 261355881 Blast Desc: mixed-linked glucanase [Verticillium albo-atrum VaMs.102]
  misc_feature (1)..(306): NCBI GI: 256726954 Blast Desc: NECHADRAFT_123099 [Nectria haematococca mpVI 77-13-4]
  misc_feature (3)..(359): NCBI GI: 238843444 Blast Desc: 1,3(4)-beta-glucanase [Microsporum canis CBS 113480]
  misc_feature (13)..(308): NCBI GI: 119496731 Blast Desc: endo-1,3(4)-beta-glucanase, [Neosartorya fischeri NRRL 181] gi|119413301|gb|EAW23242.1| endo-1,3(4)-beta-glucanase, [Neosartorya fischeri NRRL 181]
  misc_feature (13)..(316): NCBI GI: 121702739 Blast Desc: endo-1,3(4)-beta-glucanase, [Aspergillus clavatus NRRL 1] gi|119397777|gb|EAW08208.1| endo-1,3(4)-beta-glucanase, [Aspergillus clavatus NRRL 1]
  misc_feature (13)..(313): NCBI GI: 159130751 Blast Desc: endo-1,3(4)-beta-glucanase, [Aspergillus fumigatus A1163]
  misc_feature (2)..(313): NCBI GI: 70990858 Blast Desc: endo-1,3(4)-beta-glucanase [Aspergillus fumigatus Af293] gi|66847910|gb|EAL88240.1| endo-1,3(4)-beta-glucanase, [Aspergillus fumigatus Af293]
  misc_feature (11)..(306): NCBI GI: 212540000 Blast Desc: endo-1,3(4)-beta-glucanase, [Penicillium marneffei ATCC 18224] gi|210067454|gb|EEA21546.1| endo-1,3(4)-beta-glucanase, [Penicillium marneffei ATCC 18224]
  misc_feature (2)..(306): NCBI GI: 240111183 Blast Desc: Glycosyl hydrolase family 16 protein [Coccidioides posadasii C735 delta SOWgp]
MAYSLSTHWAGQTLLDSFTFFTGDDPSNGFVDYQSREDAVAMDLVAVDEYNRVTLGVDSVTTYATSDKGRPSVRITSKDDFTHGLFIADFAHMPGSSCGTWPAFWAFNNEDDGTLWPVGGEIDIIEGANTAQRNLFSAHTEPGCQNPSSGFTGVQGPDDCSVDIDNIGCNYAAPVADSATYGDAFNAAGGGVYALEWDSKFLKIWHFPRSTIPDDIKMAPMIKPNPSSWGLPQAVFGGPSCDPDTYFYNMSLVINTNFCGGYAGQIWGDADRCDELAPTCEEYVAGNPSVFNNAFWQINYIDVYQRAPVPGDNTTSPFPNSTMTTSGSGATSMPAGNNTIIPSGTRTVTQMISTAEPTQTGGLVDPATINGWSLLGCFGSLGGYQSFSKSASFPTMDNEACVASCASHKFAGVSGENCYCSDILGDASAVGNDMCDIPCPGNPMEYCGGLLEAGEKDSSSFIGMGIALTNSTMHQNGTSSNSTSHRNPYRIDKRAAPSNILLTVYGKVTDDDLPPGAPGMGGSAGPSSTDPKGSTVTVTSAVTVTYVAICPTDSAKLVTLEYCTTPTAPITAVPMTTCTETCDACGPHGESTVTLTVPEAVHAGTGGGNVVAIAVQTVVPISEARLNQTNATFASIPIGGTAARGAGVMTTLATAVGVWFVFFIVLVTL

SEQ ID NO: 8258 - DNA, 1920 bp, Muscodor strobelii
  misc_feature: SGI cDNA ID NO. 562534
  misc_feature: Reduced expression when VOC is produced
  misc_feature: Encodes the peptide sequence at SEQ ID NO 8259
atgttgacctcgttggcaaagagcagagctcagagcaccctccttcgcacagccatacggcaacggaatcccccacagactctattgatggccccggcagccaagaggagcaatagctccctacccaaaggctatgccgaagacaactccaaggggccgatgttgaggttccaagagtctctgcccaagttgcccgtaccgtcgctcgaggagacggctgcccgctacatcaagacgctgcatcccttgctaagccccgtcgagttcgccgccagcaagaaggcggtcgatgagttcatcaagcccggtggcgtcggtcacaagctccaacacaagctagtcgccaagcgcgaagaccccaagactaagaactggatatacgagtggtggaatgacgccgcctacctctcttaccgcgaccccgtcgtcccctacgtcagctacttctactcccaccgtgacgaccgccggcggcgcaaccccgccaagcgagccgccgccatcaccaccgccaccctcgagttcaagaagcaggtcgacgccggcacgctcgagcccgagtacatgaagaagcttcccatctgcatggacagctaccagtggatgtttaacgccagccgtgttgctgcaaagcccgccgactaccccgtcaagttcgacgctaaggaccacaagtacatcatcgccattcgcaagaaccagttctggaagatcccacatgaggtcgacggccagcagctcaacacctccgagctcgaggcccagttcgccaaggtctacgagctcgctaagcgcgtccctgccgttggcgctctgaccagcgagaacagagatgtgtggacagacgcccgcaagatcctcctcgatgcctcacccaagaacgcagctgcgctcgaggccatagaagctgcatcattcatcgtctgcctagacgacgcatctcccgtgaccatggaggagcgcgcgcaccagtactggcacggcgacggccagaacagatggttcgataagcccctgcagttcattgtcaacgacaacggcacgtccggcttcatgggtgagcacagcatgatggacggcacgccaacccaccgcctgaacgactacgtcaacgacgttatcttcggcaacaagctagacttcagcaacccgtccgtacgctcaaacctgtccgacccgacagcggtcaatttcgagatcacaccagaggtgcagaacgagatcgagcgcgccaacaaagacttcgctagcgtcatcgggcagcacgagctcgccatccaggcttaccagggctacggcaagggcctgatcaagaagttcaagacctcccccgatgcatacgtccagatgatcatccagcttgcctactataagatgtatggcaagaaccgtccgacatacgagtccgcggcgaccaggcgatttcagctcggacgtaccgaaacttgccgctccgtatcggacgaaagcgtcgcctggtgcaacgccatggccgacccagatgccaccgacgccgaccgcgaggccctcttccgtaaggccaccaccgctcacgtcgagtacatcagcgccgcgtctgacggcaagggcgtcgaccgccatctcttcggtcttaagaagctgttagagcccggtgaggaggtacccgccatttacaaggacccagcctacggctacagctcctcatggttcttatctacgagtcaattgagctccgagttcttcaacggctatggctggagtcaggtcattgatgctggtttcggcatcgcctacatgatcaacgaaaatagcatcaactttaacatcgtctccaagggcctcggtagccagaagatgagccactacctcaacgaggccgcgggcgaaatgcgcgacctcttgatgcccggcctcgaggcgcccaaggccaaactgtaa

SEQ ID NO: 8259 - protein, 639 aa, Muscodor strobelii
  misc_feature: SGI Peptide ID NO. 562534
  misc_feature (60)..(626): Pfam Id: PF00755 Pfam Desc: Choline/Carnitine o-acyltransferase
  misc_feature (30)..(639): NCBI GI: 258565413 Blast Desc: conserved [Uncinocarpus reesii 1704] gi|237907152|gb|EEP81553.1| conserved [Uncinocarpus reesii 1704]
  misc_feature (1)..(639): NCBI GI: 71001808 Blast Desc: carnitine acetyl transferase [Aspergillus fumigatus Af293] gi|66853223|gb|EAL93547.1| carnitine acetyl transferase [Aspergillus fumigatus Af293]
  misc_feature (1)..(639): NCBI GI: 119481359 Blast Desc: carnitine acetyl transferase [Neosartorya fischeri NRRL 181] gi|119408862|gb|EAW18811.1| carnitine acetyl transferase [Neosartorya fischeri NRRL 181]
  misc_feature (1)..(639): NCBI GI: 159129645 Blast Desc: carnitine acetyl transferase [Aspergillus fumigatus A1163]
  misc_feature (30)..(639): NCBI GI: 238841906 Blast Desc: carnitine acetyl transferase [Microsporum canis CBS 113480]
  misc_feature (6)..(639): NCBI GI: 225563252 Blast Desc: carnitine acetyl transferase [Ajellomyces capsulatus G186AR]
  misc_feature (33)..(639): NCBI GI: 239610578 Blast Desc: carnitine acetyl transferase [Ajellomyces dermatitidis ER-3]
  misc_feature (33)..(639): NCBI GI: 226279611 Blast Desc: carnitine O-acetyltransferase [Paracoccidioides brasiliensis Pb01]
  misc_feature (30)..(639): NCBI GI: 240275840 Blast Desc: carnitine acetyl transferase [Ajellomyces capsulatus H143]
  misc_feature (1)..(638): NCBI GI: 242809597 Blast Desc: carnitine acetyl transferase [Talaromyces stipitatus ATCC 10500] gi|218716028|gb|EED15450.1| carnitine acetyl transferase [Talaromyces stipitatus ATCC 10500]
  misc_feature (41)..(632): SWISSPROT Homolog: EC 2.3.1.7 Carnitine O-acetyltransferase
  misc_feature: Useful for introducing or modulating the production of volatile compounds
MLTSLAKSRAQSTLLRTAIRQRNPPQTLLMAPAAKRSNSSLPKGYAEDNSKGPMLRFQESLPKLPVPSLEETAARYIKTLHPLLSPVEFAASKKAVDEFIKPGGVGHKLQHKLVAKREDPKTKNWIYEWWNDAAYLSYRDPVVPYVSYFYSHRDDRRRRNPAKRAAAITTATLEFKKQVDAGTLEPEYMKKLPICMDSYQWMFNASRVAAKPADYPVKFDAKDHKYIIAIRKNQFWKIPHEVDGQQLNTSELEAQFAKVYELAKRVPAVGALTSENRDVWTDARKILLDASPKNAAALEAIEAASFIVCLDDASPVTMEERAHQYWHGDGQNRWFDKPLQFIVNDNGTSGFMGEHSMMDGTPTHRLNDYVNDVIFGNKLDFSNPSVRSNLSDPTAVNFEITPEVQNEIERANKDFASVIGQHELAIQAYQGYGKGLIKKFKTSPDAYVQMIIQLAYYKMYGKNRPTYESAATRRFQLGRTETCRSVSDESVAWCNAMADPDATDADREALFRKATTAHVEYISAASDGKGVDRHLFGLKKLLEPGEEVPAIYKDPAYGYSSSWFLSTSQLSSEFFNGYGWSQVIDAGFGIAYMINENSINFNIVSKGLGSQKMSHYLNEAAGEMRDLLMPGLEAPKAKL

SEQ ID NO: 8260 - DNA, 5065 bp, Muscodor strobelii
  misc_feature: SGI EST ID NO. CUFF.20364.0
  misc_feature: Variant of the nucleotide sequence at SEQ ID NO 8258
gctggaacagtgaggcatggctgtggggtgaccaagtcgcattttgcaacctcgatgcgatcgctcactttcaatactagagaacccgatgtaccgtagcggcagagtgaaagcaattgaacttccagattcaatgggaatatacaaacattctttacgtctcaccccttagagcgagtacggagcagacccagcagcaaactgcatgaggtgaggcatatgtcggcggcccatgtacctagtagctcagattcgcatgtacacatcccaccccggcacgtctctacacactggcaccgcggcatctttgatctggcatccactcactagcatctctctctccgattctctcggacaaaactactttttctggttcccgtgacgagtgtgcaagcctactctttttattacttttgattctctattctgtttcttccctcccctttccgtcctttgtcatgttgacctcgttggcaaagagcagagctcagagcaccctccttcgcacagccatacggcaacggaatcccccacagactctattgatggccccggcagccaagaggagcaatagctccctacccaaaggctatgccgaagacaactccaaggggccgatgttgaggttccaagagtctctgcccaagttgcccgtaccgtcgctcgaggagacggctgcccgctacatcaagacgctgcatcccttgctaagccccgtcgagttcgccgccagcaagaaggcggtcgatgagttcatcaagcccggtggcgtcggtcacaagctccaacacaagctagtcgccaagcgcgaagaccccaagactaagaactggatatacgagtggtggaatgacgccgcctacctctcttaccgcgaccccgtcgtcccctacgtcagctacttctactcccaccgtgacgaccgccggcggcgcaaccccgccaagcgagccgccgccatcaccaccgccaccctcgagttcaagaagcaggtcgacgccggcacgctcgagcccgagtacatgaagaagcttcccatctgcatggacagctaccagtggatgtttaacgccagccgtgttgctgcaaagcccgccgactaccccgtcaagttcgacgctaaggaccacaagtacatcatcgccattcgcaagaaccagttctggaagatcccacatgaggtcgacggccagcagctcaacacctccgagctcgaggcccagttcgccaaggtctacgagctcgctaagcgcgtccctgccgttggcgctctgaccagcgagaacagagatgtgtggacagacgcccgcaagatcctcctcgatgcctcacccaagaacgcagctgcgctcgaggccatagaagctgcatcattcatcgtctgcctagacgacgcatctcccgtgaccatggaggagcgcgcgcaccagtactggcacggcgacggccagaacagatggttcgataagcccctgcagttcattgtcaacgacaacggcacgtccggcttcatgggtgagcacagcatgatggacggcacgccaacccaccgcctgaacgactacgtcaacgacgttatcttcggcaacaagctagacttcagcaacccgtccgtacgctcaaacctgtccgacccgacagcggtcaatttcgagatcacaccagaggtgcagaacgagatcgagcgcgccaacaaagacttcgctagcgtcatcgggcagcacgagctcgccatccaggcttaccagggctacggcaagggcctgatcaagaagttcaagacctcccccgatgcatacgtccagatgatcatccagcttgcctactataagatgtatggcaagaaccgtccgacatacgagtccgcggcgaccaggcgatttcagctcggacgtaccgaaacttgccgctccgtatcggacgaaagcgtcgcctggtgcaacgccatggccgacccagatgccaccgacgccgaccgcgaggccctcttccgtaaggccaccaccgctcacgtcgagtacatcagcgccgcgtctgacggcaagggcgtcgaccgccatctcttcggtcttaagaagctgttagagcccggtgaggaggtacccgccatttacaaggacccagcctacggctacagctcctcatggttcttatctacgagtcaattgagctccgagttcttcaacggctatggctggagtcaggtcattgatgctggtttcggcatcgcctacatgatcaacgaaaatagcatcaactttaacatcgtctccaagggcctcggtagccagaagatgagccactacctcaacgaggccgcgggcgaaatgcgcgacctcttgatgcccggcctcgaggcgcccaaggccaaactgtaaagaataaaagatctcaagaaaaacactagaaaccccctatctccgacagaggcttgtatataaatgtttctctgcaaagacatcgccaaatagaaatagagagatacaaaggggaaagaaaacaaatcactgacttgttggtctagatagcgtaccacctgacctacctattgtatatagaacgaccaaaccgtttgctgaaatgcgaagctttatacgatcatacacagatctttgcatgggtgattatctgtatgcgcagcgctggtgctgaaagaggctccgcagatgtttaaatagtacaaggatcgtagaacagaggtttggatgaaaagctgtgattcgaatgaggatacgccaatgctgtttgtctacgcaatatagtaatagtatatagaagcaaaacaagccgcatagcagatctcatgcccaatagacacgttcgaagaccacgctttctcccctctacgttcttctgatcctacacactctatcactacacaaccccaagcccggattttatctacaaactactcaggctatccagcatgctcaacaatctcattgaccatctcgcccttctcctcatcaaactgcgagcaaatctggtacggcagcgggatctcgacgtaatcttcgtcgtcacccttcagcacattgacgttgatgctcgaagacttgctggagaagatgcgcgtagagctgctctccttggagagatagatctgcgcgccgtccagctggtccaacaagatggtcggtaggtggcccatgacctgcagtgcgaagttggacgacttgacgatgtcgacggtcgagactagactgtcgactacgagggatagccgctgggtgttctcgatcgttactgcgtttgctttgcctttgaggatgatggttgtgtggttgcacttgctgattagcacggattgggacatggtgacttcgatttcgatgggttcgggatgtttctcgtagttttcctaggatttagaattagctgtcggtccttatcctttaggggtttgtctatcaagtgagaaacgtacgattgtccatttttggccatccagctccttcttaggcggcttcttgacccgcatactctcaggctttggctttctggcaggcacagggctcttgccccggacggaggaatcgtgatcggaaaccgtcgacccagctcgcaatgacgggttcttatgcgtcatttgcgacttgtcgaccttccgtaaacccttagttacgtcaccgcccttgttgatctcgttgaacacggcacccagaccagcatcagccggggccgcagccttctcttccttgatctgcagaacaggcggcgggccaggcggcggtggcggaggaggagcaccaccagcagcggccggtggtgcgggaggagcaggaggagtccccgagccggcttccgctatcgtcctcgcgacgtcggctgcggattggcccttggcgttccagggaatgccattggggaagtactgcttgacgtagtcggcgagctcacagaatatctggtagaaggactggatccattcgacctggtcggcatccttgtctttgaattctttgagcaccctgttgccaaagaactgagcagagccaagggactcctcgacatgcttgaagggcttgttgtcaacggtgacccaggcgagcaccatgatgccttccgacacggcgctcagctgggagaagacgggcgagccgcggttggactccttgatgttgccgacggccatcagggcctcgtttatgggcttcagcaggtcctggtagacagacatctcggccgagacggagatgttgggcttcttggccttagtggagatgaggagaaagcggcgctgctggttaaagccatcgaggaccttagcggcctgctcggcgatcaggccgcccagcttgttgctggcctggacatatctggctacggcctggtcgatgaaggcgtcgaactcctcgacagactcgggcaggtcttctttgggcacgtcggcagctacgatggacggaggcgagggggcagcggaaggggaggaggcctggggcacggggctagcatcgttgttggagaaatcggggggtgttgcgccggagtgtgagagggcgggcacggcgtgaggcagctcgatggtcgacgacgcgatgtcctccaggcgcgtagtagcagcttccagtctggcgagcatgttaatgatctgcgatttgcgttgaggcatcgttgtggccgtggccgaagccccagacagccagggtgtgcagggtgtgcaggttgagtaggttgaacaggtgtcttaccgcttgattaaagtgacgaggttgtggatgttgttttgcgccatggcggcggaagcgagggaagagcgatcgggtgttcagatgacgacggatgaagctgcacgacagaaaggggattttgaggaaggaacaagttctagcacaagcaagcgtaaagggccttcctcgtacacaaatgcgaaccccttctatccaaatgacataaatagtagagaaaaggggtgcctagtctactgtaagtctgttgataaccaatgcgaagattgtaacgagctgctggctgcttcaatcagtggttcatgatgacgatgcagacgactaaaatgaagcctggttggcgacgattgttgactgacgaaagctaatcatgc

SEQ ID NO: 8261 - DNA, 1986 bp, Muscodor strobelii
  misc_feature: SGI cDNA ID NO. 562535
  misc_feature: Encodes the peptide sequence at SEQ ID NO 8262
atgttgacctcgttggcaaagagcagagctcagagcaccctccttcgcacagccatacggcaacggaatcccccacagactctattgatggccccggcagccaagaggagcaatagctccctacccaaaggtaaagtgcagctgtctgaagatatcggctatcgtaacaccgtgctcaccgccagaaatcgtacaggctatgccgaagacaactccaaggggccgatgttgaggttccaagagtctctgcccaagttgcccgtaccgtcgctcgaggagacggctgcccgctacatcaagacgctgcatcccttgctaagccccgtcgagttcgccgccagcaagaaggcggtcgatgagttcatcaagcccggtggcgtcggtcacaagctccaacacaagctagtcgccaagcgcgaagaccccaagactaagaactggatatacgagtggtggaatgacgccgcctacctctcttaccgcgaccccgtcgtcccctacgtcagctacttctactcccaccgtgacgaccgccggcggcgcaaccccgccaagcgagccgccgccatcaccaccgccaccctcgagttcaagaagcaggtcgacgccggcacgctcgagcccgagtacatgaagaagcttcccatctgcatggacagctaccagtggatgtttaacgccagccgtgttgctgcaaagcccgccgactaccccgtcaagttcgacgctaaggaccacaagtacatcatcgccattcgcaagaaccagttctggaagatcccacatgaggtcgacggccagcagctcaacacctccgagctcgaggcccagttcgccaaggtctacgagctcgctaagcgcgtccctgccgttggcgctctgaccagcgagaacagagatgtgtggacagacgcccgcaagatcctcctcgatgcctcacccaagaacgcagctgcgctcgaggccatagaagctgcatcattcatcgtctgcctagacgacgcatctcccgtgaccatggaggagcgcgcgcaccagtactggcacggcgacggccagaacagatggttcgataagcccctgcagttcattgtcaacgacaacggcacgtccggcttcatgggtgagcacagcatgatggacggcacgccaacccaccgcctgaacgactacgtcaacgacgttatcttcggcaacaagctagacttcagcaacccgtccgtacgctcaaacctgtccgacccgacagcggtcaatttcgagatcacaccagaggtgcagaacgagatcgagcgcgccaacaaagacttcgctagcgtcatcgggcagcacgagctcgccatccaggcttaccagggctacggcaagggcctgatcaagaagttcaagacctcccccgatgcatacgtccagatgatcatccagcttgcctactataagatgtatggcaagaaccgtccgacatacgagtccgcggcgaccaggcgatttcagctcggacgtaccgaaacttgccgctccgtatcggacgaaagcgtcgcctggtgcaacgccatggccgacccagatgccaccgacgccgaccgcgaggccctcttccgtaaggccaccaccgctcacgtcgagtacatcagcgccgcgtctgacggcaagggcgtcgaccgccatctcttcggtcttaagaagctgttagagcccggtgaggaggtacccgccatttacaaggacccagcctacggctacagctcctcatggttcttatctacgagtcaattgagctccgagttcttcaacggctatggctggagtcaggtcattgatgctggtttcggcatcgcctacatgatcaacgaaaatagcatcaactttaacatcgtctccaagggcctcggtagccagaagatgagccactacctcaacgaggccgcgggcgaaatgcgcgacctcttgatgcccggcctcgaggcgcccaaggccaaactgtaa

SEQ ID NO: 8262 - protein, 661 aa, Muscodor strobelii
  misc_feature: SGI Peptide ID NO. 562535
  misc_feature (82)..(648): Pfam Id: PF00755 Pfam Desc: Choline/Carnitine o-acyltransferase
  misc_feature (6)..(661): NCBI GI: 171690892 Blast Desc: protein product [Podospora anserina] gi|170945394|emb|CAP71506.1| protein product [Podospora anserina]
  misc_feature (65)..(661): NCBI GI: 256720759 Blast Desc: [Nectria haematococca mpVI 77-13-4]
  misc_feature (67)..(661): NCBI GI: 46110084 Blast Desc: FG01924.1 [Gibberella zeae PH-1]
  misc_feature (30)..(661): NCBI GI: 116195904 Blast Desc: CHGG_04550 [Chaetomium globosum CBS 148.51] gi|88180463|gb|EAQ87931.1| CHGG_04550 [Chaetomium globosum CBS 148.51]
  misc_feature (66)..(661): NCBI GI: 85108947 Blast Desc: NCU08002 [Neurospora crassa OR74A] gi|28924283|gb|EAA33436.1| NCU08002 [Neurospora crassa OR74A] gi|39979153|emb|CAE85527.1| carnitine O-acetyltransferase crassa]
  misc_feature (30)..(661): NCBI GI: 154293128 Blast Desc: BC1G_14516 [Botryotinia fuckeliana B05.10] gi|150845661|gb|EDN20854.1| BC1G_14516 [Botryotinia fuckeliana B05.10]
  misc_feature (30)..(661): NCBI GI: 156034807 Blast Desc: SS1G_13339 [Sclerotinia sclerotiorum 1980] gi|154698742|gb|EDN98480.1| SS1G_13339 [Sclerotinia sclerotiorum 1980]
  misc_feature (66)..(661): NCBI GI: 77732544 Blast Desc: carnitine acetyl transferase [Magnaporthe grisea]
  misc_feature (66)..(661): NCBI GI: 189198249 Blast Desc: carnitine O-acetyltransferase [Pyrenophora tritici-repentis Pt-1C-BFP] gi|187981410|gb|EDU48036.1| carnitine O-acetyltransferase [Pyrenophora tritici-repentis Pt-1C-BFP]
  misc_feature (1)..(661): NCBI GI: 169605885 Blast Desc: SNOG_05975 [Phaeosphaeria nodorum SN15] gi|160706864|gb|EAT87039.2| SNOG_05975 [Phaeosphaeria nodorum SN15]
  misc_feature (67)..(654): SWISSPROT Homolog: EC 2.3.1.7 Carnitine O-acetyltransferase
MLTSLAKSRAQSTLLRTAIRQRNPPQTLLMAPAAKRSNSSLPKGKVQLSEDIGYRNTVLTARNRTGYAEDNSKGPMLRFQESLPKLPVPSLEETAARYIKTLHPLLSPVEFAASKKAVDEFIKPGGVGHKLQHKLVAKREDPKTKNWIYEWWNDAAYLSYRDPVVPYVSYFYSHRDDRRRRNPAKRAAAITTATLEFKKQVDAGTLEPEYMKKLPICMDSYQWMFNASRVAAKPADYPVKFDAKDHKYIIAIRKNQFWKIPHEVDGQQLNTSELEAQFAKVYELAKRVPAVGALTSENRDVWTDARKILLDASPKNAAALEAIEAASFIVCLDDASPVTMEERAHQYWHGDGQNRWFDKPLQFIVNDNGTSGFMGEHSMMDGTPTHRLNDYVNDVIFGNKLDFSNPSVRSNLSDPTAVNFEITPEVQNEIERANKDFASVIGQHELAIQAYQGYGKGLIKKFKTSPDAYVQMIIQLAYYKMYGKNRPTYESAATRRFQLGRTETCRSVSDESVAWCNAMADPDATDADREALFRKATTAHVEYISAASDGKGVDRHLFGLKKLLEPGEEVPAIYKDPAYGYSSSWFLSTSQLSSEFFNGYGWSQVIDAGFGIAYMINENSINFNIVSKGLGSQKMSHYLNEAAGEMRDLLMPGLEAPKAKL

SEQ ID NO: 8263 - DNA, 5065 bp, Muscodor strobelii; identical to SEQ ID NO: 8260
  misc_feature: SGI EST ID NO. CUFF.20364.0
  misc_feature: Variant of the nucleotide sequence at SEQ ID NO 8261

SEQ ID NO: 8264 - DNA, 1635 bp, Muscodor strobelii
  misc_feature: SGI cDNA ID NO. 562536
  misc_feature: Encodes the peptide sequence at SEQ ID NO 8265
atggcgcaaaacaacatccacaacctcgtcactttaatcaagcgactggaagctgctactacgcgcctggaggacatcgcgtcgtcgaccatcgagctgcctcacgccgtgcccgccctctcacactccggcgcaacaccccccgatttctccaacaacgatgctagccccgtgccccaggcctcctccccttccgctgccccctcgcctccgtccatcgtagctgccgacgtgcccaaagaagacctgcccgagtctgtcgaggagttcgacgccttcatcgaccaggccgtagccagatatgtccaggccagcaacaagctgggcggcctgatcgccgagcaggccgctaaggtcctcgatggctttaaccagcagcgccgctttctcctcatctccactaaggccaagaagcccaacatctccgtctcggccgagatgtctgtctaccaggacctgctgaagcccataaacgaggccctgatggccgtcggcaacatcaaggagtccaaccgcggctcgcccgtcttctcccagctgagcgccgtgtcggaaggcatcatggtgctcgcctgggtcaccgttgacaacaagcccttcaagcatgtcgaggagtcccttggctctgctcagttctttggcaacagggtgctcaaagaattcaaagacaaggatgccgaccaggtcgaatggatccagtccttctaccagatattctgtgagctcgccgactacgtcaagcagtacttccccaatggcattccctggaacgccaagggccaatccgcagccgacgtcgcgaggacgatagcggaagccggctcggggactcctcctgctcctcccgcaccaccggccgctgctggtggtgctcctcctccgccaccgccgcctggcccgccgcctgttctgcagatcaaggaagagaaggctgcggccccggctgatgctggtctgggtgccgtgttcaacgagatcaacaagggcggtgacgtaactaagggtttacggaaggtcgacaagtcgcaaatgacgcataagaacccgtcattgcgagctgggtcgacggtttccgatcacgattcctccgtccggggcaagagccctgtgcctgccagaaagccaaagcctgagagtatgcgggtcaagaagccgcctaagaaggagctggatggccaaaaatggacaatcgaaaactacgagaaacatcccgaacccatcgaaatcgaagtcaccatgtcccaatccgtgctaatcagcaagtgcaaccacacaaccatcatcctcaaaggcaaagcaaacgcagtaacgatcgagaacacccagcggctatccctcgtagtcgacagtctagtctcgaccgtcgacatcgtcaagtcgtccaacttcgcactgcaggtcatgggccacctaccgaccatcttgttggaccagctggacggcgcgcagatctatctctccaaggagagcagctctacgcgcatcttctccagcaagtcttcgagcatcaacgtcaatgtgctgaagggtgacgacgaagattacgtcgagatcccgctgccgtaccagatttgctcgcagtttgatgaggagaagggcgagatggtcaatgagattgttgagcatgctggatag

SEQ ID NO: 8265 - protein, 544 aa, Muscodor strobelii
  misc_feature: SGI Peptide ID NO. 562536
  misc_feature (383)..(543): Pfam Id: PF08603 Pfam Desc: DE Adenylate cyclase associated (CAP) C terminal
  misc_feature (9)..(371): Pfam Id: PF01213 Pfam Desc: Adenylate cyclase associated (CAP) N terminal
  misc_feature (1)..(544): NCBI GI: 46110082 Blast Desc: FG01923.1 [Gibberella zeae PH-1]
  misc_feature (2)..(544): NCBI GI: 256720978 Blast Desc: NECHADRAFT_64088 [Nectria haematococca mpVI 77-13-4]
  misc_feature (1)..(544): NCBI GI: 116195906 Blast Desc: CHGG_04551 [Chaetomium globosum CBS 148.51] gi|88180464|gb|EAQ87932.1| CHGG_04551 [Chaetomium globosum CBS 148.51]
  misc_feature (16)..(544): NCBI GI: 145613345 Blast Desc: MGG_01722 [Magnaporthe grisea 70-15] gi|145020434|gb|EDK04563.1| MGG_01722 [Magnaporthe grisea 70-15]
  misc_feature (1)..(544): NCBI GI: 156034783 Blast Desc: SS1G_13327 [Sclerotinia sclerotiorum 1980] gi|154698730|gb|EDN98468.1| SS1G_13327 [Sclerotinia sclerotiorum 1980]
  misc_feature (1)..(544): NCBI GI: 39979147 Blast Desc: related to adenylate cyclase-associated protein, 70K [Neurospora crassa]
  misc_feature (1)..(544): NCBI GI: 164423649 Blast Desc: NCU08008 [Neurospora crassa OR74A] gi|157070181|gb|EAA33442.2| conserved [Neurospora crassa OR74A]
  misc_feature (150)..(544): NCBI GI: 154293108 Blast Desc: adenylyl cyclase-associated protein [Botryotinia fuckeliana B05.10] gi|150845652|gb|EDN20845.1| adenylyl cyclase-associated protein [Botryotinia fuckeliana B05.10]
  misc_feature (1)..(544): NCBI GI: 258570631 Blast Desc: conserved [Uncinocarpus reesii 1704] gi|237904389|gb|EEP78790.1| conserved [Uncinocarpus reesii 1704]
  misc_feature (4)..(544): NCBI GI: 189198167 Blast Desc: adenylyl cyclase-associated protein [Pyrenophora tritici-repentis Pt-1C-BFP] gi|187981369|gb|EDU47995.1| adenylyl cyclase-associated protein [Pyrenophora tritici-repentis
MAQNNIHNLVTLIKRLEAATTRLEDIASSTIELPHAVPALSHSGATPPDFSNNDASPVPQASSPSAAPSPPSIVAADVPKEDLPESVEEFDAFIDQAVARYVQASNKLGGLIAEQAAKVLDGFNQQRRFLLISTKAKKPNISVSAEMSVYQDLLKPINEALMAVGNIKESNRGSPVFSQLSAVSEGIMVLAWVTVDNKPFKHVEESLGSAQFFGNRVLKEFKDKDADQVEWIQSFYQIFCELADYVKQYFPNGIPWNAKGQSAADVARTIAEAGSGTPPAPPAPPAAAGGAPPPPPPPGPPPVLQIKEEKAAAPADAGLGAVFNEINKGGDVTKGLRKVDKSQMTHKNPSLRAGSTVSDHDSSVRGKSPVPARKPKPESMRVKKPPKKELDGQKWTIENYEKHPEPIEIEVTMSQSVLISKCNHTTIILKGKANAVTIENTQRLSLVVDSLVSTVDIVKSSNFALQVMGHLPTILLDQLDGAQIYLSKESSSTRIFSSKSSSINVNVLKGDDEDYVEIPLPYQICSQFDEEKGEMVNEIVEHAG

SEQ ID NO: 8266 - DNA, 5080 bp, Muscodor strobelii
  misc_feature: SGI EST ID NO. CUFF.20365.2
  misc_feature: Variant of the nucleotide sequence at SEQ ID NO 8264
gcatgattagctttcgtcagtcaacaatcgtcgccaaccaggcttcattttagtcgtctgcatcgtcatcatgaaccactgattgaagcagccagcagctcgttacaatcttcgcattggttatcaacagacttacagtagactaggcaccccttttctctactatttatgtcatttggatagaaggggttcgcatttgtgtacgaggaaggccctttacgcttgcttgtgctagaacttgttccttcctcaaaatcccctttctgtcgtgcagcttcatccgtcgtcatctgaacacccgatcgctcttccctcgcttccgccgccatggcgcaaaacaacatccacaacctcgtcactttaatcaagcgactggaagctgctactacgcgcctggaggacatcgcgtcgtcgaccatcgagctgcctcacgccgtgcccgccctctcacactccggcgcaacaccccccgatttctccaacaacgatgctagccccgtgccccaggcctcctccccttccgctgccccctcgcctccgtccatcgtagctgccgacgtgcccaaagaagacctgcccgagtctgtcgaggagttcgacgccttcatcgaccaggccgtagccagatatgtccaggccagcaacaagctgggcggcctgatcgccgagcaggccgctaaggtcctcgatggctttaaccagcagcgccgctttctcctcatctccactaaggccaagaagcccaacatctccgtctcggccgagatgtctgtctaccaggacctgctgaagcccataaacgaggccctgatggccgtcggcaacatcaaggagtccaaccgcggctcgcccgtcttctcccagctgagcgccgtgtcggaaggcatcatggtgctcgcctgggtcaccgttgacaacaagcccttcaagcatgtcgaggagtcccttggctctgctcagttctttggcaacagggtgctcaaagaattcaaagacaaggatgccgaccaggtcgaatggatccagtccttctaccagatattctgtgagctcgccgactacgtcaagcagtacttccccaatggcattccctggaacgccaagggccaatccgcagccgacgtcgcgaggacgatagcggaagccggctcggggactcctcctgctcctcccgcaccaccggccgctgctggtggtgctcctcctccgccaccgccgcctggcccgccgcctgttctgcagatcaaggaagagaaggctgcggccccggctgatgctggtctgggtgccgtgttcaacgagatcaacaagggcggtgacgtaactaagggtttacggaaggtcgacaagtcgcaaatgacgcataagaacccgtcattgcgagctgggtcgacggtttccgatcacgattcctccgtccggggcaagagccctgtgcctgccagaaagccaaagcctgagagtatgcgggtcaagaagccgcctaagaaggagctggatggccaaaaatggacaatcgaaaactacgagaaacatcccgaacccatcgaaatcgaagtcaccatgtcccaatccgtgctaatcagcaagtgcaaccacacaaccatcatcctcaaaggcaaagcaaacgcagtaacgatcgagaacacccagcggctatccctcgtagtcgacagtctagtctcgaccgtcgacatcgtcaagtcgtccaacttcgcactgcaggtcatgggccacctaccgaccatcttgttggaccagctggacggcgcgcagatctatctctccaaggagagcagctctacgcgcatcttctccagcaagtcttcgagcatcaacgtcaatgtgctgaagggtgacgacgaagattacgtcgagatcccgctgccgtaccagatttgctcgcagtttgatgaggagaagggcgagatggtcaatgagattgttgagcatgctggatagcctgagtagtttgtagataaaatccgggcttggggttgtgtagtgatagagtgtgtaggatcagaagaacgtagaggggagaaagcgtggtcttcgaacgtgtctattgggcatgagatctgctatgcggcttgttttgcttctatatactattactatattgcgtagacaaacagcattggcgtatcctcattcgaatcacagcttttcatccaaacctctgttctacgatccttgtactatttaaacatctgcggagcctctttcagcaccagcgctgcgcatacagataatcacccatgcaaagatctgtgtatgatcgtataaagcttcgcatttcagcaaacggtttggtcgttctatatacaataggtaggtcaggtggtacgctatctagaccaacaagtcagtgatttgttttctttcccctttgtatctctctatttctatttggcgatgtctttgcagagaaacatttatatacaagcctctgtcggagatagggggtttctagtgtttttcttgagatcttttattctttacagtttggccttgggcgcctcgaggccgggcatcaagaggtcgcgcatttcgcccgcggcctcgttgaggtagtggctcatcttctggctaccgaggcccttggagacgatgttaaagttgatgctgttgtttaatgttagtgatcacataataaacggtagttgggagggtagagaggagcttacctattttcgttgatcatgtaggcgatgccgaaaccagcatcaatgacctgactccagccatagccgttgaagaactcggagctcaattgactcgtagataagaaccatgaggagctgtagccgtaggctgggtccttgtaaatggcgggtacctcctcaccgggctctaacagcttcttaagaccgaagagatggcggtcgacgcccttgccgtcagacgcggcgctgatgtactcgacgtgagcggtggtggccttacggaagagggcctcgcggtcggcgtcggtggcatctgggtcggccatggcgttgcaccaggcgacgctttcgtccgatacggagcggcaagtttcggtacgtccgagctgaaatcgcctggtcgccgcggactcgtatgtcggacggttcttgccatacatcttatagtaggcaagctggatgatcatctggacgtatgcatcgggggaggtcttgaacttcttgatcaggcccttgccgtagccctggtaagcctggatggcgagctcgtgctgcccgatgacgctagcgaagtctttgttggcgcgctcgatctcgttctgcacctctggtgtgatctcgaaattgaccgctgtcgggtcggacaggtttgagcgtacggacgggttgctgaagtctagcttgttgccgaagataacgtcgttgacgtagtcgttcaggcggtgggttggcgtgccgtccatcatgctgtgctcacccatgaagccggacgtgccgttgtcgttgacaatgaactgcaggggcttatcgaaccatctgttctggccgtcgccgtgccagtactggtgcgcgcgctcctccatggtcacgggagatgcgtcgtctaggcagacgatgaatgatgcagcttctatggcctcgagcgcagctgcgttcttgggtgaggcatcgaggaggatcttgcgggcgtctgtccacacatctctgttctcgctggtcagagcgccaacggcagggacgcgcttagcgagctcgtagaccttggcgaactgggcctcgagctcggaggtgttgagctgctggccgtcgacctcatgtgggatcttccagaactggttcttgcgaatggcgatgatgtacttgtggtccttagcgtcgaacttgacggggtagtcggcgggctttgcagcaacacggctggcgttaaacatccactggtagctgtccatgcagatgggaagcttcttcatgtactcgggctcgagcgtgccggcgtcgacctgcttcttgaactcgagggtggcggtggtgatggcggcggctcgcttggcggggttgcgccgccggcggtcgtcacggtgggagtagaagtagctgacgtaggggacgacggggtcgcggtaagagaggtaggcggcgtcattccaccactcgtatatccagttcttagtcttggggtcttcgcgcttggcgactagcttgtgttggagcttgtgaccgacgccaccgggcttgatgaactcatcgaccgccttcttgctggcggcgaactcgacggggcttagcaagggatgcagcgtcttgatgtagcgggcagccgtctcctcgagcgacggtacgggcaacttgggcagagactcttggaacctcaacatcggccccttggagttgtcttcggcatagcctgtacgatttctggcggtgagcacggtgttacgatagccgatatcttcagacagctgcactttacctttgggtagggagctattgctcctcttggctgccggggccatcaatagagtctaaacatgatgttgttagtgacattttttccttgacatctagagtgagtagtggtgaggaattcgactatacctgtgggggattccgttgccgtatggctgtgcgaaggagggtgctctgagctctgctctttgccaacgaggtcaacatgacaaaggacggaaaggggagggaagaaacagaatagagaatcaaaagtaataaaaagagtaggcttgcacactcgtcacgggaaccagaaaaagtagttttgtccgagagaatcggagagagagatgctagtgagtggatgccagatcaaagatgccgcggtgccagtgtgtagagacgtgccggggtgggatgtgtacatgcgaatctgagctactaggtacatgggccgccgacatatgcctcacctcatgcagtttgctgctgggtctgctccgtactcgctctaaggggtgagacgtaaagaatgtttgtatattcccattgaatctggaagttcaattgctttcactctgccgctacggtacatcgggttctctagtattgaaagtgagcgatcgcatcgaggttgcaaaatgcgacttggtcaccccacagccatgcctcactgttccagc

SEQ ID NO: 8267 - DNA, 1416 bp, Muscodor strobelii
  misc_feature: SGI cDNA ID NO. 562537
  misc_feature: Encodes the peptide sequence at SEQ ID NO 8268
atggctgtcacagacgatcacgaaactgcccaagtcgaggccggggacgaagtggtcgtcgctgccttgaacgacattgtgctgcctgagcctgaacttgagccggagtctgaggaacctagcattggcatcgacttcgttactctgggcatgatcatcatcgatgacatcgactacttgcctccaacaccgccagtgaaggacgtccttggcggggccggaacattttctgctctaggtgcacgcctattctcgccgcccccacaatcgagcagcgtgggttggattgtcgataaaggatccgatttccctgcggatctcgaggaactcatcaagtcttgggatacatcggtgttgttacgcgacgaccctgacaggctaacgacacgtggctggaacgggtacgatgaacatgagaaccgtgccttcaaatacacaacacccaagaaacgactcacaggtgcagacttgacacccgaccttgttgcatcacgaagtttccatctcgtctgctcgccggcgagatgtcgcgagcttgtcctcgatatcaaagacaggagagccgatttacaagaagcaggtaaaaatcttccgaagcccatatttgtctgggagcccgtgccagatctctgcactccggatgagctgctaaattgcacaaatgttctacctcttatcgatatcatgagcccaaatcatgccgagctcgccggtttcatgggagacgacgggctagatcccgagacgggagagatcagtacacgtgccatcgaacgagcatgtgagcagcttctgggctctatgccgttacaatcctttgccattgtggtacgggccggtgacaaggggtgttacgtcgcacgaaacggcggcaggaaacgcacacacaggtccaaaacaggagcaaacaaaactcggaagaagccgtctgcactacttcacggcggtctgcagcccgatactgatatggaggcgctgtttgccgggcttcttcaagaccccgaaggctctatagcccgtgaagaaatcgaggtcgatcccggtgtcgagcgatggatccctgcctttcacaacgacgatagtgacgatgaggaagatgccggaagtgcccaaaacaacgagactgtggacggtgaagagccggataagaaacaagagataaagaagaagcggaagaaagtcatcgatccgacaggaggcggcaatacattcctaggtggtatggccgtcgcactggcaagaggaaaggggctcgaagagtctgccgcgtggggaagcgtcgctgccagttttgctattgaacaggtgggcatgccgaaaatcggtcaagacgacgagggcaacgagacctggaatggtcttcgtgtagacgagcgattcgaggagttcaagacgaggttggccttcagctgttga

SEQ ID NO: 8268 - protein, 471 aa, Muscodor strobelii
  misc_feature: SGI Peptide ID NO. 562537
  misc_feature (36)..(445): Pfam Id: PF00294 Pfam Desc: pfkB family carbohydrate kinase
  misc_feature (393)..(437): Pfam Id: PF00294 Pfam Desc: pfkB family carbohydrate kinase
  misc_feature (25)..(467): NCBI GI: 46110078 Blast Desc: FG01921.1 [Gibberella zeae PH-1]
  misc_feature (55)..(467): NCBI GI: 261355790 Blast Desc: MAK32 [Verticillium albo-atrum VaMs.102]
  misc_feature (55)..(467): NCBI GI: 256720760 Blast Desc: NECHADRAFT_50267 [Nectria haematococca mpVI 77-13-4]
  misc_feature (29)..(466): NCBI GI: 116195908 Blast Desc: CHGG_04552 [Chaetomium globosum CBS 148.51] gi|88180465|gb|EAQ87933.1| CHGG_04552 [Chaetomium globosum CBS 148.51]
  misc_feature (37)..(469): NCBI GI: 39979148 Blast Desc: related to MAK32 protein [Neurospora crassa]
  misc_feature (37)..(469): NCBI GI: 85108957 Blast Desc: NCU08007 [Neurospora crassa OR74A] gi|28924288|gb|EAA33441.1| conserved [Neurospora crassa OR74A]
  misc_feature (47)..(467): NCBI GI: 154293110 Blast Desc: BC1G_14508 [Botryotinia fuckeliana B05.10] gi|150845653|gb|EDN20846.1| BC1G_14508 [Botryotinia fuckeliana B05.10]
  misc_feature (44)..(436): NCBI GI: 156034785 Blast Desc: SS1G_13328 [Sclerotinia sclerotiorum 1980] gi|154698731|gb|EDN98469.1| SS1G_13328 [Sclerotinia sclerotiorum 1980]
  misc_feature (44)..(469): NCBI GI: 39952249 Blast Desc: MGG_01767 [Magnaporthe grisea 70-15] gi|145020379|gb|EDK04508.1| MGG_01767 [Magnaporthe grisea 70-15]
  misc_feature (44)..(468): NCBI GI: 189198169 Blast Desc: MAK32-like protein [Pyrenophora tritici-repentis Pt-1C-BFP] gi|187981370|gb|EDU47996.1| MAK32-like protein [Pyrenophora tritici-repentis Pt-1C-BFP]
MAVTDDHETAQVEAGDEVVVAALNDIVLPEPELEPESEEPSIGIDFVTLGMIIIDDIDYLPPTPPVKDVLGGAGTFSALGARLFSPPPQSSSVGWIVDKGSDFPADLEELIKSWDTSVLLRDDPDRLTTRGWNGYDEHENRAFKYTTPKKRLTGADLTPDLVASRSFHLVCSPARCRELVLDIKDRRADLQEAGKNLPKPIFVWEPVPDLCTPDELLNCTNVLPLIDIMSPNHAELAGFMGDDGLDPETGEISTRAIERACEQLLGSMPLQSFAIVVRAGDKGCYVARNGGRKRTHRSKTGANKTRKKPSALLHGGLQPDTDMEALFAGLLQDPEGSIAREEIEVDPGVERWIPAFHNDDSDDEEDAGSAQNNETVDGEEPDKKQEIKKKRKKVIDPTGGGNTFLGGMAVALARGKGLEESAAWGSVAASFAIEQVGMPKIGQDDEGNETWNGLRVDERFEEFKTRLAFSC

SEQ ID NO: 8269 - DNA, 4261 bp, Muscodor strobelii
  misc_feature: SGI EST ID NO. CUFF.20199.0
  misc_feature: Variant of the nucleotide sequence at SEQ ID NO 8267
gggacatgttaccctacaaatcaaccacaacaccacaccaatatctccctttggtgcctgccgtcatacaggccacaggaggacgcgctcgacgcctgcatattgtctcagcaggatctgccataaacatgcaaggctgcattttgccttgtcaccactcaggcactcgttaaaaagctaccacgttcaacgatcccacattcaaccacacacggacccatctcgggccgctatggtctagcaggagtgacctacacctcaagcatatttcatctccggatcttttcaagccaatgtcctttctctctcatttgcgctcatgagtcactcataagtcttgtgctcgtctcattctttagacttgtaattcgcacgcaaggagccttgttgttacaacaattcctatgacaccaacttgccccagacactgactccccattgtatctcatgcacggttggcaatcttgtaaatactatgcctcgctgatccgcttacgaatcgaatccaccatggctgtcacagacgatcacgaaactgcccaagtcgaggccggggacgaagtggtcgtcgctgccttgaacgacattgtgctgcctgagcctgaacttgagccggagtctgaggaacctagcattggcatcgacttcgttactctgggcatgatcatcatcgatgacatcgactacttgcctccaacaccgccagtgaaggacgtccttggcggggccggaacattttctgctctaggtgcacgcctattctcgccgcccccacaatcgagcagcgtgggttggattgtcgataaaggatccgatttccctgcggatctcgaggaactcatcaagtcttgggatacatcggtgttgttacgcgacgaccctgacaggctaacgacacgtggctggaacgggtacgatgaacatgagaaccgtgccttcaaatacacaacacccaagaaacgactcacaggtgcagacttgacacccgaccttgttgcatcacgaagtttccatctcgtctgctcgccggcgagatgtcgcgagcttgtcctcgatatcaaagacaggagagccgatttacaagaagcaggtaaaaatcttccgaagcccatatttgtctgggagcccgtgccagatctctgcactccggatgagctgctaaattgcacaaatgttctacctcttatcgatatcatgagcccaaatcatgccgagctcgccggtttcatgggagacgacgggctagatcccgagacgggagagatcagtacacgtgccatcgaacgagcatgtgagcagcttctgggctctatgccgttacaatcctttgccattgtggtacgggccggtgacaaggggtgttacgtcgcacgaaacggcggcaggaaacgcacacacaggtccaaaacaggagcaaacaaaactcggaagaagccgtctgcactacttcacggcggtctgcagcccgatactgatatggaggcgctgtttgccgggcttcttcaagaccccgaaggctctatagcccgtgaagaaatcgaggtcgatcccggtgtcgagcgatggatccctgcctttcacaacgacgatagtgacgatgaggaagatgccggaagtgcccaaaacaacgagactgtggacggtgaagagccggataagaaacaagagataaagaagaagcggaagaaagtcatcgatccgacaggaggcggcaatacattcctaggtggtatggccgtcgcactggcaagaggaaaggggctcgaagagtctgccgcgtggggaagcgtcgctgccagttttgctattgaacaggtgggcatgccgaaaatcggtcaagacgacgagggcaacgagacctggaatggtcttcgtgtagacgagcgattcgaggagttcaagacgaggttggccttcagctgttgatggttgttcaaccaatcatcaatgtgctagttttggctacgctgcattatgctatgacttaatcactgtccaggcaagacttctgataggggagacgcatcaagaagactcgacacatcgtcaccacgccgcgccaaaacctgaaaaggcatagatttcaaccacgacgagaaaacaaagaggtcgaggttggccatgttcctgtcctggagtcaccatgcaccaaattaaaatcggttgagtttggagtcattggtatatggctttggtacctttattgttcccacgctgattatagatgattctggtacagagtagaccgaatccagctttgctgttgaagatagtcaaaagctaatcaacccctattcaaaagtaaaacatgcatgtatcgccgtcagataaccccaactgtcgtaaaaatacccaaacccatacagagctctttacagtgactgttgcgtgaggcatgacttgacaacactttagtctgtgacatgtatcgttactatattttcaatgcagcttgtgaagaggctgtttatgattattcataaactcatttgtattccgcaaacagactcttgccctaccagcatcgatagaaatcacttaatctgttaactcaaccaagtcaatatcatggtggacaacaacatcctggtgtactccgtgtaccccatcttgagcccctaaaaagacttcactccgcaacccatataccgtgcaccttgatttagccgtgagaggtgggaaagggaatattttggacaatcatccgtctaagcagaatgctcgtctccctcagcatgctctgtaagatcaaactcgagttcggcctcgagttcggaatcatcttcatcttcgctctcatcgtcctcgatgaattcgatctctaactcgacataattaccgtctagctcatctaggatatcgaggtcatcgaacataccctcgtcagagtcttcgtctccgtctccactcttcgcacgatgaatcttgtccgaaactttccagaaggcagtaggaccagccggtccacgtcgatcaaagtctctgcaataatgaatttagccgctgcgtagtggtcccgtttcgtgggaaggaacgactggttttggaattttactaacttgtcaaaccaatgacccaatacgcccttggcgctcttaacaccgcctacctgtacgctctcgctccgccagcgctcaacgcctccgaagatggaccaggttgtccagcggacctcgccctcgggtgtaagacgtacggtacctgatgcaaatataatcagagcccattcttgcatctcatatcgaaattggtttcacctctgatgagaactatacctctgagatctgaatccgcgttgtcgtcgaagctgcggtctgctgaccttgaaacacctttgaagtgcacaacagggagatcttgtccgtcatctgggccaggcggctccacggctgtgacgaatatgctcatgaagatgagacgcgtggcctctccgtagtctatggcaggtcgtgggacatgcaaaggtagttgggtttccgatgcaaaattgtaagcaaagaaatcggtgtaatccaggaaacagacgacgcgcatccagatgcccgagacgccgtaagggtcaagatgctctagtgagtcaggcggaggcggcacaatcttgttatgtgggctcttccagctcccaggccacgtgcctgtgaacggagaagaggtaaagatatcacacattgggaagcgagacaagctaagattggccatgttggcacccaggacaatcatcacagcctcgaccttttcccaatctacattcattgtaccatcatccatgaaagggccccactggttctgcgagttgtactgtctaaggtcgtagactttggagcaggcaaagtggctcatcttgctgcgtcgcgtttcacgagttgctggcgggacgagctgagggacgccaaagaggcaatctgtgagatatgcataagtcattcgatgccctcattcttgattctatattgagtgtccagctgtgctgagcagccgaaccatatatcagcaaaaaggaaaagagtcgagcttacgcagatgagcactcatctgatactcgggtttggaaggtccataaaattcggcattcagtttgccgttgtcatgaaatccggctcttgcacgttcatagatgaacgaccgacataagaaggccgacttgttcgaatcgtctgagaagatgcgagccagtatatcagcgttacgggacttgaatctcgggaattggaaaccagttggctctgattcctctgagtctttccagtgactggcatttctc

SEQ ID NO: 8270 - DNA, 1647 bp, Muscodor strobelii
  misc_feature: SGI cDNA ID NO. 562538
  misc_feature: Encodes the peptide sequence at SEQ ID NO 8271
atgcttctcttaaccgggcttccgcccgagattttgcacgaagtccttggctatgttgacccgcctgacctagctgccattccccgtgtgtgccatgcgctctatcgggtggtgaaaggcaacgagtggctattcaaacaagtatacctccatcaccttgacacaccaccgtctcaagatggggttcagtacgagagactcctgaaggactttgtccgtctccaggctatttgccgcggccaaaatattgatggcaaggttgtccaacctcatctgctcacctatgaccagaacatatacttatctaatctacagaaaacagaactcagtttcgtacatcaaatagtaacaagtttattgagaaatgccagtcactggaaagactcagaggaatcagagccaactggtttccaattcccgagattcaagtcccgtaacgctgatatactggctcgcatcttctcagacgattcgaacaagtcggccttcttatgtcggtcgttcatctatgaacgtgcaagagccggatttcatgacaacggcaaactgaatgccgaattttatggaccttccaaacccgagtatcagatgagtgctcatctgcattgcctctttggcgtccctcagctcgtcccgccagcaactcgtgaaacgcgacgcagcaagatgagccactttgcctgctccaaagtctacgaccttagacagtacaactcgcagaaccagtggggccctttcatggatgatggtacaatgaatgtagattgggaaaaggtcgaggctgtgatgattgtcctgggtgccaacatggccaatcttagcttgtctcgcttcccaatgtgtgatatctttacctcttctccgttcacaggcacgtggcctgggagctggaagagcccacataacaagattgtgccgcctccgcctgactcactagagcatcttgacccttacggcgtctcgggcatctggatgcgcgtcgtctgtttcctggattacaccgatttctttgcttacaattttgcatcggaaacccaactacctttgcatgtcccacgacctgccatagactacggagaggccacgcgtctcatcttcatgagcatattcgtcacagccgtggagccgcctggcccagatgacggacaagatctccctgttgtgcacttcaaaggtgtttcaaggtcagcagaccgcagcttcgacgacaacgcggattcagatctcagaggtaccgtacgtcttacacccgagggcgaggtccgctggacaacctggtccatcttcggaggcgttgagcgctggcggagcgagagcgtacaggtaggcggtgttaagagcgccaagggcgtattgggtcattggtttgacaaagactttgatcgacgtggaccggctggtcctactgccttctggaaagtttcggacaagattcatcgtgcgaagagtggagacggagacgaagactctgacgagggtatgttcgatgacctcgatatcctagatgagctagacggtaattatgtcgagttagagatcgaattcatcgaggacgatgagagcgaagatgaagatgattccgaactcgaggccgaactcgagtttgatcttacagagcatgctgagggagacgagcattctgcttag

SEQ ID NO: 8271 - protein, 548 aa, Muscodor strobelii
  misc_feature: SGI Peptide ID NO. 562538
  misc_feature (2)..(49): Pfam Id: PF00646 Pfam Desc: F-box domain
  misc_feature (3)..(498): NCBI GI: 256727525 Blast Desc: NECHADRAFT_58210 [Nectria haematococca mpVI 77-13-4]
  misc_feature (7)..(473): NCBI GI: 46136485 Blast Desc: FG09758.1 [Gibberella zeae PH-1]
  misc_feature (4)..(495): NCBI GI: 116196538 Blast Desc: CHGG_04867 [Chaetomium globosum CBS 148.51] gi|88180780|gb|EAQ88248.1| CHGG_04867 [Chaetomium globosum CBS 148.51]
  misc_feature (1)..(477): NCBI GI: 169619806 Blast Desc: SNOG_13100 [Phaeosphaeria nodorum SN15] gi|111058307|gb|EAT79427.1| SNOG_13100 [Phaeosphaeria nodorum SN15]
  misc_feature (1)..(491): NCBI GI: 189201561 Blast Desc: conserved [Pyrenophora tritici-repentis Pt-1C-BFP] gi|187984216|gb|EDU49704.1| conserved [Pyrenophora tritici-repentis Pt-1C-BFP]
  misc_feature (197)..(477): NCBI GI: 145613257 Blast Desc: MGG_01773 [Magnaporthe grisea 70-15] gi|145020373|gb|EDK04502.1| MGG_01773 [Magnaporthe grisea 70-15]
  misc_feature (288)..(525): NCBI GI: 261355879 Blast Desc: conserved [Verticillium albo-atrum VaMs.102]
  misc_feature (263)..(483): NCBI GI: 171688436 Blast Desc: protein product [Podospora anserina] gi|170944180|emb|CAP70290.1| protein product [Podospora anserina]
  misc_feature (312)..(476): NCBI GI: 85105631 Blast Desc: NCU05243 [Neurospora crassa OR74A] gi|28923598|gb|EAA32771.1| NCU05243 [Neurospora crassa OR74A]
  misc_feature (1)..(296): NCBI GI: 85105631 Blast Desc: NCU05243 [Neurospora crassa OR74A] gi|28923598|gb|EAA32771.1| NCU05243 [Neurospora crassa OR74A]
MLLLTGLPPEILHEVLGYVDPPDLAAIPRVCHALYRVVKGNEWLFKQVYLHHLDTPPSQDGVQYERLLKDFVRLQAICRGQNIDGKVVQPHLLTYDQNIYLSNLQKTELSFVHQIVTSLLRNASHWKDSEESEPTGFQFPRFKSRNADILARIFSDDSNKSAFLCRSFIYERARAGFHDNGKLNAEFYGPSKPEYQMSAHLHCLFGVPQLVPPATRETRRSKMSHFACSKVYDLRQYNSQNQWGPFMDDGTMNVDWEKVEAVMIVLGANMANLSLSRFPMCDIFTSSPFTGTWPGSWKSPHNKIVPPPPDSLEHLDPYGVSGIWMRVVCFLDYTDFFAYNFASETQLPLHVPRPAIDYGEATRLIFMSIFVTAVEPPGPDDGQDLPVVHFKGVSRSADRSFDDNADSDLRGTVRLTPEGEVRWTTWSIFGGVERWRSESVQVGGVKSAKGVLGHWFDKDFDRRGPAGPTAFWKVSDKIHRAKSGDGDEDSDEGMFDDLDILDELDGNYVELEIEFIEDDESEDEDDSELEAELEFDLTEHAEGDEHSA

SEQ ID NO: 8272 - DNA, 4194 bp, Muscodor strobelii
  misc_feature: SGI EST ID NO. CUFF.20200.1
  misc_feature: Variant of the nucleotide sequence at SEQ ID NO 8270
gctaggtctaagctgcacgagctgtgtgcggggcactaaggtctggctatcttcatctttaactccggtgcaatccaatgggtcaatgtccggcgcggcaatctactgctcgctttccataaacccgggacgaacatgatacctgaggcggccgtatgcccacgattgatcttttcccgccggtgagataaataacatttgcccctctctcaggttcatcattatacacagctccatcctgcccatttccattgcacattccccgtgtcgtaacaacgtattgcccctcctccgatccaatacgtaccctgcgggtcggtgattcgtagattgctccctaacgaaaggcactcctaacaacttgacattgtccgctcgcgcaagcagaaagccggctcaaacccgactctgcgtgcctctttgcagaaatgcttctcttaaccgggcttccgcccgagattttgcacgaagtccttggctatgttgacccgcctgacctagctgccattccccgtgtgtgccatgcgctctatcgggtggtgaaaggcaacgagtggctattcaaacaagtatacctccatcaccttgacacaccaccgtctcaagatggggttcagtacgagagactcctgaaggactttgtccgtctccaggctatttgccgcggccaaaatattgatggcaagaaaacagaactcagtttcgtacatcaaatagtaacaagtttattgagaaatgccagtcactggaaagactcagaggaatcagagccaactggtttccaattcccgagattcaagtcccgtaacgctgatatactggctcgcatcttctcagacgattcgaacaagtcggccttcttatgtcggtcgttcatctatgaacgtgcaagagccggatttcatgacaacggcaaactgaatgccgaattttatggaccttccaaacccgagtatcagatgagtgctcatctgcattgcctctttggcgtccctcagctcgtcccgccagcaactcgtgaaacgcgacgcagcaagatgagccactttgcctgctccaaagtctacgaccttagacagtacaactcgcagaaccagtggggccctttcatggatgatggtacaatgaatgtagattgggaaaaggtcgaggctgtgatgattgtcctgggtgccaacatggccaatcttagcttgtctcgcttcccaatgtgtgatatctttacctcttctccgttcacaggcacgtggcctgggagctggaagagcccacataacaagattgtgccgcctccgcctgactcactagagcatcttgacccttacggcgtctcgggcatctggatgcgcgtcgtctgtttcctggattacaccgatttctttgcttacaattttgcatcggaaacccaactacctttgcatgtcccacgacctgccatagactacggagaggccacgcgtctcatcttcatgagcatattcgtcacagccgtggagccgcctggcccagatgacggacaagatctccctgttgtgcacttcaaaggtgtttcaaggtcagcagaccgcagcttcgacgacaacgcggattcagatctcagaggtaccgtacgtcttacacccgagggcgaggtccgctggacaacctggtccatcttcggaggcgttgagcgctggcggagcgagagcgtacaggtaggcggtgttaagagcgccaagggcgtattgggtcattggtttgacaaagactttgatcgacgtggaccggctggtcctactgccttctggaaagtttcggacaagattcatcgtgcgaagagtggagacggagacgaagactctgacgagggtatgttcgatgacctcgatatcctagatgagctagacggtaattatgtcgagttagagatcgaattcatcgaggacgatgagagcgaagatgaagatgattccgaactcgaggccgaactcgagtttgatcttacagagcatgctgagggagacgagcattctgcttagacggatgattgtccaaaatattccctttcccacctctcacggctaaatcaaggtgcacggtatatgggttgcggagtgaagtctttttaggggctcaagatggggtacacggagtacaccaggatgttgttgtccaccatgatattgacttggttgagttaacagattaagtgatttctatcgatgctggtagggcaagagtctgtttgcggaatacaaatgagtttatgaataatcataaacagcctcttcacaagctgcattgaaaatatagtaacgatacatgtcacagactaaagtgttgtcaagtcatgcctcacgcaacagtcactgtaaagagctctgtatgggtttgggtatttttacgacagttggggttatctgacggcgatacatgcatgttttacttttgaataggggttgattagcttttgactatcttcaacagcaaagctggattcggtctactctgtaccagaatcatctataatcagcgtgggaacaataaaggtaccaaagccatataccaatgactccaaactcaaccgattttaatttggtgcatggtgactccaggacaggaacatggccaacctcgacctctttgttttctcgtcgtggttgaaatctatgccttttcaggttttggcgcggcgtggtgacgatgtgtcgagtcttcttgatgcgtctcccctatcagaagtcttgcctggacagtgattaagtcatagcataatgcagcgtagccaaaactagcacattgatgattggttgaacaaccatcaacagctgaaggccaacctcgtcttgaactcctcgaatcgctcgtctacacgaagaccattccaggtctcgttgccctcgtcgtcttgaccgattttcggcatgcccacctgttcaatagcaaaactggcagcgacgcttccccacgcggcagactcttcgagcccctttcctcttgccagtgcgacggccataccacctaggaatgtattgccgcctcctgtcggatcgatgactttcttccgcttcttctttatctcttgtttcttatccggctcttcaccgtccacagtctcgttgttttgggcacttccggcatcttcctcatcgtcactatcgtcgttgtgaaaggcagggatccatcgctcgacaccgggatcgacctcgatttcttcacgggctatagagccttcggggtcttgaagaagcccggcaaacagcgcctccatatcagtatcgggctgcagaccgccgtgaagtagtgcagacggcttcttccgagttttgtttgctcctgttttggacctgtgtgtgcgtttcctgccgccgtttcgtgcgacgtaacaccccttgtcaccggcccgtaccacaatggcaaaggattgtaacggcatagagcccagaagctgctcacatgctcgttcgatggcacgtgtactgatctctcccgtctcgggatctagcccgtcgtctcccatgaaaccggcgagctcggcatgatttgggctcatgatatcgataagaggtagaacatttgtgcaatttagcagctcatccggagtgcagagatctggcacgggctcccagacaaatatgggcttcggaagatttttacctgcttcttgtaaatcggctctcctgtctttgatatcgaggacaagctcgcgacatctcgccggcgagcagacgagatggaaacttcgtgatgcaacaaggtcgggtgtcaagtctgcacctgtgagtcgtttcttgggtgttgtgtatttgaaggcacggttctcatgttcatcgtacccgttccagccacgtgtcgttagcctgtcagggtcgtcgcgtaacaacaccgatgtatcccaagacttgatgagttcctcgagatccgcagggaaatcggatcctttatcgacaatccaacccacgctgctcgattgtgggggcggcgagaataggcgtgcacctagagcagaaaatgttccggccccgccaaggacgtccttcactggcggtgttggaggcaagtagtcgatgtcatctttatgagtgaaagcaattgtcagtctctgggcactgtacgaatgaattgaaaaatagataaatttggggatatgaagtggacagtctgtgttgtgttcataggcaagagacgagataggaggatcgtgagaatcatttc

SEQ ID NO: 8273 - DNA, 1665 bp, Muscodor strobelii
  misc_feature: SGI cDNA ID NO. 562539
  misc_feature: Encodes the peptide sequence at SEQ ID NO 8274
atgcttctcttaaccgggcttccgcccgagattttgcacgaagtccttggctatgttgacccgcctgacctagctgccattccccgtgtgtgccatgcgctctatcgggtggtgaaaggcaacgagtggctattcaaacaagtatacctccatcaccttgacacaccaccgtctcaagatggggttcagtacgagagactcctgaaggactttgtccgtctccaggctatttgccgcggccaaaatattgatggcaaggttgtccaacctcatctgctcacctatgaccagaacatatacttatctaatctacagaaaacagaactcagtttcgtacatcaaatagtaacaagtttattgagaaatgccagtcactggaaagactcagaggaatcagagccaactggtttccaattcccgagattcaagtcccgtaacgctgatatactggctcgcatcttctcagacgattcgaacaagtcggccttcttatgtcggtcgttcatctatgaacgtgcaagagccggatttcatgacaacggcaaactgaatgccgaattttatggaccttccaaacccgagtatcagatgagtgctcatctgcattgcctctttggcgtccctcagctcgtcccgccagcaactcgtgaaacgcgacgcagcaagatgagccactttgcctgctccaaagtctacgaccttagacagtacaactcgcagaaccagtggggccctttcatggatgatggtacaatgaatgtagattgggaaaaggtcgaggctgtgatgattgtcctgggtgccaacatggccaatcttagcttgtctcgcttcccaatgtgtgatatctttacctcttctccgttcacaggcacgtggcctgggagctggaagagcccacataacaagattgtgccgcctccgcctgactcactagagcatcttgacccttacggcgtctcgggcatctggatgcgcgtcgtctgtttcctggattacaccgatttctttgcttacaattttgcatcggaaacccaactacctttgcatgtcccacgacctgccatagactacggagaggccacgcgtctcatcttcatgagcatattcgtcacagccgtggagccgcctggcccagatgacggacaagatctccctgttgtgcacttcaaaggtgtttcaaggtcagcagaccgcagcttcgacgacaacgcggattcagatctcagaggtatagttctcatcagaggtaccgtacgtcttacacccgagggcgaggtccgctggacaacctggtccatcttcggaggcgttgagcgctggcggagcgagagcgtacaggtaggcggtgttaagagcgccaagggcgtattgggtcattggtttgacaaagactttgatcgacgtggaccggctggtcctactgccttctggaaagtttcggacaagattcatcgtgcgaagagtggagacggagacgaagactctgacgagggtatgttcgatgacctcgatatcctagatgagctagacggtaattatgtcgagttagagatcgaattcatcgaggacgatgagagcgaagatgaagatgattccgaactcgaggccgaactcgagtttgatcttacagagcatgctgagggagacgagcattctgcttag

SEQ ID NO: 8274 - protein, 554 aa, Muscodor strobelii
  misc_feature: SGI Peptide ID NO. 562539
  misc_feature (2)..(49): Pfam Id: PF00646 Pfam Desc: F-box domain
  misc_feature (3)..(504): NCBI GI: 256727525 Blast Desc: NECHADRAFT_58210 [Nectria haematococca mpVI 77-13-4]
  misc_feature (7)..(479): NCBI GI: 46136485 Blast Desc: FG09758.1 [Gibberella zeae PH-1]
  misc_feature (4)..(501): NCBI GI: 116196538 Blast Desc: CHGG_04867 [Chaetomium globosum CBS 148.51] gi|88180780|gb|EAQ88248.1| CHGG_04867 [Chaetomium globosum CBS 148.51]
  misc_feature (1)..(483): NCBI GI: 169619806 Blast Desc: SNOG_13100 [Phaeosphaeria nodorum SN15] gi|111058307|gb|EAT79427.1| SNOG_13100 [Phaeosphaeria nodorum SN15]
  misc_feature (1)..(497): NCBI GI: 189201561 Blast Desc: conserved [Pyrenophora tritici-repentis Pt-1C-BFP] gi|187984216|gb|EDU49704.1| conserved [Pyrenophora tritici-repentis Pt-1C-BFP]
  misc_feature (197)..(483): NCBI GI: 145613257 Blast Desc: MGG_01773 [Magnaporthe grisea 70-15] gi|145020373|gb|EDK04502.1| MGG_01773 [Magnaporthe grisea 70-15]
  misc_feature (288)..(531): NCBI GI: 261355879 Blast Desc: conserved [Verticillium albo-atrum VaMs.102]
  misc_feature (263)..(489): NCBI GI: 171688436 Blast Desc: protein product [Podospora anserina] gi|170944180|emb|CAP70290.1| protein product [Podospora anserina]
  misc_feature (312)..(482): NCBI GI: 85105631 Blast Desc: NCU05243 [Neurospora crassa OR74A] gi|28923598|gb|EAA32771.1| NCU05243 [Neurospora crassa OR74A]
  misc_feature (1)..(296): NCBI GI: 85105631 Blast Desc: NCU05243 [Neurospora crassa OR74A] gi|28923598|gb|EAA32771.1| NCU05243 [Neurospora crassa OR74A]
MLLLTGLPPEILHEVLGYVDPPDLAAIPRVCHALYRVVKGNEWLFKQVYLHHLDTPPSQDGVQYERLLKDFVRLQAICRGQNIDGKVVQPHLLTYDQNIYLSNLQKTELSFVHQIVTSLLRNASHWKDSEESEPTGFQFPRFKSRNADILARIFSDDSNKSAFLCRSFIYERARAGFHDNGKLNAEFYGPSKPEYQMSAHLHCLFGVPQLVPPATRETRRSKMSHFACSKVYDLRQYNSQNQWGPFMDDGTMNVDWEKVEAVMIVLGANMANLSLSRFPMCDIFTSSPFTGTWPGSWKSPHNKIVPPPPDSLEHLDPYGVSGIWMRVVCFLDYTDFFAYNFASETQLPLHVPRPAIDYGEATRLIFMSIFVTAVEPPGPDDGQDLPVVHFKGVSRSADRSFDDNADSDLRGIVLIRGTVRLTPEGEVRWTTWSIFGGVERWRSESVQVGGVKSAKGVLGHWFDKDFDRRGPAGPTAFWKVSDKIHRAKSGDGDEDSDEGMFDDLDILDELDGNYVELEIEFIEDDESEDEDDSELEAELEFDLTEHAEGDEHSA

SEQ ID NO: 8275 - DNA, 4194 bp, Muscodor strobelii; identical to SEQ ID NO: 8272
  misc_feature: SGI EST ID NO. CUFF.20200.1
  misc_feature: Variant of the nucleotide sequence at SEQ ID NO 8273

SEQ ID NO: 8276 - DNA, 3138 bp, Muscodor strobelii
  misc_feature: SGI cDNA ID NO. 562540
  misc_feature: Encodes the peptide sequence at SEQ ID NO 8277
atgacttctgtccttgctatccagcccagagacataaggtcttccctacctcccactcatccgttttccgccatgacacaaccacggaggcagtcgccgtcccgcatcaagtcggaggacagagctgagccctcaccccagtcgaacaagccgagagactttgaactggaagataatgaaagtgatcatgatggagatggggacaacaagcatgagacgtcgtcgaatgacgagggtccgattagaaagcgtagacgaagtcggaaagggcttgataagaagttcgagtgtccaaccgaaggatgcggcaaaagctactcaagagcagaacatctacaccgccatcagctgaaccatacaccgaagcagatttatagatgcgacttccaggactgcaatcgtcaattcgtccgcctcgatctatgtaaccgccacaaggatcgccataccgcgaaagggtccgcgttgagccggaaggattctctgataagtcaaagctctccggtcgacaacgtaagatctccgtaccctacccccgcttcgacgacaatgtcgcccaagcacagtacaccgggaaatagtgccttgaaaacagaacacccagctcaccttcagtatcagtcaccgaaggacggtgttggcgccccttacacacctatcacaaacacatctcctgccactttccctcagttaaatgaggggtacatgcacaccgatcaagatacgggatatagcacaagactgcaacaccaatctccttccggccaaatgcaccgatctcatgtgcagagaaataccagcgcatatggagtcatgtcacctgtttcggctcacccgggaagttatcacctgcagccaacccacacccctcaatcggccccaacaataccgtacgtcgcgccgaacaactttccagctttcacactgccgccatcaggatttgcgacaactgccggtgtgaatatgagtagtccttccgctccacactatgcgagtacaacaagcgagtacggcgagcaatcacatgatcaatcatcgatagacctgatgcagttggatcaaatgacagcccaggccacgatgccggtgtttggtcccgacggggtcctgaacaagtcgccctatatttcgattcccgaagactttgtggcttacttgttcaacacaaccgcccctgatacttctcctcaatcggtgccccattttatacaacggagccaatactctagttatggcgaacatgcaaatcagtacaacatgccatacccgggagccgatagcgtccctcttggttatttcccacccggcgggcaacctcagcaagttttggcagtcacgaatctcctcgacccagatttacctgagtctattctctccgaagacaagagccaggaactgttcgaccttatcaaagaaaggttccacgaaaacgaccatgctcctgttgaacgccagggagaaaatctcctcgaaggcgacagaagcaacgatagccacatgttaagtcgtaaaatgatgcagcattatattggttcctactggttacatttcagtgaccaagtaccgatactgcacaaacctacgttttcgcccgataggaccccgaatcttcttctcatagctgtgatggctattggtgcggcatgtttagatcgcagctacagtcctaaaatcacgcaagctggcgcacagctctcaaactttctagcttggaacttgagatggcaagttttcatgaacgtcaactcgcgtccgcccgcaaagctatggatattccagacaatgttgctcttagagctatacgaaaagatgtactcgacacgagagcttcacgaaagggctcatatccatcatgcaacaactatcaccctcatgcgaagaggtcgctcgctgattggcaagtcagcactggactctccagctagtgctcgtgacgagagatctacaagtgctggatctcgacattcctctacatctggcccggctcacactccggacgaatggtggaatcaatggattacaaccgaaagtaccagacgtgccgccttcgcagcttttttaatcgattccatacatgcaacgatgtttgggcactcaacagtgatggtggcgcatgaaatgcgtcttcccttgccatgcgacgatcagctctggaaagcaacaagcggcgccgaagttggtcggatagaatccaatttactctcgaacggcatcaaagccatgccattcctcgaggggcttaagcggacacttgccggacacgaggttcgcacaaatccttttggccggcaaatattaatggcaggattattaagtgttagctggcacatgaatcagcgtgacttacaggtgagctctctgggtcataacatgtcacaagcgcttgggggccgggacaaatggcgaggtaccttaatgagagcattcgacgcctggaaaaccgagttcgacaagtcgcttcagcattccaattcgacgttcgatccgtatacttcagataagcggaccgatggaaattttgtgttcgaaagccgtacggtattgcatcatctagctcacatggccatgcacgtggatattgtcgattgtcaaatttttgctcgcgcaaagcgattgcttggccgagcgatcggtacgcaagacctgaatagtgcgcaaaggagaatgaaagaccactgggctccgtctgctagggcccgagatgcgacgttttacgcagcaaaattcttatgttccgttctactcgacgatgttcaaatcagaccatctgatcagtatagtcaaccggacgagccgatgtattgcgctcgagacgacgtactcctgaaccgaccgtgggttctctatttcgcggcactggtggtctggtgctatggatttgctgtggcgggaccttgtccggacaaacctgttcctggcacggccgtggagaagcgtgcagagatgcgcagctatttgcacaaactcggttcaatacaaacacccgatgatctcaagttcatgaagggcgtgaataatagcagtgctctcttggcggttttgaaggattcgttcgcgtcgacccgttgggagctgcttcacgaaggggccacattattggataactgtatccaactcaatagtggaaaccccttatga

SEQ ID NO: 8277 - protein, 1045 aa, Muscodor strobelii
  misc_feature: SGI Peptide ID NO. 562540
  misc_feature (95)..(119): Pfam Id: PF00096 Pfam Desc: Zinc finger, C2H2 type
  misc_feature (1)..(1042): NCBI GI: 171688440 Blast Desc: protein product [Podospora anserina] gi|170944182|emb|CAP70292.1| protein product [Podospora anserina]
  misc_feature (1)..(1042): NCBI GI: 85105627 Blast Desc: NCU05242 [Neurospora crassa OR74A] gi|28923597|gb|EAA32770.1| conserved [Neurospora crassa OR74A]
  misc_feature (74)..(1042): NCBI GI: 116196540 Blast Desc: CHGG_04868 [Chaetomium globosum CBS 148.51] gi|88180781|gb|EAQ88249.1| CHGG_04868 [Chaetomium globosum CBS 148.51]
  misc_feature (1)..(1045): NCBI GI: 256726952 Blast Desc: [Nectria haematococca mpVI 77-13-4]
  misc_feature (33)..(1042): NCBI GI: 145613249 Blast Desc: MGG_01776 [Magnaporthe grisea 70-15] gi|145020369|gb|EDK04498.1| MGG_01776 [Magnaporthe grisea 70-15]
  misc_feature (53)..(1045): NCBI GI: 46136509 Blast Desc: FG09770.1 [Gibberella zeae PH-1]
  misc_feature (91)..(1039): NCBI GI: 169618772 Blast Desc: SNOG_12578 [Phaeosphaeria nodorum SN15] gi|160703677|gb|EAT79876.2| SNOG_12578 [Phaeosphaeria nodorum SN15]
  misc_feature (82)..(1038): NCBI GI: 258577455 Blast Desc: conserved [Uncinocarpus reesii 1704] gi|237903175|gb|EEP77576.1| conserved [Uncinocarpus reesii 1704]
  misc_feature (79)..(1042): NCBI GI: 238482741 Blast Desc: C2H2 finger domain protein, [Aspergillus flavus NRRL3357] gi|220700659|gb|EED56997.1| C2H2 finger domain protein, [Aspergillus flavus NRRL3357]
  misc_feature (79)..(1042): NCBI GI: 169766108 Blast Desc: [Aspergillus oryzae RIB40] gi|83765380|dbj|BAE55523.1| protein product [Aspergillus oryzae]
MTSVLAIQPRDIRSSLPPTHPFSAMTQPRRQSPSRIKSEDRAEPSPQSNKPRDFELEDNESDHDGDGDNKHETSSNDEGPIRKRRRSRKGLDKKFECPTEGCGKSYSRAEHLHRHQLNHTPKQIYRCDFQDCNRQFVRLDLCNRHKDRHTAKGSALSRKDSLISQSSPVDNVRSPYPTPASTTMSPKHSTPGNSALKTEHPAHLQYQSPKDGVGAPYTPITNTSPATFPQLNEGYMHTDQDTGYSTRLQHQSPSGQMHRSHVQRNTSAYGVMSPVSAHPGSYHLQPTHTPQSAPTIPYVAPNNFPAFTLPPSGFATTAGVNMSSPSAPHYASTTSEYGEQSHDQSSIDLMQLDQMTAQATMPVFGPDGVLNKSPYISIPEDFVAYLFNTTAPDTSPQSVPHFIQRSQYSSYGEHANQYNMPYPGADSVPLGYFPPGGQPQQVLAVTNLLDPDLPESILSEDKSQELFDLIKERFHENDHAPVERQGENLLEGDRSNDSHMLSRKMMQHYIGSYWLHFSDQVPILHKPTFSPDRTPNLLLIAVMAIGAACLDRSYSPKITQAGAQLSNFLAWNLRWQVFMNVNSRPPAKLWIFQTMLLLELYEKMYSTRELHERAHIHHATTITLMRRGRSLIGKSALDSPASARDERSTSAGSRHSSTSGPAHTPDEWWNQWITTESTRRAAFAAFLIDSIHATMFGHSTVMVAHEMRLPLPCDDQLWKATSGAEVGRIESNLLSNGIKAMPFLEGLKRTLAGHEVRTNPFGRQILMAGLLSVSWHMNQRDLQVSSLGHNMSQALGGRDKWRGTLMRAFDAWKTEFDKSLQHSNSTFDPYTSDKRTDGNFVFESRTVLHHLAHMAMHVDIVDCQIFARAKRLLGRAIGTQDLNSAQRRMKDHWAPSARARDATFYAAKFLCSVLLDDVQIRPSDQYSQPDEPMYCARDDVLLNRPWVLYFAALVVWCYGFAVAGPCPDKPVPGTAVEKRAEMRSYLHKLGSIQTPDDLKFMKGVNNSSALLAVLKDSFASTRWELLHEGATLLDNCIQLNSGNPL

SEQ ID NO: 8278 - DNA, 4496 bp, Muscodor strobelii
  misc_feature: SGI EST ID NO. CUFF.20276.2
  misc_feature: Variant of the nucleotide sequence at SEQ ID NO 8276
caagcggaatctattccaagtcaggttgtacgacacaaaacggagttctcgagctgaggagcacagcaacccaaagtcggagagcaaagccatattggacaccaaacttatccgaattcgcctgagctatccagaccccagttggacaggctcatggacccaaggaatcataacagcacttgaaaacagtcggagaaaaagaaagagagatggattgcccccactccaaccttggaagcctggtcccttcctggggcatagggaatttgacgcattcgcgatttttcttaacttttaaacgacggcgcaacagaaatatgaaccctcaagctcgtcaagtctagacgccttttgttgacagtcaatcagtattcgcttccatcgtggcctacgatactgctgtctaaactctatcttctccagaaccatacccagacaggcgcaccgcgcttcacttcgttcacgatctgatcaattgacgagtggtctccgaagactgcctgtgctagaggcgagtgctaatcactcataccgaagacaacacattgcgtcgccttgtgcgtgagagttgtgtgttccccgtggatcttgtggatggcctcttcttctctactttgataccgcacatcgcatatcgcatcgccgccaccaccacgacgcacttgttgcctaatggtcgcatgtagttagccgcggaatcgcttgttcgattgctattagtcatgtgctgagtgacttgtcacgctatccatgttaaggccgcttcacaggtcactaacgccaagactatttcgaactgttcatattgaacaacacgcctggcgtctcttctgcctcgcctgtcctcgtacttcccttgtcggagtgggagacgcatccccggactttctgacattgcgacggacgtgcaggctttccccagattgtgttacctgttgctcattggtccgcgtcgcccaactaagtatacatctacgttgattgcgcctccacagactctgattcagtcttgtaccggatcgtgcttggttggctacgtggaaatccgattcttcgattaatgtgcttgtcttgtcgaatcaccatgcaaattattggaacatgacttctgtccttgctatccagcccagagacataaggtcttccctacctcccactcatccgttttccgccatgacacaaccacggaggcagtcgccgtcccgcatcaagtcggaggacagagctgagccctcaccccagtcgaacaagccgagagactttgaactggaagataatgaaagtgatcatgatggagatggggacaacaagcatgagacgtcgtcgaatgacgagggtccgattagaaagcgtagacgaagtcggaaagggcttgataagaagttcgagtgtccaaccgaaggatgcggcaaaagctactcaagagcagaacatctacaccgccatcagctgaaccatacaccgaagcagatttatagatgcgacttccaggactgcaatcgtcaattcgtccgcctcgatctatgtaaccgccacaaggatcgccataccgcgaaagggtccgcgttgagccggaaggattctctgataagtcaaagctctccggtcgacaacgtaagatctccgtaccctacccccgcttcgacgacaatgtcgcccaagcacagtacaccgggaaatagtgccttgaaaacagaacacccagctcaccttcagtatcagtcaccgaaggacggtgttggcgccccttacacacctatcacaaacacatctcctgccactttccctcagttaaatgaggggtacatgcacaccgatcaagatacgggatatagcacaagactgcaacaccaatctccttccggccaaatgcaccgatctcatgtgcagagaaataccagcgcatatggagtcatgtcacctgtttcggctcacccgggaagttatcacctgcagccaacccacacccctcaatcggccccaacaataccgtacgtcgcgccgaacaactttccagctttcacactgccgccatcaggatttgcgacaactgccggtgtgaatatgagtagtccttccgctccacactatgcgagtacaacaagcgagtacggcgagcaatcacatgatcaatcatcgatagacctgatgcagttggatcaaatgacagcccaggccacgatgccggtgtttggtcccgacggggtcctgaacaagtcgccctatatttcgattcccgaagactttgtggcttacttgttcaacacaaccgcccctgatacttctcctcaatcggtgccccattttatacaacggagccaatactctagttatggcgaacatgcaaatcagtacaacatgccatacccgggagccgatagcgtccctcttggttatttcccacccggcgggcaacctcagcaagttttggcagtcacgaatctcctcgacccagatttacctgagtctattctctccgaagacaagagccaggaactgttcgaccttatcaaagaaaggttccacgaaaacgaccatgctcctgttgaacgccagggagaaaatctcctcgaaggcgacagaagcaacgatagccacatgttaagtcgtaaaatgatgcagcattatattggttcctactggttacatttcagtgaccaagtaccgatactgcacaaacctacgttttcgcccgataggaccccgaatcttcttctcatagctgtgatggctattggtgcggcatgtttagatcgcagctacagtcctaaaatcacgcaagctggcgcacagctctcaaactttctagcttggaacttgagatggcaagttttcatgaacgtcaactcgcgtccgcccgcaaagctatggatattccagacaatgttgctcttagagctatacgaaaagatgtactcgacacgagagcttcacgaaagggctcatatccatcatgcaacaactatcaccctcatgcgaagaggtcgctcgctgattggcaagtcagcactggactctccagctagtgctcgtgacgagagatctacaagtgctggatctcgacattcctctacatctggcccggctcacactccggacgaatggtggaatcaatggattacaaccgaaagtaccagacgtgccgccttcgcagcttttttaatcgattccatacatgcaacgatgtttgggcactcaacagtgatggtggcgcatgaaatgcgtcttcccttgccatgcgacgatcagctctggaaagcaacaagcggcgccgaagttggtcggatagaatccaatttactctcgaacggcatcaaagccatgccattcctcgaggggcttaagcggacacttgccggacacgaggttcgcacaaatccttttggccggcaaatattaatggcaggattattaagtgttagctggcacatgaatcagcgtgacttacaggtgagctctctgggtcataacatgtcacaagcgcttgggggccgggacaaatggcgaggtaccttaatgagagcattcgacgcctggaaaaccgagttcgacaagtcgcttcagcattccaattcgacgttcgatccgtatacttcagataagcggaccgatggaaattttgtgttcgaaagccgtacggtattgcatcatctagctcacatggccatgcacgtggatattgtcgattgtcaaatttttgctcgcgcaaagcgattgcttggccgagcgatcggtacgcaagacctgaatagtgcgcaaaggagaatgaaagaccactgggctccgtctgctagggcccgagatgcgacgttttacgcagcaaaattcttatgttccgttctactcgacgatgttcaaatcagaccatctgatcagtatagtcaaccggacgagccgatgtattgcgctcgagacgacgtactcctgaaccgaccgtgggttctctatttcgcggcactggtggtctggtgctatggatttgctgtggcgggaccttgtccggacaaacctgttcctggcacggccgtggagaagcgtgcagagatgcgcagctatttgcacaaactcggttcaatacaaacacccgatgatctcaagttcatgaagggcgtgaataatagcagtgctctcttggcggttttgaaggattcgttcgcgtcgacccgttgggagctgcttcacgaaggggccacattattggataactgtatccaactcaatagtggaaaccccttatgaacgactgtattacgtgatctgtttaaattctgctggcttttggtatcaaatacttttgtataatttccaccttggaagaggcgattcattgacgtattgaaagcgttcagcatgttttggatcattgatgtgtatatacacgctcgcatttccgctatatacccctacgaagcaatgagattatgcgagctgctgcaatttatatattagcaagttatgcgactgtatagcactaattcagagaaaatcgattcttg

SEQ ID NO: 8279 - DNA, 1401 bp, Muscodor strobelii
  misc_feature: SGI cDNA ID NO. 562541
  misc_feature: Encodes the peptide sequence at SEQ ID NO 8280
atgagtatagaatcttccgatcgcattcatacctcgtacctagcggcagaaaagcgctatatagctgcaaacccagcaagccgtaccgctcacgaaacagcgacgacgagtttgccaggcgggaacacccgctcggtcctacattgggcgccatatccggtgtacatcacgtccgcggatggctacacgcttcatgatgccgatgggcacgaatatgtagatctccttggggaattctctgcgggtatctacggacactctcacccagctatcatttccgcgattacttcgactcttcagcgcgggataagctatggagggccgcatgctgccgaggctaaattggccaggttgatacaagagcgttttgcgagtatcgaacaggttcgctttactaactcgggaaccgaggctacactgatggcggttggggccgcaaaggcgttcacgcggaaaccacgtggaaagatcttggtctttgagggaggttatcacggaggtgtctttcttttccctccaggttgtaaaaacgcctggacacaaaagagcggcgatgcgaaggaggatggcggcgagcatgaaggtctcgttgctctgaatgcgccccatgattaccttgtggcaacgtacaatgatgctgcctcagtcgacgcccttatagcgtctgccgctagacccggaggcggcaacgacatcgctgcaatcttgctagaacctatgcttggctccggaggcggcatttgcgcaagagtcgagtttctcgcccatctccgtcgtcgtgctacggaaatcggcgcgttgctcatcttcgacgaggtcatgacgtctcgtatgtacaacggtggtggtattcaaggagaagttggcatccggccggacttgacaacgctcggtaaatacatcggtggtgggatgtcgttcggggctttcggcggccgaaaggaagtcatggcgctctttgatccgagagaaactaattttctgcgccatgctgggaccttcaacaataatgtgctcactatgaacgtgggcgctgttggtcttgagagtgtcttcactgaggcgaaagcgcgagagttgcataaactcggggatgaaatacgtggtaggatcaatggattgggatcgaggatcaaggtcttgggctgtggctcgattcttgctttgcattttacggacgtcgacattaagggtattcgatctccagcggactggaacgatgaggatccgaggttgttggatatatttcacctacagatgctacatcaggggttctacctcgctcgaagagggtttattacgcttaatttggtgtttcttgaggaggacggacgcaaagagcttgatcgttttgttacggctgttgagaagttcttagcggacttcaaggacatactatag

SEQ ID NO: 8280 - protein, 466 aa, Muscodor strobelii
  misc_feature: SGI Peptide ID NO. 562541
  misc_feature (55)..(393): Pfam Id: PF00202 Pfam Desc: Aminotransferase class-III
  misc_feature (55)..(166): Pfam Id: PF00202 Pfam Desc: Aminotransferase class-III
  misc_feature (229)..(275): Pfam Id: PF00202 Pfam Desc: Aminotransferase class-III
  misc_feature (289)..(334): Pfam Id: PF00202 Pfam Desc: Aminotransferase class-III
  misc_feature (20)..(466): NCBI GI: 187921070 Blast Desc: aminotransferase class-III [Burkholderia phytofirmans PsJN] gi|187719508|gb|ACD20731.1| aminotransferase class-III [Burkholderia phytofirmans PsJN]
  misc_feature (19)..(459): NCBI GI: 163793601 Blast Desc: aminotransferase class-III [alpha proteobacterium BAL199] gi|159181403|gb|EDP65918.1| aminotransferase class-III [alpha proteobacterium BAL199]
  misc_feature (24)..(466): NCBI GI: 170694106 Blast Desc: aminotransferase class-III [Burkholderia graminis C4D1M] gi|170140846|gb|EDT09019.1| aminotransferase class-III [Burkholderia graminis C4D1M]
  misc_feature (16)..(460): NCBI GI: 186470946 Blast Desc: aminotransferase class-III [Burkholderia phymatum STM815] gi|184197255|gb|ACC75218.1| aminotransferase class-III [Burkholderia phymatum STM815]
  misc_feature (5)..(466): NCBI GI: 239815384 Blast Desc: aminotransferase class-III [Variovorax paradoxus S110] gi|239801961|gb|ACS19028.1| aminotransferase class-III [Variovorax paradoxus S110]
  misc_feature (19)..(456): NCBI GI: 91787361 Blast Desc: glutamate-1-semialdehyde 2,1-aminomutase [Polaromonas sp. JS666] gi|91696586|gb|ABE43415.1| glutamate-1-semialdehyde 2,1-aminomutase [Polaromonas sp. JS666]
  misc_feature (15)..(466): NCBI GI: 189188966 Blast Desc: glutamate-1-semialdehyde 2,1-aminomutase [Pyrenophora tritici-repentis Pt-1C-BFP] gi|187972428|gb|EDU39927.1| glutamate-1-semialdehyde 2,1-aminomutase [Pyrenophora Pt-1C-BFP]
  misc_feature (1)..(466): NCBI GI: 212540434 Blast Desc: glutamate-1-semialdehyde 2,1-aminomutase, [Penicillium marneffei ATCC 18224] gi|210067671|gb|EEA21763.1| glutamate-1-semialdehyde 2,1-aminomutase, [Penicillium marneffei
  misc_feature (24)..(466): NCBI GI: 119392503 Blast Desc: beta-transaminase [Mesorhizobium sp. LUK]
  misc_feature (1)..(466): NCBI GI: 46108608 Blast Desc: FG01186.1 [Gibberella zeae PH-1]
  misc_feature (27)..(459): SWISSPROT Homolog: EC 5.4.3.8 Glutamate-1-semialdehyde 2,1-aminomutase
MSIESSDRIHTSYLAAEKRYIAANPASRTAHETATTSLPGGNTRSVLHWAPYPVYITSADGYTLHDADGHEYVDLLGEFSAGIYGHSHPAIISAITSTLQRGISYGGPHAAEAKLARLIQERFASIEQVRFTNSGTEATLMAVGAAKAFTRKPRGKILVFEGGYHGGVFLFPPGCKNAWTQKSGDAKEDGGEHEGLVALNAPHDYLVATYNDAASVDALIASAARPGGGNDIAAILLEPMLGSGGGICARVEFLAHLRRRATEIGALLIFDEVMTSRMYNGGGIQGEVGIRPDLTTLGKYIGGGMSFGAFGGRKEVMALFDPRETNFLRHAGTFNNNVLTMNVGAVGLESVFTEAKARELHKLGDEIRGRINGLGSRIKVLGCGSILALHFTDVDIKGIRSPADWNDEDPRLLDIFHLQMLHQGFYLARRGFITLNLVFLEEDGRKELDRFVTAVEKFLADFKDIL

SEQ ID NO: 8281 - DNA, 1869 bp, Muscodor strobelii
  misc_feature: SGI EST ID NO. CUFF.20215.0
  misc_feature: Variant of the nucleotide sequence at SEQ ID NO 8279
gtgctcaccccagctgcatacagtcttcaactccaaacccaaatgtgaaagcctcctcctgaccaatacaaaataagacagacccttgtcggcaagataaagatataacgagtcacagctaccatcatgagtatagaatcttccgatcgcattcatacctcgtacctagcggcagaaaagcgctatatagctgcaaacccagcaagccgtaccgctcacgaaacagcgacgacgagtttgccaggcgggaacacccgctcggtcctacattgggcgccatatccggtgtacatcacgtccgcggatggctacacgcttcatgatgccgatgggcacgaatatgtagatctccttggggaattctctgcgggtatctacggacactctcacccagctatcatttccgcgattacttcgactcttcagcgcgggataagctatggagggccgcatgctgccgaggctaaattggccaggttgatacaagagcgttttgcgagtatcgaacaggttcgctttactaactcgggaaccgaggctacactgatggcggttggggccgcaaaggcgttcacgcggaaaccacgtggaaagatcttggtctttgagggaggttatcacggaggtgtctttcttttccctccaggttgtaaaaacgcctggacacaaaagagcggcgatgcgaaggaggatggcggcgagcatgaaggtctcgttgctctgaatgcgccccatgattaccttgtggcaacgtacaatgatgctgcctcagtcgacgcccttatagcgtctgccgctagacccggaggcggcaacgacatcgctgcaatcttgctagaacctatgcttggctccggaggcggcatttgcgcaagagtcgagtttctcgcccatctccgtcgtcgtgctacggaaatcggcgcgttgctcatcttcgacgaggtcatgacgtctcgtatgtacaacggtggtggtattcaaggagaagttggcatccggccggacttgacaacgctcggtaaatacatcggtggtgggatgtcgttcggggctttcggcggccgaaaggaagtcatggcgctctttgatccgagagaaactaattttctgcgccatgctgggaccttcaacaataatgtgctcactatgaacgtgggcgctgttggtcttgagagtgtcttcactgaggcgaaagcgcgagagttgcataaactcggggatgaaatacgtggtaggatcaatggattgggatcgaggatcaaggtcttgggctgtggctcgattcttgctttgcattttacggacgtcgacattaagggtattcgatctccagcggactggaacgatgaggatccgaggttgttggatatatttcacctacagatgctacatcaggggttctacctcgctcgaagagggtttattacgcttaatttggtgtttcttgaggaggacggacgcaaagagcttgatcgttttgttacggctgttgagaagttcttagcggacttcaaggacatactatagggccaagaagagaccctggacattacaacgaggaggatatagtagatgctcttgtcttcaaacgcattttatgcccttaagcttttccgaaggcgacatcactatttgaccggagatcaatcggggtaggcgagatttttaacagtttgactttactatattgtgtctgtctgtacataatccttacgcccgaagcgccatcgaggatatgagtacatacgagatcagacatcgtcaaaagttatttgagctgtttgtttccatttgcttgactatcaaccttcgagttttatcattagtctttcaagtggtatacttcctaatcgtgaatgtcaacgcaaa

SEQ ID NO: 8282 - DNA, 1095 bp, Muscodor strobelii
  misc_feature: SGI cDNA ID NO. 562542
  misc_feature: Reduced expression when VOC is produced
  misc_feature: Encodes the peptide sequence at SEQ ID NO 8283
atggccgaattcatacgagcccagatcttcggcaccaccttcgagatcacttccagatactcggacctccagcctgtgggcatgggagcttttgggctggtttgctccgccagagaccagctcacgaaccaaaatgtcgctgtcaagaagatcatgaagcccttcagtaccccagtcttagccaagagaacataccgcgagctcaagctgctgaagcatcttcggcacgagaatgtcatctcgctcagcgacatcttcatctctcccctcgaagacatctactttgttacagagctcttgggcaccgacttacaccggctgctgacttcccggccgttggagaagcagttcatccaatacttcttgtaccaaatcatgcgcggtctgaaatatgttcattctgctggtgttgtccatcgtgatctgaaacctagcaacattcttgtcaacgaaaactgcgacttgaaaatctgtgactttggtctggccagaatccaagatcctcaaatgactggctatgtatccacgagatactaccgtgctcccgaaatcatgcttacatggcagaaatacgacattgaagtcgacatctggagtgcaggctgtatcttcgccgaaatgctcgagggcaagcctctgttccccggaaaggaccacgttaaccagttctctatcatcactgaactactcgggaccccacctgacgatgttataaacaccattgccagcgaaaatacgttgagatttgtaaaatcactaccgaagagagagcgacagccattgaagaacaagttcaagaacgctgattcttcagccattgatttgctggagaagatgcttgtgtttgatcctaagaagcgaatcacagcagcagaggcgcttgccgacgagtatttggctccgtaccatgaccctaccgatgagcctgttgccgaggagaagttcgactggagcttcaatgatgccgatttgcctgttgatacgtggaagatcatgatgtactcggaaattcttgactaccacaaccttgagaacaatcttcaagcagcagaggcacaagcacaagcgcaggccctgcaagcgaacggccactaa

SEQ ID NO: 8283 - protein, 364 aa, Muscodor strobelii
  misc_feature: SGI Peptide ID NO. 562542
  misc_feature (20)..(299): Pfam Id: PF00069 Pfam Desc: Protein kinase domain
  misc_feature (20)..(164): Pfam Id: PF07714 Pfam Desc: Protein tyrosine kinase
  misc_feature (1)..(357): NCBI GI: 74696001 Blast Desc: HOG1_GLOLA RecName: Full=Mitogen-activated protein kinase HOG1; Short=MAP kinase HOG1; AltName: Full=MAP kinase OSC1 gi|42627725|dbj|BAD11137.1| mitogen-activated protein kinase
  misc_feature (1)..(348): NCBI GI: 164424462 Blast Desc: mitogen-activated protein kinase sty1 [Neurospora crassa OR74A] gi|74697884|sp|Q96TL5.1|HOG1_NEUCR RecName: Full=Mitogen-activated protein kinase hog-1; Short=MAP kinase
  misc_feature (1)..(357): NCBI GI: 39952359 Blast Desc: mitogen-activated protein kinase sty1 [Magnaporthe grisea 70-15] gi|74698473|sp|Q9UV51.1|HOG1_MAGGR RecName: Full=Mitogen-activated protein kinase HOG1; Short=MAP kinase MAP
  misc_feature (1)..(357): NCBI GI: 148886843 Blast Desc: mitogen-activated protein kinase sty1 [Magnaporthe grisea 70-15] gi|74698473|sp|Q9UV51.1|HOG1_MAGGR RecName: Full=Mitogen-activated protein kinase HOG1; Short=MAP kinase MAP
  misc_feature (1)..(353): NCBI GI: 256727606 Blast Desc: [Nectria haematococca mpVI 77-13-4]
  misc_feature (1)..(351): NCBI GI: 74691305 Blast Desc: HOG1_BEABA RecName: Full=Mitogen-activated protein kinase HOG1; Short=MAP kinase HOG1; AltName: Full=Bbhog1 gi|45826465|gb|AAS77871.1| mitogen-activated protein kinase
  misc_feature (1)..(357): NCBI GI: 74691450 Blast Desc: HOG1_TRIAT RecName: Full=Mitogen-activated protein kinase hog1; Short=MAP kinase hog1; AltName: Full=MAP kinase tmk3 gi|37907667|gb|AAP48614.1| MAP kinase TMK3 [Trichoderma
  misc_feature (1)..(345): NCBI GI: 121808018 Blast Desc: HOG1_TRIHA RecName: Full=Mitogen-activated protein kinase hog1; Short=MAP kinase hog1; AltName: Full=ThHog1; AltName: Full=Osmotic stress MAP kinase MAP kinase Osm1 [Hypocrea
  misc_feature (1)..(357): NCBI GI: 171683557 Blast Desc: protein product [Podospora anserina] gi|170941738|emb|CAP67392.1| protein product [Podospora anserina]
  misc_feature (1)..(353): NCBI GI: 158633421 Blast Desc: stress-activated MAP kinase [Epichloe festucae]
  misc_feature (1)..(341): SWISSPROT Homolog: EC 2.7.11.24 Mitogen-activated protein kinase
  misc_feature: Useful for introducing or modulating the production of volatile compounds
MAEFIRAQIFGTTFEITSRYSDLQPVGMGAFGLVCSARDQLTNQNVAVKKIMKPFSTPVLAKRTYRELKLLKHLRHENVISLSDIFISPLEDIYFVTELLGTDLHRLLTSRPLEKQFIQYFLYQIMRGLKYVHSAGVVHRDLKPSNILVNENCDLKICDFGLARIQDPQMTGYVSTRYYRAPEIMLTWQKYDIEVDIWSAGCIFAEMLEGKPLFPGKDHVNQFSIITELLGTPPDDVINTIASENTLRFVKSLPKRERQPLKNKFKNADSSAIDLLEKMLVFDPKKRITAAEALADEYLAPYHDPTDEPVAEEKFDWSFNDADLPVDTWKIMMYSEILDYHNLENNLQAAEAQAQAQALQANGH

SEQ ID NO: 8284 - DNA, 2222 bp, Muscodor strobelii
  misc_feature: SGI EST ID NO. CUFF.20484.4
  misc_feature: Variant of the nucleotide sequence at SEQ ID NO 8282
ctactacaccgcacccgctctgctctgctgtcctctggcctgcccagctttctacctgcactcctttccactccccctacctaattgtgactctcccactctgagattgctcggaacattctcgtccagactgtctactgtctcttcgcatctctgattgcgcagcacatacatatcgtacgccgtcattcactacagcactcacttttgcagcagccgctgtgttaggcccgagtcacagacgacccctcgctcccgcgtccgactgactcgtctctttcagcttttctgcctccgcgcaccaacaatcctcctcctacatactcttgttcctctttgccgtcctttctgcccccgtctctcacagccgacaccatggccgaattcatacgagcccagatcttcggcaccaccttcgagatcacttccagatactcggacctccagcctgtgggcatgggagcttttgggctggtttggtatgtcgcaactgccaaacaccgcttcgccatcgcagcgatcgcgcaagactgaccacaagctgatgcacatgcagctccgccagagaccagctcacgaaccaaaatgtcgctgtcaagaagatcatgaagcccttcagtaccccagtcttagccaagagaacataccgcgagctcaagctgctgaagcatcttcggcacgagaatgtcatctcgctcagcgacatcttcatctctcccctcgaagacatctactttgttacagagctcttgggcaccgacttacaccggctgctgacttcccggccgttggagaagcagttcatccaatacttcttgtaccaaatcatgcgcggtctgaaatatgttcattctgctggtgttgtccatcgtgatctgaaacctagcaacattcttgtcaacgaaaactgcgacttgaaaatctgtgactttggtctggccagaatccaagatcctcaaatgactggctatgtatccacgagatactaccgtgctcccgaaatcatgcttacatggcagaaatacgacattgaagtcgacatctggagtgcaggctgtatcttcgccgaaatgctcgagggcaagcctctgttccccggaaaggaccacgttaaccagttctctatcatcactgaactactcgggaccccacctgacgatgttataaacaccattgccagcgaaaatacgttgagatttgtaaaatcactaccgaagagagagcgacagccattgaagaacaagttcaagaacgctgattcttcagccattgatttgctggagaagatgcttgtgtttgatcctaagaagcgaatcacagcagcagaggcgcttgccgacgagtatttggctccgtaccatgaccctaccgatgagcctgttgccgaggagaagttcgactggagcttcaatgatgccgatttgcctgttgatacgtggaagatcatgatgtactcggaaattcttgactaccacaaccttgagaacaatcttcaagcagcagaggcacaagcacaagcgcaggccctgcaagcgaacggccactaaagcaaacctacctattggatttgttctcattatcgaagaccttgagatacagcgatgataccacaacctaacctaccgatatgtgcaccgcccaaacatgaacatgggcttcggattcttttcaggcgttatgagagggcacgaaaggttcaacagctttttgcgagtccagtattgattagccttcgctgggtcgacgcgcatacatgtttttagaacaattataaaacgcacgcaatccaaaatggatctgctgcgataatgaactgcgcaaggaatatcctgcttggcaggttgtcagttttctgtccacttactcaaggaggacgagaccagatcaggcgaaagagtaatcaagggggttggaaggaggacgcacatcatgtacggcgcctggtgtcaatggcggaagacaggcaggaatgtattcttttcttccggattgcgaaattaaaatacttcagtcttccaagagacgagaggggcaaaaaagcaattgcgactcgatcgcgaaaccaaagaccgagaatgattcccattttgaatgaaaatataccattgagcggtctatgtcttatccacgtaggatttataggatttatctacctatgctttggtaaagctcttaagagagtacctcagcacacagaaatgccaggaggatgcgcttgggcg

SEQ ID NO: 8285 - DNA, 1098 bp, Muscodor strobelii
  misc_feature: SGI cDNA ID NO. 562543
  misc_feature: Encodes the peptide sequence at SEQ ID NO 8286
atggccgaattcatacgagcccagatcttcggcaccaccttcgagatcacttccagatactcggacctccagcctgtgggcatgggagcttttgggctggtttgctccgccagagaccagctcacgaaccaaaatgtcgctgtcaagaagatcatgaagcccttcagtaccccagtcttagccaagagaacataccgcgagctcaagctgctgaagcatcttcggcacgagaatgtcatctcgctcagcgacatcttcatctctcccctcgaagacatctactttgttacagagctcttgggcaccgacttacaccggctgctgacttcccggccgttggagaagcagttcatccaatacttcttgtaccaaatcatgcgcggtctgaaatatgttcattctgctggtgttgtccatcgtgatctgaaacctagcaacattcttgtcaacgaaaactgcgacttgaaaatctgtgactttggtctggccagaatccaagatcctcaaatgactggctatgtatccacgagatactaccgtgctcccgaaatcatgcttacatggcagaaatacgacattgaagtcgacatctggagtgcaggctgtatcttcgccgaaatgctcgagggcaagcctctgttccccggaaaggaccacgttaaccagttctctatcatcactgaactactcgggaccccacctgacgatgttataaacaccattgccagcgaaaatacgttgagatttgtaaaatcactaccgaagagagagcgacagccattgaagaacaagttcaagaacgctgattcttcagtagccattgatttgctggagaagatgcttgtgtttgatcctaagaagcgaatcacagcagcagaggcgcttgccgacgagtatttggctccgtaccatgaccctaccgatgagcctgttgccgaggagaagttcgactggagcttcaatgatgccgatttgcctgttgatacgtggaagatcatgatgtactcggaaattcttgactaccacaaccttgagaacaatcttcaagcagcagaggcacaagcacaagcgcaggccctgcaagcgaacggccactaa

SEQ ID NO: 8286 - protein, 365 aa, Muscodor strobelii
  misc_feature: SGI Peptide ID NO. 562543
  misc_feature (20)..(300): Pfam Id: PF00069 Pfam Desc: Protein kinase domain
  misc_feature (20)..(164): Pfam Id: PF07714 Pfam Desc: Protein tyrosine kinase
  misc_feature (1)..(358): NCBI GI: 74696001 Blast Desc: HOG1_GLOLA RecName: Full=Mitogen-activated protein kinase HOG1; Short=MAP kinase HOG1; AltName: Full=MAP kinase OSC1 gi|42627725|dbj|BAD11137.1| mitogen-activated protein kinase
  misc_feature (1)..(349): NCBI GI: 164424462 Blast Desc: mitogen-activated protein kinase sty1 [Neurospora crassa OR74A] gi|74697884|sp|Q96TL5.1|HOG1_NEUCR RecName: Full=Mitogen-activated protein kinase hog-1; Short=MAP kinase
  misc_feature (1)..(358): NCBI GI: 148886843 Blast Desc: mitogen-activated protein kinase sty1 [Neurospora crassa OR74A] gi|74697884|sp|Q96TL5.1|HOG1_NEUCR RecName: Full=Mitogen-activated protein kinase hog-1; Short=MAP kinase
  misc_feature (1)..(358): NCBI GI: 39952359 Blast Desc: mitogen-activated protein kinase sty1 [Magnaporthe grisea 70-15] gi|74698473|sp|Q9UV51.1|HOG1_MAGGR RecName: Full=Mitogen-activated protein kinase HOG1; Short=MAP kinase MAP
  misc_feature (1)..(354): NCBI GI: 256727606 Blast Desc: [Nectria haematococca mpVI 77-13-4]
  misc_feature (1)..(352): NCBI GI: 74691305 Blast Desc: HOG1_BEABA RecName: Full=Mitogen-activated protein kinase HOG1; Short=MAP kinase HOG1; AltName: Full=Bbhog1 gi|45826465|gb|AAS77871.1| mitogen-activated protein kinase
  misc_feature (1)..(358): NCBI GI: 74691450 Blast Desc: HOG1_TRIAT RecName: Full=Mitogen-activated protein kinase hog1; Short=MAP kinase hog1; AltName: Full=MAP kinase tmk3 gi|37907667|gb|AAP48614.1| MAP kinase TMK3 [Trichoderma
  misc_feature (1)..(354): NCBI GI: 158633421 Blast Desc: stress-activated MAP kinase [Epichloe festucae]
  misc_feature (1)..(358): NCBI GI: 171683557 Blast Desc: protein product [Podospora anserina] gi|170941738|emb|CAP67392.1| protein product [Podospora anserina]
  misc_feature (1)..(346): NCBI GI: 121808018 Blast Desc: HOG1_TRIHA RecName: Full=Mitogen-activated protein kinase hog1; Short=MAP kinase hog1; AltName: Full=ThHog1; AltName: Full=Osmotic stress MAP kinase MAP kinase Osm1 [Hypocrea
  misc_feature (1)..(342): SWISSPROT Homolog: EC 2.7.11.24 Mitogen-activated protein kinase
MAEFIRAQIFGTTFEITSRYSDLQPVGMGAFGLVCSARDQLTNQNVAVKKIMKPFSTPVLAKRTYRELKLLKHLRHENVISLSDIFISPLEDIYFVTELLGTDLHRLLTSRPLEKQFIQYFLYQIMRGLKYVHSAGVVHRDLKPSNILVNENCDLKICDFGLARIQDPQMTGYVSTRYYRAPEIMLTWQKYDIEVDIWSAGCIFAEMLEGKPLFPGKDHVNQFSIITELLGTPPDDVINTIASENTLRFVKSLPKRERQPLKNKFKNADSSVAIDLLEKMLVFDPKKRITAAEALADEYLAPYHDPTDEPVAEEKFDWSFNDADLPVDTWKIMMYSEILDYHNLENNLQAAEAQAQAQALQANGH

SEQ ID NO: 8287 - DNA, 2222 bp, Muscodor strobelii; identical to SEQ ID NO: 8284
  misc_feature: SGI EST ID NO. CUFF.20484.4
  misc_feature: Variant of the nucleotide sequence at SEQ ID NO 8285

SEQ ID NO: 8288 - DNA, 2652 bp, Muscodor strobelii
  misc_feature: SGI cDNA ID NO. 562544
  misc_feature: Elevated expression when VOC is produced
  misc_feature: Encodes the peptide sequence at SEQ ID NO 8289
atgtcttcgacgcagcgtagcgtacccctcagagagagacgcccgtctatgggcgctcctatcgtcgacattataggctcagtggggccggctggcatttctcgacccaagcataagcgaacattcactggttttggtgctggtgaaatcaagagcgttgaggcttcgatccccgagcctcaacgagaagcgtggaccaagcatgagttcacggccttccagaacaaagacgaatttgagagagaggttgtccggcatgtcgaaaccacgctggctcgaagtatattcaactgtgacgagacggcagcgtatgcggccgccagtctggctctccgcgattgcctgatcaagaagtggaacaagacacagcagcgccagacattcaccgatagtaaacgtgtctactatctcagcttagaattcttaatgggtcgtgcttttgacaatgctatgctgaacatcaaggccaaggacattgccaaagagggactcgaggagctgggtttccgtatcgaggacatcatcgggcaagagcacgatgccgccctgggcaatggtgggcttggaagactggcggcatgcttccttgatagcatggcctctttgaactatcctgcatggggctacggcttgaggtatcgttatggtatcttcaaacaggagataattgacggttatcaagtcgaagttcccgactactggcttgatttcaatccctgggagtttccaagacatgatgtgaccgttgatattcaattctacggtaatgtccgcaagattcaggacgaaaatggcaaaactgttgctcattgggaagggggcgacactgtcactgctgtcgcatacgacgttcccactcccggatatgataccccgtcaaccaacaatctgaggctgtggtccagcaaggcagccagcggcgagtttgactttcagaaattcaatagtggagactatgaaagctcagtggccgatcaacaaagagccgaaacaatcagtgctgtcctataccccaatgataatctagatcgaggaaaggagttgcgtctcaagcagcagtatttctgggttgctgcttcgctgtacgatattgtacgccgcttcaagaagtccaagcgtgcgtggaaggagttccccgaccaagttgcgatccagctcaacgatacgcacccgacgctagccatcgtcgagcttcaacgcatcttggtcgacgttgagggtcttgagtgggatgaggcatggagcattgtgacaggaacgttcggctacacgaaccacacagtgctccccgaagccttggagaaatggcccgtcggcttggtacagcatttgcttcctcgacatttgcagatcatttacgacatcaatctcttcttccttcagtctgttgaaaagcaattccccgatgatcgcgatcttttaggccgagtctccatcattgaagagtcgcagccaaagatggtccgcatggcattcttggctgttgttgggtcacataaggtcaacggtgttgcggagcttcattccgacttaatccagacaactattttcaaagactttgtctcagtattcggtgctgacaagttcaccaatgtcacgaacggcattacgcccagacggtggctacaccaagccaaccctcgactctccgagctcattgcgagcaagactggtggtcatgacttcttgaaagaccttactcttctgaacaagctcgagttgtctattgacgataaggatttccgaaaagagtgggctgaaattaagtttgcgaacaaagtcaaactcgcgaagtacatcaaatctacgctggacatcaacatcaatcctgcggctttgtttgacgtccaagtcaaaagaatccacgaatacaagcgacagcaactcaacatattcggtgcaatccaccgatacctgtcactcaaagcaatgagccctgaagagaggaagaaacagcaaccgcgtgtttcgatatttggtggaaaagccgcacctgggtactggatggccaaacaaattattcacttgatcaacagtgttggcagcgttgtcaataacgatccagatattggagatttgctgaaggtcatctttctagaagattacaatgtgagcaaggctgaaatgattatccctgcctcagatctgagcgaacacatctccactgctggcacagaggcttctggaacaagcaacatgaaattcgtgttaaacggcggcctgatcattggaacatgtgatggtgccaacattgaaattactcgtgaaatcggccaggacaatattttcctgtttggtactctgtcggaagatgttgaagaccttcgacactcgcacacatacgggcagcattcagttgatcctggtctggccaaggtgttcgatgccattcaaggtggtatgtttggcgaagctaatgacttcaatgccatgatatcggccgttcgtgatcatggtgactactacttggtatcagatgacttccagtcttacattgacacacacaagatggtcgacgaggagtatcagaaccaagaacagtgggttaccaagtgcatccggagtgtcgcgcgcatgggcttcttcagctcggatcgctgtatcaatgagtatgcagagggcatctggaatattgagccgctcgcagtgtag

SEQ ID NO: 8289 - protein, 883 aa, Muscodor strobelii
  misc_feature: SGI Peptide ID NO. 562544
  misc_feature (163)..(880): Pfam Id: PF00343 Pfam Desc: Carbohydrate phosphorylase
  misc_feature (79)..(883): NCBI GI: 19577353 Blast Desc: glycogen phosphorylase 1; glycogen phosphorylase [Aspergillus fumigatus] gi|42820694|emb|CAF32007.1| glycogen phosphorylase 1, [Aspergillus fumigatus]
  misc_feature (35)..(883): NCBI GI: 51556855 Blast Desc: glycogen phosphorylase-like protein [Dactylellina haptotyla]
  misc_feature (8)..(881): NCBI GI: 225678430 Blast Desc: glycogen phosphorylase [Paracoccidioides brasiliensis Pb03] gi|226290511|gb|EEH45995.1| glycogen phosphorylase [Paracoccidioides brasiliensis Pb18]
  misc_feature (11)..(883): NCBI GI: 115491885 Blast Desc: glycogen phosphorylase [Aspergillus terreus NIH2624] gi|114197430|gb|EAU39130.1| glycogen phosphorylase [Aspergillus terreus NIH2624]
  misc_feature (9)..(875): NCBI GI: 154271624 Blast Desc: glycogen phosphorylase [Ajellomyces capsulatus NAm1] gi|150409335|gb|EDN04785.1| glycogen phosphorylase [Ajellomyces capsulatus NAm1]
  misc_feature (81)..(883): NCBI GI: 238844579 Blast Desc: glycogen phosphorylase [Microsporum canis CBS 113480]
  misc_feature (80)..(883): NCBI GI: 67517628 Blast Desc: AN1015.2 [Aspergillus nidulans FGSC A4] gi|40746427|gb|EAA65583.1| AN1015.2 [Aspergillus nidulans FGSC A4]
  misc_feature (10)..(883): NCBI GI: 50555147 Blast Desc: YALI0F04169p [Yarrowia lipolytica] gi|49650852|emb|CAG77789.1| YALI0F04169p [Yarrowia lipolytica]
  misc_feature (35)..(882): NCBI GI: 254567900 Blast Desc: Non-essential glycogen phosphorylase required for the mobilization of glycogen, activity is regulate [Pichia pastoris GS115] gi|238030857|emb|CAY68780.1| Non-essential glycogen for of
  misc_feature (30)..(883): NCBI GI: 255731340 Blast Desc: glycogen phosphorylase [Candida tropicalis MYA-3404] gi|240131603|gb|EER31162.1| glycogen phosphorylase [Candida tropicalis MYA-3404]
  misc_feature (15)..(882): SWISSPROT Homolog: EC 2.4.1.1 Phosphorylase
  misc_feature: Useful for introducing or modulating the production of volatile compounds
MSSTQRSVPLRERRPSMGAPIVDIIGSVGPAGISRPKHKRTFTGFGAGEIKSVEASIPEPQREAWTKHEFTAFQNKDEFEREVVRHVETTLARSIFNCDETAAYAAASLALRDCLIKKWNKTQQRQTFTDSKRVYYLSLEFLMGRAFDNAMLNIKAKDIAKEGLEELGFRIEDIIGQEHDAALGNGGLGRLAACFLDSMASLNYPAWGYGLRYRYGIFKQEIIDGYQVEVPDYWLDFNPWEFPRHDVTVDIQFYGNVRKIQDENGKTVAHWEGGDTVTAVAYDVPTPGYDTPSTNNLRLWSSKAASGEFDFQKFNSGDYESSVADQQRAETISAVLYPNDNLDRGKELRLKQQYFWVAASLYDIVRRFKKSKRAWKEFPDQVAIQLNDTHPTLAIVELQRILVDVEGLEWDEAWSIVTGTFGYTNHTVLPEALEKWPVGLVQHLLPRHLQIIYDINLFFLQSVEKQFPDDRDLLGRVSIIEESQPKMVRMAFLAVVGSHKVNGVAELHSDLIQTTIFKDFVSVFGADKFTNVTNGITPRRWLHQANPRLSELIASKTGGHDFLKDLTLLNKLELSIDDKDFRKEWAEIKFANKVKLAKYIKSTLDININPAALFDVQVKRIHEYKRQQLNIFGAIHRYLSLKAMSPEERKKQQPRVSIFGGKAAPGYWMAKQIIHLINSVGSVVNNDPDIGDLLKVIFLEDYNVSKAEMIIPASDLSEHISTAGTEASGTSNMKFVLNGGLIIGTCDGANIEITREIGQDNIFLFGTLSEDVEDLRHSHTYGQHSVDPGLAKVFDAIQGGMFGEANDFNAMISAVRDHGDYYLVSDDFQSYIDTHKMVDEEYQNQEQWVTKCIRSVARMGFFSSDRCINEYAEGIWNIEPLAV

SEQ ID NO: 8290 - DNA, 3286 bp, Muscodor strobelii
  misc_feature: SGI EST ID NO. CUFF.20243.0
  misc_feature: Variant of the nucleotide sequence at SEQ ID NO 8288
gtttatgtggaagccaacagagcatctagcgcagtgcgtgcgttcgggtagttaatgctattgcctgctttgtcccacgtcgtcatcgtactttctgcatcctcgaaccgtctcgcattgtcctccccatccgatacagcactttcctactcctctatctctgctgtctatcacaccgcatttcttaagaagagataaatagtcttgcctgtctgctcgcctcaaacttgcctctttaccctccttatcctcatcaaattgacctcgacctgtcaaggctcgggtcaggcctcaactaccattaggcaagagatcttcttgatagaatcactatactctgagaatagatcgattatcaaccattctcagcatcggatatcagtgatcccaggtaaaatgtcttcgacgcagcgtagcgtacccctcagagagagacgcccgtctatgggcgctcctatcgtcgacattataggctcagtggggccggctggcatttctcgacccaagcataagcgaacattcactggttttggtgctggtgaaatcaagagcgttgaggcttcgatccccgagcctcaacgagaagcgtggaccaagcatgagttcacggccttccagaacaaagacgaatttgagagagaggttgtccggcatgtcgaaaccacgctggctcgaagtatattcaactgtgacgagacggcagcgtatgcggccgccagtctggctctccgcgattgcctgatcaagaagtggaacaagacacagcagcgccagacattcaccgatagtaaacgtgtctactatctcagcttagaattcttaatgggtcgtgcttttgacaatgctatgctgaacatcaaggccaaggacattgccaaagagggactcgaggagctgggtttccgtatcgaggacatcatcgggcaagagcacgatgccgccctgggcaatggtgggcttggaagactggcggcatgcttccttgatagcatggcctctttgaactatcctgcatggggctacggcttgaggtatcgttatggtatcttcaaacaggagataattgacggttatcaagtcgaagttcccgactactggcttgatttcaatccctgggagtttccaagacatgatgtgaccgttgatattcaattctacggtaatgtccgcaagattcaggacgaaaatggcaaaactgttgctcattgggaagggggcgacactgtcactgctgtcgcatacgacgttcccactcccggatatgataccccgtcaaccaacaatctgaggctgtggtccagcaaggcagccagcggcgagtttgactttcagaaattcaatagtggagactatgaaagctcagtggccgatcaacaaagagccgaaacaatcagtgctgtcctataccccaatgataatctagatcgaggaaaggagttgcgtctcaagcagcagtatttctgggttgctgcttcgctgtacgatattgtacgccgcttcaagaagtccaagcgtgcgtggaaggagttccccgaccaagttgcgatccagctcaacgatacgcacccgacgctagccatcgtcgagcttcaacgcatcttggtcgacgttgagggtcttgagtgggatgaggcatggagcattgtgacaggaacgttcggctacacgaaccacacagtgctccccgaagccttggagaaatggcccgtcggcttggtacagcatttgcttcctcgacatttgcagatcatttacgacatcaatctcttcttccttcagtctgttgaaaagcaattccccgatgatcgcgatcttttaggccgagtctccatcattgaagagtcgcagccaaagatggtccgcatggcattcttggctgttgttgggtcacataaggtcaacggtgttgcggagcttcattccgacttaatccagacaactattttcaaagactttgtctcagtattcggtgctgacaagttcaccaatgtcacgaacggcattacgcccagacggtggctacaccaagccaaccctcgactctccgagctcattgcgagcaagactggtggtcatgacttcttgaaagaccttactcttctgaacaagctcgagttgtctattgacgataaggatttccgaaaagagtgggctgaaattaagtttgcgaacaaagtcaaactcgcgaagtacatcaaatctacgctggacatcaacatcaatcctgcggctttgtttgacgtccaagtcaaaagaatccacgaatacaagcgacagcaactcaacatattcggtgcaatccaccgatacctgtcactcaaagcaatgagccctgaagagaggaagaaacagcaaccgcgtgtttcgatatttggtggaaaagccgcacctgggtactggatggccaaacaaattattcacttgatcaacagtgttggcagcgttgtcaataacgatccagatattggagatttgctgaaggtcatctttctagaagattacaatgtgagcaaggctgaaatgattatccctgcctcagatctgagcgaacacatctccactgctggcacagaggcttctggaacaagcaacatgaaattcgtgttaaacggcggcctgatcattggaacatgtgatggtgccaacattgaaattactcgtgaaatcggccaggacaatattttcctgtttggtactctgtcggaagatgttgaagaccttcgacactcgcacacatacgggcagcattcagttgatcctggtctggccaaggtgttcgatgccattcaaggtggtatgtttggcgaagctaatgacttcaatgccatgatatcggccgttcgtgatcatggtgactactacttggtatcagatgacttccagtcttacattgacacacacaagatggtcgacgaggagtatcagaaccaagaacagtgggttaccaagtgcatccggagtgtcgcgcgcatgggcttcttcagctcggatcgctgtatcaatgagtatgcagagggcatctggaatattgagccgctcgcagtgtagcagggatcggagaatcagtaacttaagctagaagtcttgccagggcgcatctagatgggattcgatcgtggaagtagaactcacagacaggtttgacggcccttaacctagagcacgaacaagcaagtagatgattacatcaagtatcattcgttatgagcaatgacctattatgatcctttgcttccaacataacgtgttacaatgactaatggaattatgctttctgccttacgat

SEQ ID NO: 8291 - DNA, 1071 bp, Muscodor strobelii
  misc_feature: SGI cDNA ID NO. 562545
  misc_feature: Encodes the peptide sequence at SEQ ID NO 8292
atgatgggcgcgtgcatgagctcgaataaggatgaggaggaacagaagaagagaagccaggctatcgaccgaggactcgatgaggatgccaagaagctgcggcgcgaatgcaaaatattattgctcggctccggcgaaagtgggaaatccaccattgtcaagcagatgaagattatacatctgaaaggctactccgatgaagaactatacaactatcgcgccactgttttcaagaatctggtcgagtgcgcaaaggccgtgattattgcaatggaccaattcgacatcgagccgagcaaccgaggaacgagcgactactgcgaatacctcctcggctacactgttgaatccggaccatctgcacacatagaacccaagatcggcttagctgtacaagctttgtggaatgacccgtgtattggacagctgatgcagcatgctaccgagttctacctgatggattctgccgaatacttcttcgacgaggtacagcgaatatgtgctttggactacttaccgaatgagatggatgtcctgcgcgcgcgaaccaaaacgaccggtatctacgaaactcgatttcaaatgggcgcgctcagcatacacatgtttgatgtaggtgggcagcggagcgaacggaagaagtggattcactgctttgaaaacgtcacatctatcattttctgcgttgctctgagtgagtatgatcaagttctacttgaagagagcagccagaaccgtatgatggagagcttactcctgttcgattcggtcgtcaattcgagatggttcatgcgcactagcatcatcttgttcctgaacaaggtcgatattttcaaagtgaaacttccaaggtcgccactagggaattattttccagactattccggtggaaacgacgtcaataaggcagccaagtacttgttgtggagattcaatcaagtaaacagagctcatctgaacctctatcctcacctgacacaagcaactgacacgtccaatattcgattggtatttgcggcggtcaaggagacgatcctcaacaatgcgcttaaggattctggcattttgtga

SEQ ID NO: 8292 - protein, 356 aa, Muscodor strobelii
  misc_feature: SGI Peptide ID NO. 562545
  misc_feature (9)..(355): Pfam Id: PF00503 Pfam Desc: G-protein alpha subunit
  misc_feature (2)..(356): NCBI GI: 145613189 Blast Desc: guanine nucleotide-binding protein alpha-3 subunit [Magnaporthe grisea 70-15] gi|145020322|gb|EDK04451.1| guanine nucleotide-binding protein alpha-3 subunit [Magnaporthe grisea
  misc_feature (1)..(356): NCBI GI: 2293542 Blast Desc: MAGA [Magnaporthe grisea]
  misc_feature (2)..(356): NCBI GI: 46136197 Blast Desc: GBA3_NEUCR Guanine nucleotide-binding protein alpha-3 subunit (GP3-alpha) [Gibberella zeae PH-1]
  misc_feature (2)..(356): NCBI GI: 52000516 Blast Desc: G-protein alpha subunit [Fusarium oxysporum] gi|216408349|gb|ACJ72864.1| G protein alpha subunit [Gibberella moniliformis]
  misc_feature (2)..(356): NCBI GI: 256727608 Blast Desc: [Nectria haematococca mpVI 77-13-4]
  misc_feature (2)..(356): NCBI GI: 21636308 Blast Desc: AF452097_1 G protein alpha subunit Tga3 [Trichoderma atroviride]
  misc_feature (2)..(356): NCBI GI: 116090716 Blast Desc: G-alpha protein subclass III [Hypocrea jecorina]
  misc_feature (2)..(356): NCBI GI: 261355861 Blast Desc: guanine nucleotide-binding protein alpha-3 subunit [Verticillium albo-atrum VaMs.102]
  misc_feature (2)..(356): NCBI GI: 563253 Blast Desc: guanine nucleotide regulatory protein [Cryphonectria parasitica]
  misc_feature (2)..(356): NCBI GI: 85106548 Blast Desc: guanine nucleotide-binding protein alpha-3 subunit [Neurospora crassa OR74A] gi|14285445|sp|Q9HFW7.1|GPA3_NEUCR RecName: Full=Guanine nucleotide-binding protein alpha-3 subunit;
  misc_feature (39)..(351): SWISSPROT Homolog: EC 3.1.3.16 Phosphoprotein phosphatase
MMGACMSSNKDEEEQKKRSQAIDRGLDEDAKKLRRECKILLLGSGESGKSTIVKQMKIIHLKGYSDEELYNYRATVFKNLVECAKAVIIAMDQFDIEPSNRGTSDYCEYLLGYTVESGPSAHIEPKIGLAVQALWNDPCIGQLMQHATEFYLMDSAEYFFDEVQRICALDYLPNEMDVLRARTKTTGIYETRFQMGALSIHMFDVGGQRSERKKWIHCFENVTSIIFCVALSEYDQVLLEESSQNRMMESLLLFDSVVNSRWFMRTSIILFLNKVDIFKVKLPRSPLGNYFPDYSGGNDVNKAAKYLLWRFNQVNRAHLNLYPHLTQATDTSNIRLVFAAVKETILNNALKDSGIL

SEQ ID NO: 8293 - DNA, 3400 bp, Muscodor strobelii
  misc_feature: SGI EST ID NO. CUFF.20280.0
  misc_feature: Variant of the nucleotide sequence at SEQ ID NO 8291
gcgggacatctcggaacagcttcagtgcctggcttcacagctgcccttagattgatccatttcatgcgcagcaagcagacagacgataattgacaatatgcatggctttcgcgggcacatgtactgacaaagctatcttgaatgacactcactgcatctgtaacgacccttcaaagacttgcatctccacgcacccgccctcgagtcgtgctgacacactgcattgcaaaaaccttttttcactcttccctgactcttattcgcctgtcgcttgccaaatctcaatttcccacgtgcatctagctgcatctctcaattgctggctactgggtcgagatttggaccggcatttcaacgtcattcacaccgacagattcttccgaagcttgtctcctacctaacttgtacatcggcctgtcttccccagccccggtttatcccatctttgcccccttgccattgatttgccattcaacattgtcgccgcggtcacggattcgagacttgaacaacagtctcgaggcagacagcagagtcgcacaagttctgagtcgggccagggagttcctacctccgcattgtctggctgccgctgtgtcgacacttgcacgctaagggcatgcagcgctgaacttaggaggttaaacacctgcgagtcagttcactttcttcacgacgaaccccggctttcctttctgtgcgtgcatcacgcacggcattcgatagcatcaacatcgcagcagcagcagcagcaatctacctatctgcctgcgcaggccagctatacaccataccgaggctcctcaccacgtcgccgtcgtacaggagccgactgccctctgttccgtgccttccagctcagccgaagcgcgcaccgaagctctccggcctagcttgttacccgccatcgcctgccgtcaccacgctgaactccctattgccatgtgccccaggccctcgatctggactatctgctcgagcaactagcccatatataaccagatcattgtcgctgcttgcgcactatcggctgtgtacacgggctcccgggacccgtgggatcatttcgcatgatgggcgcgtgcatgagctcgaataaggatgaggaggaacagaagaagagaagccaggctatcgaccgaggactcgatgaggatgccaagaagctgcggcgcgaatgcaaaatattattgctcggctccggcgaaagtgggaaatccaccattgtcaagcagatgaagattatacatctgaaaggctactccgatgaagaactatacaactatcgcgccactgttttcaagaatctggtcgagtgcgcaaaggccgtgattattgcaatggaccaattcgacatcgagccgagcaaccgaggaacgagcgactactgcgaatacctcctcggctacactgttgaatccggaccatctgcacacatagaacccaagatcggcttagctgtacaagctttgtggaatgacccgtgtattggacagctgatgcagcatgctaccgagttctacctgatggattctgccgaatacttcttcgacgaggtacagcgaatatgtgctttggactacttaccgaatgagatggatgtcctgcgcgcgcgaaccaaaacgaccggtatctacgaaactcgatttcaaatgggcgcgctcagcatacacatgtttgatgtaggtgggcagcggagcgaacggaagaagtggattcactgctttgaaaacgtcacatctatcattttctgcgttgctctgagtgagtatgatcaagttctacttgaagagagcagccagaaccgtatgatggagagcttactcctgttcgattcggtcgtcaattcgagatggttcatgcgcactagcatcatcttgttcctgaacaaggtcgatattttcaaagtgaaacttccaaggtcgccactagggaattattttccagactattccggtggaaacgacgtcaataaggcagccaagtacttgttgtggagattcaatcaagtaaacagagctcatctgaacctctatcctcacctgacacaagcaactgacacgtccaatattcgattggtatttgcggcggtcaaggagacgatcctcaacaatgcgcttaaggattctggcattttgtgatgtcgatactctgaccactcaaagttccttagtggacatacccttttttctatatgttggacgcacgatcgaagcattgggtcggagtttgggtggagttttgctatgttttattacttggccaggcgttcggaaccaacctgggtgttctggggggcttgtgcatgctaccatgcttgacgatactcgatttaccttgactaggatttatggcaaagggctgcgtatcgatacagatggcctttgaatgccctgagctttgcaccgcctacaggtgaaacaagactaccaagactcgccatatggtggaagcgtgatacttggtagcacaggactgggtcgcggtacgaatggtgttggacagatgaattggcgactgatgaatcaagagaaccagggcggatgatactgcattattcaagatgcaaatttgcagccgtgatgaaagtggcttgatacttgtcgaaacatggtttgtcaagcctattgttacttctgaggttgtagccatgttttgactctaatagatttgcagcaaccagctgagaattgaatcaattacctgctataattcctatctctacgaccaatgtggggacgaacaacagactataccaatgcttgaatccaaacctcgacatgaccttatgtattgccacaaggggcatgaaccacatggagcgtgtgtccaaaatcgaacgatggccccgaatatctgtatggtgattcaacgcgactagcaattgtcagacctcgtgatctttaaaccgtttcagtttgaagcaaataggcggatttattcccgagggtaacatcggaaaagcgcgatgacatcgacatgcgttggagaagtccatcaagcacatgggaaactggagcttgattaacacaagccggccagcataggcaaaggggccattcttgtcacttaatctgccgagctgtctatgactgcgccgcggtttcgggagagtctagacaggattaatgaccatagctggtagtaaacctcttgagcattcatctgatgtacgttgtcttacagcgcgtcaactgctaagtagtagttgcaagaaccctcagagtccattgggttggacttatcagtgagctgcatacatatggtcactcatgcatactagttgacgtcataaccatgtaatgaaacatcgagatcagtcgacaacggttcggaagctggtaaactaaggtctcttttgaaaatccaacatatcgggtttgttcctcccattgtaaag

SEQ ID NO: 8294 - DNA, 2628 bp, Muscodor strobelii
  misc_feature: SGI cDNA ID NO. 562546
  misc_feature: Encodes the peptide sequence at SEQ ID NO 8295
atggccgaagaaatagaccggctggtgctggcaccattcagagagattgtcgaaaagggcaaagcagctatcgaaaatgtcgagagcgctggcgacaatgcgccagctgagatgcttaaggcagcacaaaatcttgtgaaagagggtgaaaaggcgctgaagaggatcgaacctgtctcgactgcgcattacgaagaacatggcagcaactttgtcgatatggtaaaagacaatgccgagatcactcagtttcgctcggagctgaaagaactcctttgggacttcgacgactatgtcgatgtggacgaatttgacgcagaaaagtacgacgagctcaaaaaggcatccagaacagctgccccgcagatactggaaatcttaacgagaatgaggctgctgaacacgaggccgatatcaatctcttcacaaatcccgattctggatgtgatcaggacgccatctattggccatacatcacccgtgacatacgagcaaccgacgagtatgatcaatcattcaaaatcagaaagcgtcgagaggctgatagagcgtatagatgaacgcttggacgacattataggtgccagctctgatacagaagcaggattacgcgatgtgcgacgttccgagaatatggaaagccgtgcttctcattattcgcgcctgtctgatccaccttccgaacctctaccctctcctccgtctgcaaatccatggcaagttggaagagttccgatgaatatttcgaataagttccccgacaaaggaaacgactatgagcggcgacaaccagtgacgcctgattcgccaaccataccttcgacccaacttttgacccatgtacaaggtgcggaggggtcgagggctaggggaagcgaaagttgggctcatgaggatcaagatcgacgaatgcgcgctgcctcacagagccagggaactgaagggtcattgtcccccttgcaaagcaatcgctggacaaattctacacaaaactctgtcgagtccacgcgacgacccgcatcacgcactcatagtggtcaaggtcaaccgagtcgagcagcatcacaaccacaggacttagggattacttcaagtcaaccttctgaaaacaagaatctgaccataaacccaggctatcctccgagaacaacgtcagtggcaaatcaaagttcctcttcttatgttctctcatcgcgcaagccatcgactgagtccatcaacagttcggtctttgacgtcgtcgaatcgatgagcacaagccccgttgcctcggggcataggcaatccatacaatcgacgatgtctacatctacaaacacgcaatcccgtgctgggcctccacctcaatattcagggtattcaggtcccccaccactttaccaaaccccgtcaatacctcccagaagaccttcaggggtcacaattaaatctcagtcctccacccgcactgcgcaccctgctctcatgaacatggccatggacgagggcttaattccggtagatatggaagacactctgattaacgactccccaatgcctccccgagatcctgactgtgccattactccttcgagctctttcttcaaactgaagggcttctgccaaggtgcagaagaggcacggaaaggtcaactgggatttaaaaagattaagagaccagtcgggggattctctacggcaatcgtggcaaagtgcacgcattgtctctttgaacttgatttcaaggctgttgaaaacgacttgaacaacgactcgtcgggcaattttacatctaattcggtcggatttcgtttgcgaattctgcagaagtgtcatcttccgatacgtaacgttgaggagcagatgtatgcctgcatgttctgcattcagcaaggccacaccaatgaagaaagcgatgcaactgtcttcttcaaccagaaacagctatttgcacacattgcacgtcatccgcgaccactcccaaaggtgtcaggtatcactgtgattgagggccccagcgtccccgtttcactaagggacaattttgatatttggttggcacatccaccgacggagtccgtgatgattggcatttggagagagattgcacgccttccgtcagccgttgcaactgacacgagaaagatgaccaacggagtactgcgcctgccaccagataggcaggccgtcatgcatttcgctatcggcgctagaatcgttggcattgaattccctgcgaagtacgaaggcaaatgggctatcggttggcacgacggcgtccgagcggcctttgagacggacatcgtccaagtcgacgctccgcccaagagccaagtcagaatgcaggggacttcgaatgtacaggctactgctcgctggcgatggaatcaaaagggcgatgatcgttggctcaagtttgacaagggcgatgttatcaagaacatatcctggacttacacggaccactggtgttattctggtgctactgcgaaaggcccaggcatatttcctcagtctcatattgatcccacctcggtgcgcttgatgcaacctggggatacggccagcgtttccagcggagagaagaagaatattaataaccttctcaaattctctattcgtggaaagaacaccactacctctaaataa

SEQ ID NO: 8295 - protein, 875 aa, Muscodor strobelii
  misc_feature: SGI Peptide ID NO. 562546
  misc_feature (3)..(867): NCBI GI: 46136473 Blast Desc: FG09752.1 [Gibberella zeae PH-1]
  misc_feature (3)..(867): NCBI GI: 256726956 Blast Desc: NECHADRAFT_103445 [Nectria haematococca mpVI 77-13-4]
  misc_feature (382)..(867): NCBI GI: 145613261 Blast Desc: MGG_01768 [Magnaporthe grisea 70-15] gi|145020378|gb|EDK04507.1| MGG_01768 [Magnaporthe grisea 70-15]
  misc_feature (518)..(835): NCBI GI: 154294045 Blast Desc: BC1G_14056 [Botryotinia fuckeliana B05.10] gi|150845101|gb|EDN20294.1| BC1G_14056 [Botryotinia fuckeliana B05.10]
  misc_feature (518)..(835): NCBI GI: 156035743 Blast Desc: SS1G_13075 [Sclerotinia sclerotiorum 1980] gi|154698480|gb|EDN98218.1| SS1G_13075 [Sclerotinia sclerotiorum 1980]
  misc_feature (408)..(808): NCBI GI: 261353733 Blast Desc: conserved [Verticillium albo-atrum VaMs.102]
  misc_feature (514)..(840): NCBI GI: 170940151 Blast Desc: protein product [Podospora anserina]
  misc_feature (518)..(840): NCBI GI: 261361091 Blast Desc: conserved [Verticillium albo-atrum VaMs.102]
  misc_feature (514)..(848): NCBI GI: 256726481 Blast Desc: NECHADRAFT_79733 [Nectria haematococca mpVI 77-13-4]
  misc_feature (719)..(867): NCBI GI: 261356612 Blast Desc: conserved [Verticillium albo-atrum VaMs.102]
MAEEIDRLVLAPFREIVEKGKAAIENVESAGDNAPAEMLKAAQNLVKEGEKALKRIEPVSTAHYEEHGSNFVDMVKDNAEITQFRSELKELLWDFDDYVDVDEFDAEKYDELKKASRTAAPQILEILTRMRLLNTRPISISSQIPILDVIRTPSIGHTSPVTYEQPTSMINHSKSESVERLIERIDERLDDIIGASSDTEAGLRDVRRSENMESRASHYSRLSDPPSEPLPSPPSANPWQVGRVPMNISNKFPDKGNDYERRQPVTPDSPTIPSTQLLTHVQGAEGSRARGSESWAHEDQDRRMRAASQSQGTEGSLSPLQSNRWTNSTQNSVESTRRPASRTHSGQGQPSRAASQPQDLGITSSQPSENKNLTINPGYPPRTTSVANQSSSSYVLSSRKPSTESINSSVFDVVESMSTSPVASGHRQSIQSTMSTSTNTQSRAGPPPQYSGYSGPPPLYQTPSIPPRRPSGVTIKSQSSTRTAHPALMNMAMDEGLIPVDMEDTLINDSPMPPRDPDCAITPSSSFFKLKGFCQGAEEARKGQLGFKKIKRPVGGFSTAIVAKCTHCLFELDFKAVENDLNNDSSGNFTSNSVGFRLRILQKCHLPIRNVEEQMYACMFCIQQGHTNEESDATVFFNQKQLFAHIARHPRPLPKVSGITVIEGPSVPVSLRDNFDIWLAHPPTESVMIGIWREIARLPSAVATDTRKMTNGVLRLPPDRQAVMHFAIGARIVGIEFPAKYEGKWAIGWHDGVRAAFETDIVQVDAPPKSQVRMQGTSNVQATARWRWNQKGDDRWLKFDKGDVIKNISWTYTDHWCYSGATAKGPGIFPQSHIDPTSVRLMQPGDTASVSSGEKKNINNLLKFSIRGKNTTTSK

SEQ ID NO: 8296 - DNA, 4639 bp, Muscodor strobelii
  misc_feature: SGI EST ID NO. CUFF.20341.0
  misc_feature: Variant of the nucleotide sequence at SEQ ID NO 8294
ggccaatagacatgtctgactcccacccatcgattggcttctaatgttatcagcctcatccctgtggcctgttgcatggtaagagagcggcgagagggatccatccccacccctccataacacgtctccgtgtcttacttgtaagctacgaattggccaggctgactcttgttcctttctctctcgtgttttgatttgtgttatgcgacaaacgtcaagtctctgtgtggtgatcctgcaatgtatcgcgccgcatagacaagactgttgaactgctcgcgtaccaatcccgcattggttcggtcgctttcgacaacgatataccccccactctgaccgatcttgcctatatcggcggtttccttcttgttgtcccaacatggccgaagaaatagaccggctggtgctggcaccattcagagagattgtcgaaaagggcaaagcagctatcgaaaatgtcgagagcgctggcgacaatgcgccagctgagatgcttaaggcagcacaaaatcttgtgaaagagggtgaaaaggcgctgaagaggatcgaacctgtctcgactgcgcattacgaagaacatggcagcaactttgtcgatatggtaaaagacaatgccgagatcactcagtttcgctcggagctgaaagaactcctttgggacttcgacgactatgtcgatgtggacgaatttgacgcagaaaagtacgacgagctcaaaaaggcatccagaacagctgccccgcagatactggaaatcttaacgagaatgaggctgctgaacacgaggccgatatcaatctcttcacaaatcccgattctggatgtgatcaggacgccatctattggccatacatcacccgtgacatacgagcaaccgacgagtatgatcaatcattcaaaatcagaaagcgtcgagaggctgatagagcgtatagatgaacgcttggacgacattataggtgccagctctgatacagaagcaggattacgcgatgtgcgacgttccgagaatatggaaagccgtgcttctcattattcgcgcctgtctgatccaccttccgaacctctaccctctcctccgtctgcaaatccatggcaagttggaagagttccgatgaatatttcgaataagttccccgacaaaggaaacgactatgagcggcgacaaccagtgacgcctgattcgccaaccataccttcgacccaacttttgacccatgtacaaggtgcggaggggtcgagggctaggggaagcgaaagttgggctcatgaggatcaagatcgacgaatgcgcgctgcctcacagagccagggaactgaagggtcattgtcccccttgcaaagcaatcgctggacaaattctacacaaaactctgtcgagtccacgcgacgacccgcatcacgcactcatagtggtcaaggtcaaccgagtcgagcagcatcacaaccacaggacttagggattacttcaagtcaaccttctgaaaacaagaatctgaccataaacccaggctatcctccgagaacaacttcggtctttgacgtcgtcgaatcgatgagcacaagccccgttgcctcggggcataggcaatccatacaatcgacgatgtctacatctacaaacacgcaatcccgtgctgggcctccacctcaatattcagggtattcaggtcccccaccactttaccaaaccccgtcaatacctcccagaagaccttcaggggtcacaattaaatctcagtcctccacccgcactgcgcaccctgctctcatgaacatggccatggacgagggcttaattccggtagatatggaagacactctgattaacgactccccaatgcctccccgagatcctgactgtgccattactccttcgagctctttcttcaaactgaagggcttctgccaaggtgcagaagaggcacggaaaggtcaactgggatttaaaaagattaagagaccagtcgggggattctctacggcaatcgtggcaaagtgcacgcattgtctctttgaacttgatttcaaggctgttgaaaacgacttgaacaacgactcgtcgggcaattttacatctaattcggtcggatttcgtttgcgaattctgcagaagtgtcatcttccgatacgtaacgttgaggagcagatgtatgcctgcatgttctgcattcagcaaggccacaccaatgaagaaagcgatgcaactgtcttcttcaaccagaaacagctatttgcacacattgcacgtcatccgcgaccactcccaaaggtgtcaggtatcactgtgattgagggccccagcgtccccgtttcactaagggacaattttgatatttggttggcacatccaccgacggagtccgtgatgattggcatttggagagagattgcacgccttccgtcagccgttgcaactgacacgagaaagatgaccaacggagtactgcgcctgccaccagataggcaggccgtcatgcatttcgctatcggcgctagaatcgttggcattgaattccctgcgaagtacgaaggcaaatgggctatcggttggcacgacggcgtccgagcggcctttgagacggacatcgtccaagtcgacgctccgcccaagagccaagtcagaatgcaggggacttcgaatgtacaggctactgctcgctggcgatggaatcaaaagggcgatgatcgttggctcaagtttgacaagggcgatgttatcaagaacatatcctgtaggttaaccatggatccgccactttggttttcctagcgttccatccgtctgattgattggacttctggtctaaccattgttttatagggacttacacggaccactggtgttattctggtgctactgcgaaaggcccaggcatatttcctcagtctcatattgatcccacctcggtgcgcttgatgcaacctggggatacggccagcgtttccagcggagagaagaagaatattaataaccttctcaaattctctattcgtggaaagaacaccactacctctaaataataacccgtttcaaccccaatttctgtcccgaagcagcaacgctagaagaagctagataaaaagtcagagggaacaaaactgattaaacaccgtggcgcgttggtgcaacgactttcaaccttactttctcatctttacttctgcgactataccctttgtgttctccgcttcctcttgtcatgtatatcagatgaaaactggaaaacatagacatagatctcaattgatagttttgactttgacttgtacgccttccaatgatgttctcgaatcccacgttatggctctggttcggcttgttaaaacgtagactcccacaaaacaagtagctagaccaactacgtcctacttacaaatttgcctttaaagacacatctgtttgttcagacggatggtaattaattcctacctataggtacttgcctatccaaaacaacttgtgtagatgacgtcatccattatcacggcaatgacatcccactcacggagcacccttatggacattgacatgtcgtaaacatcaagttagacatgaagcttcatcaagtcgaaatctccaaaagaccatttccccaaccaaatcacttattacctcatctaacattacggaataccgtttacaatcctcagataatcatgagtaggatgagctcctggtctcgacctacgaaaacccaagcaacgccagcacccttctatgcgatccctggcgccgagtcaacgccgtactgtcgctcctgtgggcgggtgatcagttcccgaagagtcaaggcttctactcaaaccgaaagttcgtctgctgcatattgctcggctcgttgtcgcaatcacaaacctcagaaactagatcgagaaatcgagaatacatttgtgcggtttctactaggaggtgatgagcagcatgcgagtcatgacacaacaaaaaagagtggaaaaggtgaccctcgaatcctcgtcgcatgcagcgacgttgagatggctgtctttggcgatcgttcggatcctctgaaagtgtttgggagaaggaaaaaccgcgcttcgagagtgatcgaagaaactgatgagcaaaaaagtgacccacacgagagtccacatcaccacgagcaggcagataacgaaacaggccaagaccagtttctaggcgtacaacaacaatatgttgatggtgacgttttagctcgcctatcaatccgcagtgggactcgaatccgtccggcacagcctgtatcagaggtcaatggaagtgttggcggggagaagggatgggcggagcgagcggacgagaccgaagagatgagtattagaagaattgaggggcagaagagagctgcggaaagagaaatggtacggtcggctgctcgacgcggagtggtgtttgggttcgtcataaacgaaaatgatcatggggattctcacggagataatactcgacgcaaatgcgaggccttccagaaaggtaaggtggttgagccgagtttcgcaaagggcgaattcgcgatcagatggagagatgattaatccttcacgatcatcttcaactattatatcgctgatcgcgtcacccgtctgaccatatgtcaccacattctttactacaaggtcggttaagaataac

SEQ ID NO: 8297 - DNA, 2502 bp, Muscodor strobelii
  misc_feature: SGI cDNA ID NO. 562547
  misc_feature: Encodes the peptide sequence at SEQ ID NO 8298
atggccgaagaaatagaccggctggtgctggcaccattcagagagattgtcgaaaagggcaaagcagctatcgaaaatgtcgagagcgctggcgacaatgcgccagctgagatgcttaaggcagcacaaaatcttgtgaaagagggtgaaaaggcgctgaagaggatcgaacctgtctcgactgcgcattacgaagaacatggcagcaactttgtcgatatggtaaaagacaatgccgagatcactcagtttcgctcggagctgaaagaactcctttgggacttcgacgactatgtcgatgtggacgaatttgacgcagaaaagtacgacgagctcaaaaaggcatccagaacagctgccccgcagatactggaaatcttaacgagaatgaggctgctgaacacgaggccgatatcaatctcttcacaaatcccgattctggatgtgatcaggacgccatctattggccatacatcacccgtgacatacgagcaaccgacgaatgaacgcttggacgacattataggtgccagctctgatacagaagcaggattacgcgatgtgcgacgttccgagaatatggaaagccgtgcttctcattattcgcgcctgtctgatccaccttccgaacctctaccctctcctccgtctgcaaatccatggcaagttggaagagttccgatgaatatttcgaataagttccccgacaaaggaaacgactatgagcggcgacaaccagtgacgcctgattcgccaaccataccttcgacccaacttttgacccatgtacaaggtgcggaggggtcgagggctaggggaagcgaaagttgggctcatgaggatcaagatcgacgaatgcgcgctgcctcacagagccagggaactgaagggtcattgtcccccttgcaaagcaatcgctggacaaattctacacaaaactctgtcgagtccacgcgacgacccgcatcacgcactcatagtggtcaaggtcaaccgagtcgagcagcatcacaaccacaggacttagggattacttcaagtcaaccttctgaaaacaagaatctgaccataaacccaggctatcctccgagaacaacttcggtctttgacgtcgtcgaatcgatgagcacaagccccgttgcctcggggcataggcaatccatacaatcgacgatgtctacatctacaaacacgcaatcccgtgctgggcctccacctcaatattcagggtattcaggtcccccaccactttaccaaaccccgtcaatacctcccagaagaccttcaggggtcacaattaaatctcagtcctccacccgcactgcgcaccctgctctcatgaacatggccatggacgagggcttaattccggtagatatggaagacactctgattaacgactccccaatgcctccccgagatcctgactgtgccattactccttcgagctctttcttcaaactgaagggcttctgccaaggtgcagaagaggcacggaaaggtcaactgggatttaaaaagattaagagaccagtcgggggattctctacggcaatcgtggcaaagtgcacgcattgtctctttgaacttgatttcaaggctgttgaaaacgacttgaacaacgactcgtcgggcaattttacatctaattcggtcggatttcgtttgcgaattctgcagaagtgtcatcttccgatacgtaacgttgaggagcagatgtatgcctgcatgttctgcattcagcaaggccacaccaatgaagaaagcgatgcaactgtcttcttcaaccagaaacagctatttgcacacattgcacgtcatccgcgaccactcccaaaggtgtcaggtatcactgtgattgagggccccagcgtccccgtttcactaagggacaattttgatatttggttggcacatccaccgacggagtccgtgatgattggcatttggagagagattgcacgccttccgtcagccgttgcaactgacacgagaaagatgaccaacggagtactgcgcctgccaccagataggcaggccgtcatgcatttcgctatcggcgctagaatcgttggcattgaattccctgcgaagtacgaaggcaaatgggctatcggttggcacgacggcgtccgagcggcctttgagacggacatcgtccaagtcgacgctccgcccaagagccaagtcagaatgcaggggacttcgaatgtacaggctactgctcgctggcgatggaatcaaaagggcgatgatcgttggctcaagtttgacaagggcgatgttatcaagaacatatcctggacttacacggaccactggtgttattctggtgctactgcgaaaggcccaggcatatttcctcagtctcatattgatcccacctcggtgcgcttgatgcaacctggggatacggccagcgtttccagcggagagaagaagaatattaataaccttctcaaattctctattcgtggaaagaacaccactacctctaaataa

SEQ ID NO: 8298 - protein, 833 aa, Muscodor strobelii
  misc_feature: SGI Peptide ID NO. 562547
  misc_feature (3)..(825): NCBI GI: 46136473 Blast Desc: FG09752.1 [Gibberella zeae PH-1]
  misc_feature (3)..(825): NCBI GI: 256726956 Blast Desc: NECHADRAFT_103445 [Nectria haematococca mpVI 77-13-4]
  misc_feature (390)..(825): NCBI GI: 145613261 Blast Desc: MGG_01768 [Magnaporthe grisea 70-15] gi|145020378|gb|EDK04507.1| MGG_01768 [Magnaporthe grisea 70-15]
  misc_feature (476)..(793): NCBI GI: 154294045 Blast Desc: BC1G_14056 [Botryotinia fuckeliana B05.10] gi|150845101|gb|EDN20294.1| BC1G_14056 [Botryotinia fuckeliana B05.10]
  misc_feature (476)..(793): NCBI GI: 156035743 Blast Desc: SS1G_13075 [Sclerotinia sclerotiorum 1980] gi|154698480|gb|EDN98218.1| SS1G_13075 [Sclerotinia sclerotiorum 1980]
  misc_feature (343)..(766): NCBI GI: 261353733 Blast Desc: conserved [Verticillium albo-atrum VaMs.102]
  misc_feature (472)..(798): NCBI GI: 170940151 Blast Desc: protein product [Podospora anserina]
  misc_feature (476)..(798): NCBI GI: 261361091 Blast Desc: conserved [Verticillium albo-atrum VaMs.102]
  misc_feature (472)..(806): NCBI GI: 256726481 Blast Desc: NECHADRAFT_79733 [Nectria haematococca mpVI 77-13-4]
  misc_feature (677)..(825): NCBI GI: 261356612 Blast Desc: conserved [Verticillium albo-atrum VaMs.102]
MAEEIDRLVLAPFREIVEKGKAAIENVESAGDNAPAEMLKAAQNLVKEGEKALKRIEPVSTAHYEEHGSNFVDMVKDNAEITQFRSELKELLWDFDDYVDVDEFDAEKYDELKKASRTAAPQILEILTRMRLLNTRPISISSQIPILDVIRTPSIGHTSPVTYEQPTNERLDDIIGASSDTEAGLRDVRRSENMESRASHYSRLSDPPSEPLPSPPSANPWQVGRVPMNISNKFPDKGNDYERRQPVTPDSPTIPSTQLLTHVQGAEGSRARGSESWAHEDQDRRMRAASQSQGTEGSLSPLQSNRWTNSTQNSVESTRRPASRTHSGQGQPSRAASQPQDLGITSSQPSENKNLTINPGYPPRTTSVFDVVESMSTSPVASGHRQSIQSTMSTSTNTQSRAGPPPQYSGYSGPPPLYQTPSIPPRRPSGVTIKSQSSTRTAHPALMNMAMDEGLIPVDMEDTLINDSPMPPRDPDCAITPSSSFFKLKGFCQGAEEARKGQLGFKKIKRPVGGFSTAIVAKCTHCLFELDFKAVENDLNNDSSGNFTSNSVGFRLRILQKCHLPIRNVEEQMYACMFCIQQGHTNEESDATVFFNQKQLFAHIARHPRPLPKVSGITVIEGPSVPVSLRDNFDIWLAHPPTESVMIGIWREIARLPSAVATDTRKMTNGVLRLPPDRQAVMHFAIGARIVGIEFPAKYEGKWAIGWHDGVRAAFETDIVQVDAPPKSQVRMQGTSNVQATARWRWNQKGDDRWLKFDKGDVIKNISWTYTDHWCYSGATAKGPGIFPQSHIDPTSVRLMQPGDTASVSSGEKKNINNLLKFSIRGKNTTTSK

SEQ ID NO: 8299 - DNA, 4639 bp, Muscodor strobelii; identical to SEQ ID NO: 8296
  misc_feature: SGI EST ID NO. CUFF.20341.0
  misc_feature: Variant of the nucleotide sequence at SEQ ID NO 8297

SEQ ID NO: 8300 - DNA, 1257 bp, Muscodor strobelii
  misc_feature: SGI cDNA ID NO. 562548
  misc_feature: Encodes the peptide sequence at SEQ ID NO 8301
atggtcccgactcgccacggctaccttctctatctcaaaccgatattaccatcatccacgatgccgaacagctccagtcgaagaggcaaacatgtgcctggcacgagagtagcgcacgagcaagtggcgattccttactcgacctttgagaatattgaactcggaccaccaggaaccgttatggtaccagctacaccaccaccgccatatcttccaggctggcgtcagcgctttctagaatttctggaacgaaatctaccgaagcttgctttaccccttgctgtgataattgggtgtgccatcactggcggaacaacttacctccttgcggcacatatttcgaaactgatccgaaatgcaaaagtttcagacgatgtcgaagaatggatgcagaagtcaagagacgtttatgatgcgtgttatctgggttgccacgattgtggtgatcctgaatattcatataatgcctgcctcaagactgcttcgtttcagacaccagacgatgattttgtctgcggtggtgccgaaatctggaattgggctgacaggtatcctgaagcatgcttgagaaatggcggcgaacaatatcgtcttgaagctctagaggccctaaagcacagctacctaaacctatgggggttgattatatgcacattggcaggaggtgttctaggcggactgattgtgtacttcctttggcacaagatcacgacacgtataagagctcgtgcagaggccacagaagagatctggccaggctggagacgtcgccaggccaggagacagcaacgacaaggctggaagctaaccgctctcactcttctcccacaatttgcaaagacagcttctgcttacgcatgcaccaaacacggttccatcgcaaatgtttccttcgtaaacaggaataatactatctctgccaacgtccacggctggttgagcgactgccaggatcagcaaatttgttctacgtacttcgtgaataaccaggcaatcacgagctgcaccatatataccgaagtcaggacatcgcctgtggattatgtctataatctcgttcccgaggtcatggcatgtgggtttttcgtcggcttacctgatgacgcacctgttcctagcgttcgcctcgcaaatcccggcttcgagaagaattggcgtgtacgacttgatgtaaatggctacaacattacacgtgcggaggaaaccgacgccgagatactgtgtttgcatgatattggcgataggaaaacggcctga

SEQ ID NO: 8301 - protein, 418 aa, Muscodor strobelii
  misc_feature: SGI Peptide ID NO. 562548
  misc_feature (80)..(251): NCBI GI: 171677568 Blast Desc: protein product [Podospora anserina] gi|170936852|emb|CAP61510.1| protein product [Podospora anserina]
  misc_feature (302)..(413): NCBI GI: 171677568 Blast Desc: protein product [Podospora anserina] gi|170936852|emb|CAP61510.1| protein product [Podospora anserina]
MVPTRHGYLLYLKPILPSSTMPNSSSRRGKHVPGTRVAHEQVAIPYSTFENIELGPPGTVMVPATPPPPYLPGWRQRFLEFLERNLPKLALPLAVIIGCAITGGTTYLLAAHISKLIRNAKVSDDVEEWMQKSRDVYDACYLGCHDCGDPEYSYNACLKTASFQTPDDDFVCGGAEIWNWADRYPEACLRNGGEQYRLEALEALKHSYLNLWGLIICTLAGGVLGGLIVYFLWHKITTRIRARAEATEEIWPGWRRRQARRQQRQGWKLTALTLLPQFAKTASAYACTKHGSIANVSFVNRNNTISANVHGWLSDCQDQQICSTYFVNNQAITSCTIYTEVRTSPVDYVYNLVPEVMACGFFVGLPDDAPVPSVRLANPGFEKNWRVRLDVNGYNITRAEETDAEILCLHDIGDRKTA

SEQ ID NO: 8302 - DNA, 427 bp, Muscodor strobelii
  misc_feature: SGI EST ID NO. CUFF.20266.0
  misc_feature: Variant of the nucleotide sequence at SEQ ID NO 8300
agacgatctttattctcaaacttctcacgatcacatcaatatggaatcatttgagctattaattttgcctttcgcgggggcaggctaatcgtgtttactccgacaagcgtcgaccaccttttccatatgacctttcacaagtcttcaaatactactcgctatctttcattctgtaccagaatttaatgtaaatcgtcacaccttaaactcgcgtcgtttactacgactattgcatcgacattatggtcccgactcgccacggctaccttctctatctcaaaccgatattaccatcatccacgatgccgaacagctccagtcgaagaggcaaacatgtgcctggcacgagagtagcgcacgagcaagtggcgattccttactcgacctttgagaatattgaactcggaccaccaggaaccgttatggt

SEQ ID NO: 8303 - DNA, 738 bp, Muscodor strobelii
  misc_feature: SGI cDNA ID NO. 562549
  misc_feature: Encodes the peptide sequence at SEQ ID NO 8304
atgacttcagatgacgctccttgtgcacttgtgcgatcaactttgctagtgctcccattatctcccaatgcagagcgactacatatccgtacgaagcgcttgctcatcaaaccgctattacaaaacgacctccaggcctatcatgcgctgcggcttcagccggaattcatggccgagacaacactaggcagagtcgacgccaacttgggagaaacacaagcagctctcgattctttcatcgatccgccggccgaacatttcatcttcgggatcttcctagcggagacagtagagctgataggagaaggcgggatctactcgttacagtcgaagcccattgggtggccgtcaatgggatataagctggggaagaagtactggggccagggctttgctacggaggcaatggatgccatcctgcaagcatggtggaagctaccgagacaggaagcaaatattgagattcaccctgggactatcaagcaaagggcagaggagggtgagagcaagtcttcgaaggatctaggcgacacgaggctgcccatatgcgatgagtgtgtcgtcggagatgtggcgagttataatttggcctcgaaacgagtgttagaaaagctgggtttccagcactttggcacatgggacgaagcagatacgcagcttcacaggttaggagaaccactaagtcttgcgcattatgtgctatcatgtccatcaacttcagcctcgtcatcaagctga

SEQ ID NO: 8304 - protein, 245 aa, Muscodor strobelii
  misc_feature: SGI Peptide ID NO. 562549
  misc_feature (3)..(232): NCBI GI: 39943148 Blast Desc: MGG_03654 [Magnaporthe grisea 70-15] gi|145009757|gb|EDJ94413.1| MGG_03654 [Magnaporthe grisea 70-15]
  misc_feature (11)..(217): NCBI GI: 46109264 Blast Desc: FG01514.1 [Gibberella zeae PH-1]
  misc_feature (11)..(217): NCBI GI: 256730795 Blast Desc: NECHADRAFT_29703 [Nectria haematococca mpVI 77-13-4]
  misc_feature (11)..(216): NCBI GI: 115438332 Blast Desc: [Aspergillus terreus NIH2624] gi|114188854|gb|EAU30554.1| [Aspergillus terreus NIH2624]
  misc_feature (11)..(213): NCBI GI: 85111439 Blast Desc: NCU08390 [Neurospora crassa OR74A] gi|28925688|gb|EAA34701.1| [Neurospora crassa OR74A]
  misc_feature (11)..(218): NCBI GI: 261355317 Blast Desc: conserved [Verticillium albo-atrum VaMs.102]
  misc_feature (4)..(217): NCBI GI: 171695312 Blast Desc: protein product [Podospora anserina] gi|170947898|emb|CAP60062.1| protein product [Podospora anserina]
  misc_feature (11)..(234): NCBI GI: 46109746 Blast Desc: FG01755.1 [Gibberella zeae PH-1]
  misc_feature (11)..(217): NCBI GI: 255942785 Blast Desc: Pc18g03210 [Penicillium chrysogenum Wisconsin 54-1255] gi|211586894|emb|CAP94545.1| Pc18g03210 [Penicillium chrysogenum Wisconsin 54-1255]
  misc_feature (14)..(245): NCBI GI: 46109772 Blast Desc: FG01768.1 [Gibberella zeae PH-1]
MTSDDAPCALVRSTLLVLPLSPNAERLHIRTKRLLIKPLLQNDLQAYHALRLQPEFMAETTLGRVDANLGETQAALDSFIDPPAEHFIFGIFLAETVELIGEGGIYSLQSKPIGWPSMGYKLGKKYWGQGFATEAMDAILQAWWKLPRQEANIEIHPGTIKQRAEEGESKSSKDLGDTRLPICDECVVGDVASYNLASKRVLEKLGFQHFGTWDEADTQLHRLGEPLSLAHYVLSCPSTSASSSS

SEQ ID NO: 8305 - DNA, 1005 bp, Muscodor strobelii
  misc_feature: SGI EST ID NO. CUFF.20272.0
  misc_feature: Variant of the nucleotide sequence at SEQ ID NO 8303
gaattattgagaaatagacaacgatagactttgacctgtctccaagcgccgacggtacagccactttcaatcatgacttcagatgacgctccttgtgcacttgtgcgatcaactttgctagtgctcccattatctcccaatgcagagcgactacatatccgtacgaagcgcttgctcatcaaaccgctattacaaaacgacctccaggcctatcatgcgctgcggcttcagccggaattcatggccgagacaacactaggcagagtcgacgccaacttgggagaaacacaagcagctctcgattctttcatcgatccgccggccgaacatttcatcttcgggatcttcctagcggagacagtagagctgataggagaaggcgggatctactcgttacagtcgaagcccattgggtggccgtcaatgggatataagctggggaagaagtactggggccagggctttgctacggaggcaatggatgccatcctgcaagcatggtggaagctaccgagacaggaagcaaatattgagattcaccctgggactatcaagcaaagggcagaggagggtgagagcaagtcttcgaaggatctaggcgacacgaggctgcccatatgcgatgagtgtgtcgtcggagatgtggcgagttataatttggcctcgaaacgagtgttagaaaagctgggtttccagcactttggcacatgggacgaagcagatacgcagcttcacaggttaggagaaccactaagtcttgcgcattatgtgctatcatgtccatcaacttcagcctcgtcatcaagctgaataatctcccacagcaatactacttacttccagttgctgacccctttttttctttatcgacatacatcaatatgctctgacacggccttgctatcattcgagttaaaatacggtattgaatatggctgagaggcttaatgcgccctgaaaggaattcacaatcagcaagaatagacttgagatataatttttgag

SEQ ID NO: 8306 - DNA, 552 bp, Muscodor strobelii
  misc_feature: SGI cDNA ID NO. 562550
  misc_feature: Reduced expression when VOC is produced
  misc_feature: Encodes the peptide sequence at SEQ ID NO 8307
atgcccccggccaagtccaaggcggcgaaccacgacgacgcaaagtcggagacaccaagcctcaaagaccgcaatggccatggccctaatggctcccacaagaccacaagcaagatgcagcgcatcgccagctcgacaggctcacagctaaaagaggccacttcgatcaacggcgtcattgctgcgccggccaccaacggatcgcagcctcagatcgctcccggcctcaaatgggccacgttcgaccgtgacgtcctccacgactaccgtcgcgagcatcagctcgacacgcccaccgccttctcctcgtcctaccaccactgggtgctgtcccaatcctacatcggcgtccgctcgcctaccatggcccgacgggcgcagtatcggcgccagagcaaagacgacctgaccaaggtggtgcggcggcacttcaatggcgtcggtgtgcaggagaacgacgtcattgtcgacttcctccacaaggtcaagcaccccggcatcacgaagcctaggaagaataaggaagcaccccactcgtctccgctgccctga

SEQ ID NO: 8307 - protein, 183 aa, Muscodor strobelii
  misc_feature: SGI Peptide ID NO. 562550
  misc_feature (1)..(177): NCBI GI: 261355876 Blast Desc: conserved [Verticillium albo-atrum VaMs.102]
  misc_feature (1)..(169): NCBI GI: 116196544 Blast Desc: CHGG_04870 [Chaetomium globosum CBS 148.51] gi|88180783|gb|EAQ88251.1| CHGG_04870 [Chaetomium globosum CBS 148.51]
  misc_feature (1)..(164): NCBI GI: 256727524 Blast Desc: NECHADRAFT_76449 [Nectria haematococca mpVI 77-13-4]
  misc_feature (2)..(163): NCBI GI: 85105620 Blast Desc: NCU05240 [Neurospora crassa OR74A] gi|28923595|gb|EAA32768.1| [Neurospora crassa OR74A]
  misc_feature (39)..(181): NCBI GI: 171688442 Blast Desc: protein product [Podospora anserina] gi|170944183|emb|CAP70293.1| protein product [Podospora anserina]
  misc_feature (1)..(162): NCBI GI: 145613251 Blast Desc: MGG_11142 [Magnaporthe grisea 70-15] gi|145020370|gb|EDK04499.1| MGG_11142 [Magnaporthe grisea 70-15]
  misc_feature (16)..(164): NCBI GI: 156045101 Blast Desc: SS1G_09739 [Sclerotinia sclerotiorum 1980] gi|154694134|gb|EDN93872.1| SS1G_09739 [Sclerotinia sclerotiorum 1980]
  misc_feature (1)..(169): NCBI GI: 169619064 Blast Desc: SNOG_12725 [Phaeosphaeria nodorum SN15] gi|160703739|gb|EAT80023.2| SNOG_12725 [Phaeosphaeria nodorum SN15]
  misc_feature (12)..(166): NCBI GI: 154298394 Blast Desc: BC1G_11652 [Botryotinia fuckeliana B05.10] gi|150858105|gb|EDN33297.1| BC1G_11652 [Botryotinia fuckeliana B05.10]
  misc_feature (2)..(166): NCBI GI: 119481227 Blast Desc: NFIA_087010 [Neosartorya fischeri NRRL 181] gi|119408796|gb|EAW18745.1| conserved [Neosartorya fischeri NRRL 181]
  misc_feature: Useful for introducing or modulating the production of volatile compounds
MPPAKSKAANHDDAKSETPSLKDRNGHGPNGSHKTTSKMQRIASSTGSQLKEATSINGVIAAPATNGSQPQIAPGLKWATFDRDVLHDYRREHQLDTPTAFSSSYHHWVLSQSYIGVRSPTMARRAQYRRQSKDDLTKVVRRHFNGVGVQENDVIVDFLHKVKHPGITKPRKNKEAPHSSPLP

SEQ ID NO: 8308 - DNA, 1543 bp, Muscodor strobelii
  misc_feature: SGI EST ID NO. CUFF.20291.1
  misc_feature: Variant of the nucleotide sequence at SEQ ID NO 8306
gccgctacgaacggggcagacctgttcgcccgcgtgctggggcatcaggcagagtcagggtccatggatgtcattttgtgaccgatttacttacaagactgttcggacggtcccatgccatatcctctttttctgcgctgcgctcactctccaatatccctgtgccctgtgccctgtgccccctccccaacccagatagagatacattttcggtatgatcttctcacgtctcggccgtctcaattccctcgttctgctcgccgctgttctttgatcaattctcgaaaatgcccccggccaagtccaaggcggcgaaccacgacgacgcaaagtcggagacaccaagcctcaaagaccgcaatggccatggccctaatggctcccacaagaccacaagcaagatgcagcgcatcgccagctcgacaggctcacagctaaaagaggccacttcgatcaacggcgtcattgctgcgccggccaccaacggatcgcagcctcagatcgctcccggcctcaaatgggccacgttcgaccgtgacgtcctccacgactaccgtcgcgagcatcagctcgacacgcccaccgccttctcctcgtcctaccaccactgggtgctgtcccaatcctacatcggcgtccgctcgcctaccatggcccgacgggcgcagtatcggcgccagagcaaagacgacctgaccaaggtggtgcggcggcacttcaatggcgtcggtgtgcaggagaacgacgtcattgtcgacttcctccacaaggtcaagcaccccggcatcacgaagcctaggaagaataaggaagcaccccactcgtctccgctgccctgacagcgtatcaagtgcgagacatgcgttacgcggaacgagttgtcagcgttttgagtagatattgtgcgatgtgctgcacgatagcttaatggcaaggacacaggagtccagaatcacggagacatatattcatggtgcatatttagctcggcgttttcatgttcaaaacaactggagttcaacatgctacaagacacttgtcacccgtggccaatttcgtgttacacttcgtcctgctcacccggcaagaactggatttgatggacctcgttatcttacaccagggaccaggggatgggattgtatagttctgagatcatatatacccaatgcgattttttaccgtttgctttcgattccgactttactgcttgcaggacgacttctacaaaattttgtgccgattgagtttggcacgtgtcgcgtggctgtcgcattaagagatttcgacccgcgaacgctcatccgtggggaccactttaactccaggctggcctgcgtcatggtaaccacgctacattatacataggtggttcatggaaatgcttcttaccaccgattaatcttgcaacatacatgcacacagcataatagtttttagtttagatatttacatagactacataaattcatacaagagaagataaaacgtggaaaggcaacagaaaataggatagagacttctaggtccatctggaaaaggc

SEQ ID NO: 8309 - DNA, 1629 bp, Muscodor strobelii
  misc_feature: SGI cDNA ID NO. 562551
  misc_feature: Reduced expression when VOC is produced
  misc_feature: Encodes the peptide sequence at SEQ ID NO 8310
atgaattccacccttctcacaaaggctgcgctgcccgcgcgcatgctttcctctgcccagctctcaaggcagtctttacgagacaccaccacctccatatccaccttcgcaaagcgtccgcatccacgaacatccgcagcccgccgtggcgctcctcaaatacgggccttccatgccacgccaaatgcgctggctatgagagatccctataaagccctcggtgtaggcaagtcggcatcgtcaggcgaaatcaagaaggcatactatggcctagcaaagaagttccacccggataccaacaaggacccgaccgccaaagacaaatttgccgaaatccaatctgcatacgaagtgctatccgaccccaagaagaaagagcaatatgaccaattcggcgccgctggtttcgaccccaatggcgctccacatcccggaggcggcaatcccttcggcgaaggaaaccccttctcaggcttcggccgccaaggcggaggcttcggctctgacttcaacttcgaagacatattctcggcgtttaccggtgggcgagctggccccttcggaggtgctgctggtggccgcggtggcgccaggaaccccttcggacaggaaatactcgtcggggagaacatcgaagtgcaaaccaacatatccttcatggaagcagccaagggcacgagcaagacgatcacgatacatccgatggtctcctgcaaaccctgtagtggcagtggtttgaaacccgggaccaagcgaaccgagtgcaagtcatgtggcggcacgggcacccaggtacacttcatgcagggcggcttccagatggcttcgacctgtagcacctgtaagggaagcggcacagtggctccgcgtggatctgactgccggacttgctccggaaacggcgttactagggaacggaagaccattaccgtcgatattcctgcaggtatcgaagatggtatgagactgcgactggatggagagggtgacgctccgatcactggtggtatggccgatgccagcgcgagaatgaccaggggtgatctctacgtcatgataaaggtcgcggccgatccgaagttcaagcgctcaggctccgatatactatacactgccagtattcctttgacgacggccatgcttggtggcgaagctacgattcccactttggatggagaggtcaacgtcaaggtcgccacgggcacaaacaccggggacaaactcaccctgggtggtatgggaatgaagaagctgggtgcgcgccgtggcggtgctggagatttaagagtcgagttccgcgtcaacatgcccaagtatctatccgccaaccagagaacaatagtcgagatgctagccgatgaaatgggcgacaagacagccaagcggatcatgaacgtgagaatgccaggttccgaatcagcgacaccatcctccgagcctagagaagccacaaaggatgacgatccagcgacgcacagaaacgagggattcctcaagaacatgtggcacaatctcacaaatcaccctgcgcatcgcaatccaggagaaacgtcacagggcgaaacggagactagcgatgaaaagacaaagtctgaagaaaagaaagaatccggttccgggtccggttag

SEQ ID NO: 8310 - protein, 542 aa, Muscodor strobelii
  misc_feature: SGI Peptide ID NO. 562551
  misc_feature (68)..(129): Pfam Id: PF00226 Pfam Desc: DnaJ domain
  misc_feature (321)..(452): Pfam Id: PF01556 Pfam Desc: DnaJ C terminal region
  misc_feature (225)..(308): Pfam Id: PF00684 Pfam Desc: DnaJ central domain (4 repeats)
  misc_feature (1)..(516): NCBI GI: 46136505 Blast Desc: FG09768.1 [Gibberella zeae PH-1]
  misc_feature (1)..(534): NCBI GI: 261355875 Blast Desc: chaperone protein dnaJ [Verticillium albo-atrum VaMs.102]
  misc_feature (55)..(466): NCBI GI: 256727523 Blast Desc: NECHADRAFT_66446 [Nectria haematococca mpVI 77-13-4]
  misc_feature (1)..(511): NCBI GI: 116196546 Blast Desc: CHGG_04871 [Chaetomium globosum CBS 148.51] gi|88180784|gb|EAQ88252.1| CHGG_04871 [Chaetomium globosum CBS 148.51]
  misc_feature (54)..(542): NCBI GI: 242788180 Blast Desc: mitochondrial DnaJ chaperone (Mdj1), [Talaromyces stipitatus ATCC 10500] gi|218721313|gb|EED20732.1| mitochondrial DnaJ chaperone (Mdj1), [Talaromyces stipitatus ATCC 10500]
  misc_feature (19)..(530): NCBI GI: 119481223 Blast Desc: mitochondrial DnaJ chaperone (Mdj1), [Neosartorya fischeri NRRL 181] gi|119408794|gb|EAW18743.1| mitochondrial DnaJ chaperone (Mdj1), [Neosartorya fischeri NRRL 181]
  misc_feature (9)..(540): NCBI GI: 261204415 Blast Desc: mitochondrial DnaJ chaperone [Ajellomyces dermatitidis SLH14081] gi|239587206|gb|EEQ69849.1| mitochondrial DnaJ chaperone [Ajellomyces dermatitidis SLH14081]
  misc_feature (9)..(540): NCBI GI: 239614248 Blast Desc: mitochondrial DnaJ chaperone [Ajellomyces dermatitidis ER-3]
  misc_feature (23)..(530): NCBI GI: 71001652 Blast Desc: mitochondrial DnaJ chaperone (Mdj1) [Aspergillus fumigatus Af293] gi|66853145|gb|EAL93469.1| mitochondrial DnaJ chaperone (Mdj1), [Aspergillus fumigatus Af293] mitochondrial
  misc_feature (11)..(539): NCBI GI: 145232099 Blast Desc: An02g03770 [Aspergillus niger] gi|134056424|emb|CAL00591.1| protein product [Aspergillus niger]
  misc_feature: Useful for introducing or modulating the production of volatile compounds
MNSTLLTKAALPARMLSSAQLSRQSLRDTTTSISTFAKRPHPRTSAARRGAPQIRAFHATPNALAMRDPYKALGVGKSASSGEIKKAYYGLAKKFHPDTNKDPTAKDKFAEIQSAYEVLSDPKKKEQYDQFGAAGFDPNGAPHPGGGNPFGEGNPFSGFGRQGGGFGSDFNFEDIFSAFTGGRAGPFGGAAGGRGGARNPFGQEILVGENIEVQTNISFMEAAKGTSKTITIHPMVSCKPCSGSGLKPGTKRTECKSCGGTGTQVHFMQGGFQMASTCSTCKGSGTVAPRGSDCRTCSGNGVTRERKTITVDIPAGIEDGMRLRLDGEGDAPITGGMADASARMTRGDLYVMIKVAADPKFKRSGSDILYTASIPLTTAMLGGEATIPTLDGEVNVKVATGTNTGDKLTLGGMGMKKLGARRGGAGDLRVEFRVNMPKYLSANQRTIVEMLADEMGDKTAKRIMNVRMPGSESATPSSEPREATKDDDPATHRNEGFLKNMWHNLTNHPAHRNPGETSQGETETSDEKTKSEEKKESGSGSG

SEQ ID NO: 8311 - DNA, 2411 bp, Muscodor strobelii
  misc_feature: SGI EST ID NO. CUFF.20346.1
  misc_feature: Variant of the nucleotide sequence at SEQ ID NO 8309
gaactgggccgaccagggtcagagttggctccagtctgcaagaaaaaaagggccagggcggcatcgcatctagcatcgcgactctatccggcagtcaaacattttcctggccacctcgtcagaagctgcagctcaacaccatcgatcgcctcgcgcaatttcttttccatcaaccatgatttcgttctgatctgtccagccaccgaaccgacatgaattccacccttctcacaaaggctgcgctgcccgcgcgcatgctttcctctgcccagctctcaaggcagtctttacgagacaccaccacctccatatccaccttcgcaaagcgtccgcatccacgaacatccgcagcccgccgtggcgctcctcaaatacgggccttccatgccacgccaaatgcgctggctatgagagatccctataaagccctcggtgtaggcaagtcggcatcgtcaggcgaaatcaagaaggcatactatggcctagcaaagaagttccacccggataccaacaaggacccgaccgccaaagacaaatttgccgaaatccaatctgcatacgaagtgctatccgaccccaagaagaaagagcaatatgaccaattcggcgccgctggtttcgaccccaatggcgctccacatcccggaggcggcaatcccttcggcgaaggaaaccccttctcaggcttcggccgccaaggcggaggcttcggctctgacttcaacttcgaagacatattctcggcgtttaccggtgggcgagctggccccttcggaggtgctgctggtggccgcggtggcgccaggaaccccttcggacaggaaatactcgtcggggagaacatcgaagtgcaaaccaacatatccttcatggaagcagccaagggcacgagcaagacgatcacgatacatccgatggtctcctgcaaaccctgtagtggcagtggtttgaaacccgggaccaagcgaaccgagtgcaagtcatgtggcggcacgggcacccaggtacacttcatgcagggcggcttccagatggcttcgacctgtagcacctgtaagggaagcggcacagtggctccgcgtggatctgactgccggacttgctccggaaacggcgttactagggaacggaagaccattaccgtcgatattcctgcaggtatcgaagatggtatgagactgcgactggatggagagggtgacgctccgatcactggtggtatggccgatgccagcgcgagaatgaccaggggtgatctctacgtcatgataaaggtcgcggccgatccgaagttcaagcgctcaggctccgatatactatacactgccagtattcctttgacgacggccatgcttggtggcgaagctacgattcccactttggatggagaggtcaacgtcaaggtcgccacgggcacaaacaccggggacaaactcaccctgggtggtatgggaatgaagaagctgggtgcgcgccgtggcggtgctggagatttaagagtcgagttccgcgtcaacatgcccaagtatctatccgccaaccagagaacaatagtcgagatgctagccgatgaaatgggcgacaagacagccaagcggatcatgaacgtgagaatgccaggttccgaatcagcgacaccatcctccgagcctagagaagccacaaaggatgacgatccagcgacgcacagaaacgagggattcctcaagaacatgtggcacaatctcacaaatcaccctgcgcatcgcaatccaggagaaacgtcacagggcgaaacggagactagcgatgaaaagacaaagtctgaagaaaagaaagaatccggttccgggtccggttaggatgatggaccgaacatcaggacgcaaagacctcgcatcacgaaataaaattgtatcatattccggatccaatccgacggcaacatacgtcttgccccttagactcatatagatcggggaatcgcatagggcggtgttaagggcggacctgtggccccaaggcgttttttatcttgtcagagaccacgagtcaaacacaactttgggtattgaaatccaaactggaacggccttgctctatacactttcacagcagtgtgctttcgaaatacattttgtatactaggtatctcaaggactgtttgttatgtagccattcgcgactcccgcggaattggtctgcggccactctcctcacatgaagacgctataatgtaatatgaacataagaattatatggtgatgttttgcatattgagtggtggtcaacttctgagcgagagacggcaaaatggagactccgtgtcccactttttcggcgctccgacttatatgggtatcaaatatacataacaaactgctcttgagatagttgggattgttcatgttgtgagcctatcaccccgttag

SEQ ID NO: 8312 - DNA, 3021 bp, Muscodor strobelii
  misc_feature: SGI cDNA ID NO. 562552
  misc_feature (393)..(393): n is a, c, g, t, or other
  misc_feature: Reduced expression when VOC is produced
  misc_feature: Encodes the peptide sequence at SEQ ID NO 8313
atgacgcagacgccgatgctgtcggtgcctctcaaggcaacaaacgagattgactggatcacgccgctcaagacatacatccgcgacacgttcggagacgacccggaacgctatgccgaggaatgcgcaaccctcaaccgcctgcgccaggacatgcgaggcgccggcaaggacagcaccgctgggagagatcttctgtacagatactatggccagctcgagctgctcgacttgcggtttcccgttgacgagcaacacataaagatctcgttcacctggtacgatgccttcacccacaagctcacgtcgcaatactctctggctttcgagaaagcatccatcatcttcaacatctcggccgtcttgtcctgtcatgctgccttgcagacccgntccgaagaggccggactcaagatggcctaccactccttccaggcctccgccggcatgttcacctacatcaacgagaacttcctacacgctccgtcgtccgacctaagcagagataatgtcaagaccttgatatcgataatgctggcgcaagctcaggaggtgttcctggaaaagcaggttgccgaccagaaaaaggtcggcatgctggcaaaactatctagccaagctgcctatctctaccagcaagcccttgagggtgttcaggaaaacgtcaacaaggccatctttgagaaagtttgggtttcctttactcagatcaaagcttgcttgatgagctctaatgcacagtattatcaagccctggcagacgaagatgcgaattcgtatggcgtcgctgtcgcaagattagcgacggccgaaatacaggctaaggaggcaagcaaactggcgagcagcttccctagcgcgccacctacgagttccaatctaagctcggacacgggaccaattctcgcagacatcacgaaacgcaatttgactactattcaagagaaattgaagaccttgatcaaagacaacgactacatttatcaccaacccgtgcccgcagaagcaagtctggtccccgtgcctaagctgccagctgcgaagccaatccccgtgaatgagctgtatgcgggccaagatattcaacggataacgggtcccgacttattcgctaaaatcattccttttgctgtcacagaatctgcgagtctatacgatgaggaaaaggcaaaactagtgcgcgctgaaactgagagagtggacttggccaacagtgagatggctgcaagcttggactacctgagattgcccggtgcgttgcaggtactaaaaggaggcatcgaccaggacatcttgccggatgaggatttccgaacgtggtgtgacgatgtggccggacacgaaaatccaatatcaatctttcacacgctaaatatcgacaaagatgcgattgtcacggtactcgaccgttgtacaaagcagctggagatggaggagagtgtttgcgagaagatgagatcgaaatacgaaggcgaatggacgcagcagcccagttcgagactgactactaccctccggggcaacatacggaattatagagaagcattagacgaagcagggaacagcgatggccagctgtatgccagattcagacaaaacgagtcggactttgagcaaatgcgacaagctgcacagactggtgaggttgatgctctgtttcaaagtgcagtaggcaaagtccgagcaaaatcaagtagtgcaaacagcccagctacagagcaattgaacttgcttgatgccgatttcgaggatggaagcccaagtgttgcgcaacagatcagtcgagttgaggacattctcaagaaactgaaccttgtcaagagagagcgcaaccaagtgttaaaagatctcaaggagaaagttcatcatgatgatatctcgcaaattcttatcctgaataagaaagcaatatcaaatttcgaaaacgagctattcaagtcggagctcgagaaatttcgtccccaccagaccagattattacaggcaaaccataaacagtcgtctctgatgaaagagttgacggcttctttcaacagcttgttgcaagacaagcgtgttcgttccgagcaaagcaaatacgaatccatccagcgccaaagaaactcagtggtgaacaagtataagagggcgtatcaagaatttttggacctcgaatctggactgcagagtgcgaagaactggtatacagagatgaaagagacggtagatagtcttgagaagaacgttgaaacctttgtcaacaaccgaagatctgaaggcgcccagcttttgaatcagatcgaacaggagaaagctgcaaaccaaagttcgcaagcggagcaagagcgcgaaagactccgtggcttaatggagcgcatgtctatggatccaaacaacccatctccgccgaccaacaccgggtcttctcggccgacaccagctccattggccttcaataacactcctcgatatccacagaccaactttgcgggccagtatcaagtaccgacctcccctcctcccaaccaagcctcctatcctagcttttcttcccctccgcctaacagcacgtacactcctgtcccacaacaatcctataccccgaaccctcaacaaaacaatccgcagtacggacaagcagcgtacaaccctggtacctggggtcgaactccaggaccagtatcgccgccaccaacgcagacaagcttcggactcggtgtctctgggagaggaccggcctcaccacctcccacacaatcctcttttgcaccaaaccaatatagcacctacggcaatccacaagggcaacaaggacaacagtttgtacccccaggattcgtgccgcctccaccaccaccaggccctccaccgctaggccctcagcaaaccattcattactcacaacaccagcaacaagactacgcgtacggaccacaaagtgcagcaccacagagcgcagcaccgaaatcaggtcatccatatcagcagcagcaacagcaacagtcgcaggatccctgggccggtctcaatgcttggaaatga

SEQ ID NO: 8313 - protein, 1006 aa, Muscodor strobelii
  misc_feature: SGI Peptide ID NO. 562552
  misc_feature (5)..(397): Pfam Id: PF03097 Pfam Desc: BRO1-like domain
  misc_feature (1)..(1006): NCBI GI: 239614249 Blast Desc: vacuolar protein-sorting protein bro1 [Ajellomyces dermatitidis ER-3]
  misc_feature (1)..(1006): NCBI GI: 226291711 Blast Desc: vacuolar protein-sorting protein bro1 [Paracoccidioides brasiliensis Pb18]
  misc_feature (1)..(1006): NCBI GI: 225559172 Blast Desc: conserved [Ajellomyces capsulatus G186AR]
  misc_feature (6)..(1006): NCBI GI: 261204413 Blast Desc: vacuolar protein-sorting protein bro1 [Ajellomyces dermatitidis SLH14081] gi|239587205|gb|EEQ69848.1| vacuolar protein-sorting protein bro1 [Ajellomyces dermatitidis SLH14081]
  misc_feature (1)..(1006): NCBI GI: 240104682 Blast Desc: Bro1-like domain containing protein [Coccidioides posadasii C735 delta SOWgp]
  misc_feature (1)..(1006): NCBI GI: 115383868 Blast Desc: vacuolar protein-sorting protein bro-1 [Aspergillus terreus NIH2624] gi|114196173|gb|EAU37873.1| vacuolar protein-sorting protein bro-1 [Aspergillus terreus NIH2624]
  misc_feature (1)..(1006): NCBI GI: 121715710 Blast Desc: signal transduction protein BroA, [Aspergillus clavatus NRRL 1] gi|119403621|gb|EAW14038.1| signal transduction protein BroA, [Aspergillus clavatus NRRL 1]
  misc_feature (1)..(1006): NCBI GI: 258577427 Blast Desc: vacuolar protein-sorting protein bro-1 [Uncinocarpus reesii 1704] gi|237903161|gb|EEP77562.1| vacuolar protein-sorting protein bro-1 [Uncinocarpus reesii 1704]
  misc_feature (1)..(1006): NCBI GI: 145232101 Blast Desc: An02g03780 [Aspergillus niger] gi|134056425|emb|CAL00592.1| protein product [Aspergillus niger]
  misc_feature (1)..(1006): NCBI GI: 119481225 Blast Desc: signal transduction protein BroA, [Neosartorya fischeri NRRL 181] gi|119408795|gb|EAW18744.1| signal transduction protein BroA, [Neosartorya fischeri NRRL 181]
  misc_feature: Useful for introducing or modulating the production of volatile compounds
MTQTPMLSVPLKATNEIDWITPLKTYIRDTFGDDPERYAEECATLNRLRQDMRGAGKDSTAGRDLLYRYYGQLELLDLRFPVDEQHIKISFTWYDAFTHKLTSQYSLAFEKASIIFNISAVLSCHAALQTRSEEAGLKMAYHSFQASAGMFTYINENFLHAPSSDLSRDNVKTLISIMLAQAQEVFLEKQVADQKKVGMLAKLSSQAAYLYQQALEGVQENVNKAIFEKVWVSFTQIKACLMSSNAQYYQALADEDANSYGVAVARLATAEIQAKEASKLASSFPSAPPTSSNLSSDTGPILADITKRNLTTIQEKLKTLIKDNDYIYHQPVPAEASLVPVPKLPAAKPIPVNELYAGQDIQRITGPDLFAKIIPFAVTESASLYDEEKAKLVRAETERVDLANSEMAASLDYLRLPGALQVLKGGIDQDILPDEDFRTWCDDVAGHENPISIFHTLNIDKDAIVTVLDRCTKQLEMEESVCEKMRSKYEGEWTQQPSSRLTTTLRGNIRNYREALDEAGNSDGQLYARFRQNESDFEQMRQAAQTGEVDALFQSAVGKVRAKSSSANSPATEQLNLLDADFEDGSPSVAQQISRVEDILKKLNLVKRERNQVLKDLKEKVHHDDISQILILNKKAISNFENELFKSELEKFRPHQTRLLQANHKQSSLMKELTASFNSLLQDKRVRSEQSKYESIQRQRNSVVNKYKRAYQEFLDLESGLQSAKNWYTEMKETVDSLEKNVETFVNNRRSEGAQLLNQIEQEKAANQSSQAEQERERLRGLMERMSMDPNNPSPPTNTGSSRPTPAPLAFNNTPRYPQTNFAGQYQVPTSPPPNQASYPSFSSPPPNSTYTPVPQQSYTPNPQQNNPQYGQAAYNPGTWGRTPGPVSPPPTQTSFGLGVSGRGPASPPPTQSSFAPNQYSTYGNPQGQQGQQFVPPGFVPPPPPPGPPPLGPQQTIHYSQHQQQDYAYGPQSAAPQSAAPKSGHPYQQQQQQQSQDPWAGLNAWK

SEQ ID NO: 8314 - DNA, 4601 bp, Muscodor strobelii
  misc_feature: SGI EST ID NO. CUFF.20288.0
  misc_feature (1135)..(1135): n is a, c, g, t, or other
  misc_feature: Variant of the nucleotide sequence at SEQ ID NO 8312
tatgagaataaatgacacacttacctctacttaaccaacatacgactgatcgcaccagcaacacatttcgaaaacacgtctataactcattacaaattcaaagtgcatttacatgttaggaaatataaggaaatcgatcatactgcactgactgattattatcagaacattatttgttgtgttattcggtggtaccatttacttcgaaacccgcctgcccgtgcccgtgccccgcgagtgacctgctccagtgcttgcgcttgcgcttgctcaagcgacagcatgccctctgtccaatagattccatatcaattaagtccatgagaattgagttttagcagcttgctcgtgaaataagccgatataggtcacagggattagctgataactttatatccgtgcctgcaatccccaccagcgtgcgacgtagacgctgccgaaatctggcggcctaactcgtctctactgtcatcctcatcgtcacatctacccccacaccctacctacctagcttgctgcctctcacttctcattcccatacacgaccacctccatgcctccttgcctgtagactgcagctgtcgcccatcctttattcgcattccgccgccacggtccgacccgtctcagccatatgagaagcgaatccaccatcctcgactgccgactccgggggcgcaagctctcttagagacgctcttctcgtgcgccgtggctcggacaaccgcaacccaatcacaacatgacgcagacgccgatgctgtcggtgcctctcaaggcaacaaacgagattgactggatcacgccgctcaagacatacatccgcgacacgttcggagacgacccggaacgctatgccgaggaatgcgcaaccctcaaccgcctgcgccaggacatgcgaggcgccggcaaggacagcaccgctgggagagatcttctgtacagatactatggccagctcgagctgctcgacttgcggtttcccgttgacgagcaacacataaagatctcgttcacctggtacgatgccttcacccacaagctcacgtcgcaatactctctggctttcgagaaagcatccatcatcttcaacatctcggccgtcttgtcctgtcatgctgccttgcagacccgntccgaagaggccggactcaagatggcctaccactccttccaggcctccgccggcatgttcacctacatcaacgagaacttcctacacgctccgtcgtccgacctaagcagagataatgtcaagaccttgatatcgataatgctggcgcaagctcaggaggtgttcctggaaaagcaggttgccgaccagaaaaaggtcggcatgctggcaaaactatctagccaagctgcctatctctaccagcaagcccttgagggtgttcaggaaaacgtcaacaaggccatctttgagaaagtttgggtttcctttactcagatcaaagcttgcttgatgagctctaatgcacagtattatcaagccctggcagacgaagatgcgaattcgtatggcgtcgctgtcgcaagattagcgacggccgaaatacaggctaaggaggcaagcaaactggcgagcagcttccctagcgcgccacctacgagttccaatctaagctcggacacgggaccaattctcgcagacatcacgaaacgcaatttgactactattcaagagaaattgaagaccttgatcaaagacaacgactacatttatcaccaacccgtgcccgcagaagcaagtctggtccccgtgcctaagctgccagctgcgaagccaatccccgtgaatgagctgtatgcgggccaagatattcaacggataacgggtcccgacttattcgctaaaatcattccttttgctgtcacagaatctgcgagtctatacgatgaggaaaaggcaaaactagtgcgcgctgaaactgagagagtggacttggccaacagtgagatggctgcaagcttggactacctgagattgcccggtgcgttgcaggtactaaaaggaggcatcgaccaggacatcttgccggatgaggatttccgaacgtggtgtgacgatgtggccggacacgaaaatccaatatcaatctttcacacgctaaatatcgacaaagatgcgattgtcacggtactcgaccgttgtacaaagcagctggagatggaggagagtgtttgcgagaagatgagatcgaaatacgaaggcgaatggacgcagcagcccagttcgagactgactactaccctccggggcaacatacggaattatagagaagcattagacgaagcagggaacagcgatggccagctgtatgccagattcagacaaaacgagtcggactttgagcaaatgcgacaagctgcacagactggtgaggttgatgctctgtttcaaagtgcagtaggcaaagtccgagcaaaatcaagtagtgcaaacagcccagctacagagcaattgaacttgcttgatgccgatttcgaggatggaagcccaagtgttgcgcaacagatcagtcgagttgaggacattctcaagaaactgaaccttgtcaagagagagcgcaaccaagtgttaaaagatctcaaggagaaagttcatcatgatgatatctcgcaaattcttatcctgaataagaaagcaatatcaaatttcgaaaacgagctattcaagtcggagctcgagaaatttcgtccccaccagaccagattattacaggcaaaccataaacagtcgtctctgatgaaagagttgacggcttctttcaacagcttgttgcaagacaagcgtgttcgttccgagcaaagcaaatacgaatccatccagcgccaaagaaactcagtggtgaacaagtataagagggcgtatcaagaatttttggacctcgaatctggactgcagagtgcgaagaactggtatacagagatgaaagagacggtagatagtcttgagaagaacgttgaaacctttgtcaacaaccgaagatctgaaggcgcccagcttttgaatcagatcgaacaggagaaagctgcaaaccaaagttcgcaagcggagcaagagcgcgaaagactccgtggcttaatggagcgcatgtctatggatccaaacaacccatctccgccgaccaacaccgggtcttctcggccgacaccagctccattggccttcaataacactcctcgatatccacagaccaactttgcgggccagtatcaagtaccgacctcccctcctcccaaccaagcctcctatcctagcttttcttcccctccgcctaacagcacgtacactcctgtcccacaacaatcctataccccgaaccctcaacaaaacaatccgcagtacggacaagcagcgtacaaccctggtacctggggtcgaactccaggaccagtatcgccgccaccaacgcagacaagcttcggactcggtgtctctgggagaggaccggcctcaccacctcccacacaatcctcttttgcaccaaaccaatatagcacctacggcaatccacaagggcaacaaggacaacagtttgtacccccaggattcgtgccgcctccaccaccaccaggccctccaccgctaggccctcagcaaaccattcattactcacaacaccagcaacaagactacgcgtacggaccacaaagtgcagcaccacagagcgcagcaccgaaatcaggtcatccatatcagcagcagcaacagcaacagtcgcaggatccctgggccggtctcaatgcttggaaatgagagctacgcacagagggacaagagcatcttggtgtaagggatccggacatcattcagtatctgatactatagaaaatataccaaacatggctttcccacatccaaaacgtcaatttaacagatatcgagcagtgctgtctagctgacctatattgtgtgaaacacatcgtctgccaggaccagggggggaacacaaagagcggcattcgacgctctacagctatgattcgaacttgcgtgaagttgatgcaaggtcatctgcagtcttgatgcttcaggacacattgacaggtgatgcaccatgggtgatagcctctatctagtgagaagcgcatgtgataaacatatgcgtgggttgcatgattgtggtcatagatgaaactcgcgagctgggtagacagcgtgtggtctgtaatgctgcatgcagcatggttctgagtggtgttgtatgataatgcaatcgtaccgtagggagaaggtggatgtggactgcacgtggaggcgaatatgcgcagctacgttcatacatgtatgtgagaactcagacattgcatgaatatggatacacgtatatctatgatacttctatctgcagcatggagacgagatggtccgtggaaggtcggagcattccgtgaagatagagtgtttttggcttgggggtggcgatgggactcaggaatcggacatttaccacttattacgcgaacgtccggccgacagcatggattgctggcgatttgtactgtatgtagtaaatgccagtttgtgtgtggacagcgatgttgaagaaacttgacttgcgcaaaaaaatgagagtatcgtttatgcaatgcag

SEQ ID NO: 8315 - DNA, 2100 bp, Muscodor strobelii
  misc_feature: SGI cDNA ID NO. 562553
  misc_feature: Reduced expression when VOC is produced
  misc_feature: Encodes the peptide sequence at SEQ ID NO 8316
atggcctcctcgactcctggtacgccgcgactgagcaatagtggctccaactcaccgggcttcattcctctcgtcgctgtcgtcgatttccaccaccacaggggccccgaggtggaaagatggtttggtgtagaagaaggccgagaccctgccgcggaatgggactggtcactgctcgctttcatggctttaagtgacggcgcgcatgccgccaccgaagacttctcctacttcactctcctccggcccgctaccgacgacgggcctgcgacgtccctgttcggcatatcatgcactcgccagatggacgcctctaagctgctcgttcgaccccccgacgtcacccggtccaccgtgcagaaggccgtggtggtcatagcagacagtccacagtcttttgggatgctgagggaacgcttgtcgattgtcacggacgcatggtttgcccagcgcgagttcaccgacgtggagatactccacaagttccaagacagcctggccacggagaaagaacgaggtctgttaagcgaagaggtggacaaagatcaatacctcggtatgagtctccgagaacttgtgagagagttcaggtggcagactctagtcctgttaaaatgctgcctcctacaacccaaaatgctctttttcggctcgcggtgcgagcggctgtgcatgatgcaattttccttaatttcgttgataccaggtcttttgaggcatctgcaggattgcgccggcccggaaatgaacagttatgaaatgaacttaaaacagcccacgagtctgaagactagtgaccgaagctcgttactggcttatatgggccttcctctacagatatttggcaagggaagcttgtttggaccgtacacaccgcttcaacagcttgaccttcttgccgacttcggcaccaaatcgtacatagtcggcagcactaattcattgttattgcaacaaagggacaggtacagcgatatcttaattaatcttgacgaagacaccataaacatcacgtcaccttcactgcgcagcgcattggctctttcgcatcctgacaggcgatggatcgacttcattacgcaagaagtgaacgacacctgggatgaagcgaatccacagcgacccaaaaccatgggctaccgaggaagcgaggaattcatacgattgcagttcgaagagtatctgctctccctcatctcagctgtcaaataccgaaattatctagcacagaacaacaacaatccgaaagcgacgcttccagatatcgaaggtgacccgtctcaagatttcggtaatgaatgggtcgagtactggatgaagactgagaattatcgcctctggaacgcaaatactgattctcatttgtttgatattgtacaacccactcatccatgtgctggaggtttgagcatcgatgacgttcaacgccgaattcagcaacaagtccaagatttgcatttagacgaaagatttgcagtcgggaaagaagtgcttggcagaaatctggcagccgggcgggagaaagcgagcaccatgttcaacaagttttatgctgacatggaagctctgcgcgaagcacaacggaagcgtgcagaagaagccaaagccgagcaagctaatgccgagaagaacggtattcacccgaatgcgaataagtctcaacagtccgcaacctctagagctagtgcctatattggtagctggacaacctgggcagatcaaaaacgcagacagggctggggtcgaggtaatcacaacaatagcaatggaaatggaaatcctacgggtggcggatggggtttcggtggccgtaaatcccgcgtttcgacatcaaataatggtgactccggcagtgaaaagaacggtacaccaatcagcagcccaactctatcctcaaatggcttcgagagaatcgaaataccccaaacggaaaaaactgataggcctcccacacaacatagcttcagcgaaagcgtgcttgattctgtgtctgtagacgatgagagtggcccatcaaaccccgccagtccgcgcaaaagcgtcagattagacagcacaccgttaagggataccacaaatgcagcgagtgatccatcctaa

SEQ ID NO: 8316 - protein, 699 aa, Muscodor strobelii
  misc_feature: SGI Peptide ID NO. 562553
  misc_feature (4)..(582): NCBI GI: 164424460 Blast Desc: NCU07023 [Neurospora crassa OR74A] gi|157070521|gb|EAA32926.2| conserved [Neurospora crassa OR74A]
  misc_feature (4)..(690): NCBI GI: 256727036 Blast Desc: [Nectria haematococca mpVI 77-13-4]
  misc_feature (20)..(583): NCBI GI: 261355858 Blast Desc: cytoplasm protein [Verticillium albo-atrum VaMs.102]
  misc_feature (1)..(580): NCBI GI: 171683555 Blast Desc: protein product [Podospora anserina] gi|170941737|emb|CAP67391.1| protein product [Podospora anserina]
  misc_feature (17)..(664): NCBI GI: 46136199 Blast Desc: FG09615.1 [Gibberella zeae PH-1]
  misc_feature (4)..(558): NCBI GI: 116194430 Blast Desc: CHGG_03813 [Chaetomium globosum CBS 148.51] gi|88179726|gb|EAQ87194.1| CHGG_03813 [Chaetomium globosum CBS 148.51]
  misc_feature (21)..(606): NCBI GI: 145613181 Blast Desc: MGG_01823 [Magnaporthe grisea 70-15] gi|145020317|gb|EDK04446.1| MGG_01823 [Magnaporthe grisea 70-15]
  misc_feature (23)..(581): NCBI GI: 189198433 Blast Desc: LAlv9 family protein [Pyrenophora tritici-repentis Pt-1C-BFP] gi|187981502|gb|EDU48128.1| LAlv9 family protein [Pyrenophora tritici-repentis Pt-1C-BFP]
  misc_feature (23)..(578): NCBI GI: 169763378 Blast Desc: [Aspergillus oryzae RIB40] gi|83770617|dbj|BAE60750.1| protein product [Aspergillus oryzae]
  misc_feature (23)..(592): NCBI GI: 240109014 Blast Desc: CPC735_025190 [Coccidioides posadasii C735 delta SOWgp]
  misc_feature: Useful for introducing or modulating the production of volatile compounds
MASSTPGTPRLSNSGSNSPGFIPLVAVVDFHHHRGPEVERWFGVEEGRDPAAEWDWSLLAFMALSDGAHAATEDFSYFTLLRPATDDGPATSLFGISCTRQMDASKLLVRPPDVTRSTVQKAVVVIADSPQSFGMLRERLSIVTDAWFAQREFTDVEILHKFQDSLATEKERGLLSEEVDKDQYLGMSLRELVREFRWQTLVLLKCCLLQPKMLFFGSRCERLCMMQFSLISLIPGLLRHLQDCAGPEMNSYEMNLKQPTSLKTSDRSSLLAYMGLPLQIFGKGSLFGPYTPLQQLDLLADFGTKSYIVGSTNSLLLQQRDRYSDILINLDEDTINITSPSLRSALALSHPDRRWIDFITQEVNDTWDEANPQRPKTMGYRGSEEFIRLQFEEYLLSLISAVKYRNYLAQNNNNPKATLPDIEGDPSQDFGNEWVEYWMKTENYRLWNANTDSHLFDIVQPTHPCAGGLSIDDVQRRIQQQVQDLHLDERFAVGKEVLGRNLAAGREKASTMFNKFYADMEALREAQRKRAEEAKAEQANAEKNGIHPNANKSQQSATSRASAYIGSWTTWADQKRRQGWGRGNHNNSNGNGNPTGGGWGFGGRKSRVSTSNNGDSGSEKNGTPISSPTLSSNGFERIEIPQTEKTDRPPTQHSFSESVLDSVSVDDESGPSNPASPRKSVRLDSTPLRDTTNAASDPS

SEQ ID NO: 8317 - DNA, 3413 bp, Muscodor strobelii
  misc_feature: SGI EST ID NO. CUFF.20325.0
  misc_feature: Variant of the nucleotide sequence at SEQ ID NO 8315
atacggtaatacctactctcatcttcaacgtcttgagtccgatacaccggtacgtgacaaggtgggggaatgaggggaccatttcgagggttgtgagccgtgaacaagctggaatgttttgcctctagaccgtcttggagatagatcaatgtaaccctactaaagttgccgccccaccttgatcttcatcagaaacaattcttgtaatgttgatatcttttttgttttgattctcttcggttgcatcttgactctcctctctataccgtattagctctccttggcgtattcgaactgccgacactattccaatcgcttttgttcgtggcgaagcatacggacggtgtgtggaggatgtcatcttgggatacgtcacgctgatttatagctgatattcgagctcccccaaaggtccacggtcgggaatcggatcgagtctactgtaccctgcttggagaaattggattggaaaagtcaacggcggcattgaaccaaccacggccttggacggacaatgcctcgagtcattggtgtattttaatgcttcgctcgtcagccattcgtctttttcgacaacatatgcttctgctctcctcctgtctgtgcgagtcccgacaactgcttgctagctttctgcaaagtgcacgccaaggctgagcctccgccttcgcacacatcactcccgtcctcgtctccttgtccttgctgcaagacgtggaatgtcgtgtctctgatgacttcaccacacgtcctgctgccgccgccgaaccacgtcaaccacgtgtccaacaacaaccgaatgctttgtctcactgcccgcgggctcgcgattggcacatcgacttggctcattgagtcgaactgactgcagcatacgctttcctccgttttcgagccgccttccacccagcgtcaggagatcgccagctttataaaccgcctccccgaattggcccgatagcattgtcacaatggcctcctcgactcctggtacgccgcgactgagcaatagtggctccaactcaccgggcttcattcctctcgtcgctgtcgtcgatttccaccaccacaggggccccgaggtggaaagatggtttggtgtagaagaaggccgagaccctgccgcggaatgggactggtcactgctcgctttcatggctttaagtgacggcgcgcatgccgccaccgaagacttctcctacttcactctcctccggcccgctaccgacgacgggcctgcgacgtccctgttcggcatatcatgcactcgccagatggacgcctctaagctgctcgttcgaccccccgacgtcacccggtccaccgtgcagaaggccgtggtggtcatagcagacagtccacagtcttttgggatgctgagggaacgcttgtcgattgtcacggacgcatggtttgcccagcgcgagttcaccgacgtggagatactccacaagttccaagacagcctggccacggagaaagaacgaggtctgttaagcgaagaggtggacaaagatcaatacctcggtatgagtctccgagaacttgtgagagagttcaggtggcagactctagtcctgttaaaatgctgcctcctacaacccaaaatgctctttttcggctcgcggtgcgagcggctgtgcatgatgcaattttccttaatttcgttgataccaggtcttttgaggcatctgcaggattgcgccggcccggaaatgaacagttatgaaatgaacttaaaacagcccacgagtctgaagactagtgaccgaagctcgttactggcttatatgggccttcctctacagatatttggcaagggaagcttgtttggaccgtacacaccgcttcaacagcttgaccttcttgccgacttcggcaccaaatcgtacatagtcggcagcactaattcattgttattgcaacaaagggacaggtacagcgatatcttaattaatcttgacgaagacaccataaacatcacgtcaccttcactgcgcagcgcattggctctttcgcatcctgacaggcgatggatcgacttcattacgcaagaagtgaacgacacctgggatgaagcgaatccacagcgacccaaaaccatgggctaccgaggaagcgaggaattcatacgattgcagttcgaagagtatctgctctccctcatctcagctgtcaaataccgaaattatctagcacagaacaacaacaatccgaaagcgacgcttccagatatcgaaggtgacccgtctcaagatttcggtaatgaatgggtcgagtactggatgaagactgagaattatcgcctctggaacgcaaatactgattctcatttgtttgatattgtacaacccactcatccatgtgctggaggtttgagcatcgatgacgttcaacgccgaattcagcaacaagtccaagatttgcatttagacgaaagatttgcagtcgggaaagaagtgcttggcagaaatctggcagccgggcgggagaaagcgagcaccatgttcaacaagttttatgctgacatggaagctctgcgcgaagcacaacggaagcgtgcagaagaagccaaagccgagcaagctaatgccgagaagaacggtattcacccgaatgcgaataagtctcaacagtccgcaacctctagagctagtgcctatattggtagctggacaacctgggcagatcaaaaacgcagacagggctggggtcgaggtaatcacaacaatagcaatggaaatggaaatcctacgggtggcggatggggtttcggtggccgtaaatcccgcgtttcgacatcaaataatggtgactccggcagtgaaaagaacggtacaccaatcagcagcccaactctatcctcaaatggcttcgagagaatcgaaataccccaaacggaaaaaactgataggcctcccacacaacatagcttcagcgaaagcgtgcttgattctgtgtctgtagacgatgagagtggcccatcaaaccccgccagtccgcgcaaaagcgtcagattagacagcacaccgttaagggataccacaaatgcagcgagtgatccatcctaaagtgactggatccagctagctatgagacacgattgaacacgaataatcaaaaataatataataagctgcatcaaggacttggttgaatcatgagtcgactgaaaggggattcgctagatataagagaacgactaagaggatgtatcaatcaatagcttggatgtccttctgcattgcctggtcagaggaacgtcaagctgaagatctccatactacagtatcttgcaaagcaagcacccattgctggctacgtaccagacagacgaacactgtggaaatgtactctgcacgagacatatgtaaataatgcaaagcacaataatagatctttgacctacttgc

SEQ ID NO: 8318 - DNA, 2181 bp, Muscodor strobelii
  misc_feature: SGI cDNA ID NO. 562554
  misc_feature: Encodes the peptide sequence at SEQ ID NO 8319
atggatgaacagaaatcacctcagcatgaagacacgccgtcgcccacacttaccacgtcagatggaggagaattggagccgaacgatacggttcggacagttgggatcttgaaactacgtgggaagaaggacgatctccctaggagctggtggtttgcttccaccgcggttcctttaattgctgctacgcaaggcccgttttcgaatgtcctatcgtcatcgccaattgctgcgctggcaactgtctggcgaatagagttgcctaacggcggtcaactaacagacagtctggaacaagatgggcgtaaactgagagaccctcaatgggagttggctctcaacggcgtctctttggcctgtggcttcgctggcaatttgctgctcttacttcacttcgttggcagagtccgttatatcattgcactgcctctttctattatactgtggcttcttgcttctggaatactcatagctattaccgcgagtgtgagcatttacataccgccagtgccgccagcccaggtctattcccaagggttctggcacgccgttattgcctcgatcacctacatgataggggcgctgatgttggtggcaaactttgttggctacctcttcgggcattatccacaaaacttcgttcttgatgatgatcaacgaaccctcattctccaaaccatgatgttcttcatctggcttgctgggggagctgccgtcttcaccaggctcgaaggttgggacttctcaaacgccttgtattattgtgatgtttctgtattaaccattggttacggagactattctccctcgaccgatgccggccgaggcttcttcttcgtctatgaactgatagggatcacccaactaggtttggtcattagtcgaatttctcgatatatgtccaatatgtcatccgataaagtgataaaagcacaccaggcccgtgtcagacaacaaacaatcggccgcacagtgacgaatgaagaagaactgagagaacgccttgggctgccccgcaaacgaagagcttcgattggacaacagatgactcgacgaaacactctcactcaacatgggaagttcaagatggttggcaatacggtcactttcaaggaacgtaaagctcccctcgacagtcgcaatgagccaggtcatccccaggatcatagacctttggcccagacacaacgaggcacaaacttatcgatgtctcaagctgtatcaagagtcagaggggatcggagacagcgacttctcgtgcttagtgaagaaaaggatcgattcaacactatgcgagacatccaggacgaaacgaaacgattcaagcagtactacacattattcgttgcgttgataacgttcgcttcattgtgggctttaggtgctctgatatttatgtacgcagaggaggaaacgctgggtttaaactatttcgatagcttctacttctgtttcgtcaccttattaaccgttggatatggtgatatcagcccgaagtctaacgcgggcagagcatttttcatagtgtggtctctcattgctgttcctagtatcatcaatcgcgctacaaacattttgctacccgaaaagggatttctgcaaacatttctactttcaaatcctaaccactggtttacgcgtctcatacaacgtaagcgggagcaggaccgagtcgaagcaggcttccaaatacaagatcctgaggcagaaataagggatgacaatgtgcagaccgatccaccaggagaagaagaccctgaattagaggatctatcgagagtcgagcaggatagccacgacgaacaccacctcgctcgtcagctcggcaaagccatccgctcagtagcccaagatctccgatcggatcctcccagacgatacagctactcagaatgggcacatttcaccaagctcatacggttcagctcgggcgccagcaaagaagctgttgaagctagagaagaggaagaaggacttatcgaatgggattggataggtgaggacagccccatgctagccgattctacggaatctgaatgggtactggatcggttgtgtgagagtctggatcgctatacgaaaaatcgccgtcagaacgacgaagatcgtgaacaggaagttcggcggcggcgcgttactgccgagagtcgaaactcggaggctgaagctgagaaatcatag

SEQ ID NO: 8319 - protein, 726 aa, Muscodor strobelii
  misc_feature: SGI Peptide ID NO. 562554
  misc_feature (227)..(302): Pfam Id: PF07885 Pfam Desc: Ion channel
  misc_feature (452)..(531): Pfam Id: PF07885 Pfam Desc: Ion channel
  misc_feature (460)..(513): Pfam Id: PF00520 Pfam Desc: Ion transport protein
  misc_feature (452)..(516): Pfam Id: PF07885 Pfam Desc: Ion channel
  misc_feature (16)..(712): NCBI GI: 156045211 Blast Desc: SS1G_09794 [Sclerotinia sclerotiorum 1980] gi|154694189|gb|EDN93927.1| SS1G_09794 [Sclerotinia sclerotiorum 1980]
  misc_feature (27)..(704): NCBI GI: 171683545 Blast Desc: protein product [Podospora anserina] gi|170941732|emb|CAP67386.1| protein product [Podospora anserina]
  misc_feature (48)..(708): NCBI GI: 212527230 Blast Desc: potassium channel, [Penicillium marneffei ATCC 18224] gi|210073170|gb|EEA27257.1| potassium channel, [Penicillium marneffei ATCC 18224]
  misc_feature (40)..(699): NCBI GI: 169773271 Blast Desc: [Aspergillus oryzae RIB40] gi|83768965|dbj|BAE59102.1| protein product [Aspergillus oryzae]
  misc_feature (40)..(699): NCBI GI: 238491234 Blast Desc: potassium channel, [Aspergillus flavus NRRL3357] gi|220697267|gb|EED53608.1| potassium channel, [Aspergillus flavus NRRL3357]
  misc_feature (35)..(704): NCBI GI: 119495074 Blast Desc: ion channel, [Neosartorya fischeri NRRL 181] gi|119412493|gb|EAW22434.1| ion channel, [Neosartorya fischeri NRRL 181]
  misc_feature (40)..(705): NCBI GI: 242783044 Blast Desc: potassium channel, [Talaromyces stipitatus ATCC 10500] gi|218720267|gb|EED19686.1| potassium channel, [Talaromyces stipitatus ATCC 10500]
  misc_feature (35)..(702): NCBI GI: 159131549 Blast Desc: potassium channel, [Aspergillus fumigatus A1163]
  misc_feature (35)..(702): NCBI GI: 70996080 Blast Desc: potassium channel [Aspergillus fumigatus Af293] gi|44890021|emb|CAF32139.1| outward-rectifier potassium channel tok1 homologue, [Aspergillus fumigatus] potassium channel, Af293]
  misc_feature (40)..(711): NCBI GI: 145242362 Blast Desc: An09g04840 [Aspergillus niger] gi|134078346|emb|CAK40338.1| protein product [Aspergillus niger]
MDEQKSPQHEDTPSPTLTTSDGGELEPNDTVRTVGILKLRGKKDDLPRSWWFASTAVPLIAATQGPFSNVLSSSPIAALATVWRIELPNGGQLTDSLEQDGRKLRDPQWELALNGVSLACGFAGNLLLLLHFVGRVRYIIALPLSIILWLLASGILIAITASVSIYIPPVPPAQVYSQGFWHAVIASITYMIGALMLVANFVGYLFGHYPQNFVLDDDQRTLILQTMMFFIWLAGGAAVFTRLEGWDFSNALYYCDVSVLTIGYGDYSPSTDAGRGFFFVYELIGITQLGLVISRISRYMSNMSSDKVIKAHQARVRQQTIGRTVTNEEELRERLGLPRKRRASIGQQMTRRNTLTQHGKFKMVGNTVTFKERKAPLDSRNEPGHPQDHRPLAQTQRGTNLSMSQAVSRVRGDRRQRLLVLSEEKDRFNTMRDIQDETKRFKQYYTLFVALITFASLWALGALIFMYAEEETLGLNYFDSFYFCFVTLLTVGYGDISPKSNAGRAFFIVWSLIAVPSIINRATNILLPEKGFLQTFLLSNPNHWFTRLIQRKREQDRVEAGFQIQDPEAEIRDDNVQTDPPGEEDPELEDLSRVEQDSHDEHHLARQLGKAIRSVAQDLRSDPPRRYSYSEWAHFTKLIRFSSGASKEAVEAREEEEGLIEWDWIGEDSPMLADSTESEWVLDRLCESLDRYTKNRRQNDEDREQEVRRRRVTAESRNSEAEAEKS

SEQ ID NO: 8320 - DNA, 1186 bp, Muscodor strobelii
  misc_feature: SGI EST ID NO. CUFF.20301.0
  misc_feature: Variant of the nucleotide sequence at SEQ ID NO 8318
gtcaactaacagacagtctggaacaagatgggcgtaaactgagagaccctcaatgggagttggctctcaacggcgtctctttggcctgtggcttcgctggcaatttgctgctcttacttcacttcgttggcagagtccgttatatcattgcactgcctctttctattatactgtggcttcttgcttctggaatactcatagctattaccgcgagtgtgagcatttacataccgccagtgccgccagcccaggtctattcccaagggttctggcacgccgttattgcctcgatcacctacatgataggggcgctgatgttggtggcaaactttgttggctacctcttcgggcattatccacaaaacttcgttcttgatgatgatcaacgaaccctcattctccaaaccatgatgttcttcatctggcttgctgggggagctgccgtcttcaccaggctcgaaggttgggacttctcaaacgccttgtattattgtgatgtttctgtattaaccattggttacggagactattctccctcgaccgatgccggccgaggcttcttcttcgtctatgaactgatagggatcacccaactaggtttggtcattagtcgaatttctcgatatatgtccaatatgtcatccgataaagtgataaaagcacaccaggcccgtgtcagacaacaaacaatcggccgcacagtgacgaatgaagaagaactgagagaacgccttgggctgccccgcaaacgaagagcttcgattggacaacagatgactcgacgaaacactctcactcaacatgggaagttcaagatggttggcaatacggtcactttcaaggaacgtaaagctcccctcgacagtcgcaatgagccaggtcatccccaggatcatagacctttggcccagacacaacgaggcacaaacttatcgatgtctcaagctgtatcaagagtcagaggggatcggagacagcgacttctcgtgcttagtgaagaaaaggatcgattcaacactatgcgagacatccaggacgaaacgaaacgattcaagcagtactacacattattcgttgcgttgataacgttcgcttcattgtgggctttaggtgctctgatatttatgtacgcagaggaggaaacgctgggtttaaactatttcgatagcttctacttctgtttcgt

SEQ ID NO: 8321 - DNA, 576 bp, Muscodor strobelii
  misc_feature: SGI cDNA ID NO. 562555
  misc_feature: Reduced expression when VOC is produced
  misc_feature: Encodes the peptide sequence at SEQ ID NO 8322
atgccccttgacgatagtcctatagctagggagaagacttacgtccctcccataccgtcgccacttcgcccatcagattcagacttgcctctcgataagcgacctgaagctgcgcgaatacgacgaaatgccacttcttctagccccaccgagcatctcatgcgcatgaaaggtgctgctgcttggcgagtcatggccgagcgtattgcccttcgagaaggtgaccacggttcaggtacaaatggaaaaagcagtacccataacgcagttctggaagagatgcgagtcgtcgccgtaaagactccaggcggccaggcaggaagaaactccttggctcaagttgacgaaaatcaagacctcgaagatggcgatcttgtactcgacattgagaaacaacagtccggaacaagccaagagctcggcatcgatggcgcaccgacaaatgagcagggccccttattacgattcgttcgaaactgcgtttgtagactccaactcaaatcagtctgggctagattctttctcataatatccggcatcctactcctaatcggcatctgtgtactattgcgctag

SEQ ID NO: 8322 - protein, 191 aa, Muscodor strobelii
  misc_feature: SGI Peptide ID NO. 562555
  misc_feature: Useful for introducing or modulating the production of volatile compounds
MPLDDSPIAREKTYVPPIPSPLRPSDSDLPLDKRPEAARIRRNATSSSPTEHLMRMKGAAAWRVMAERIALREGDHGSGTNGKSSTHNAVLEEMRVVAVKTPGGQAGRNSLAQVDENQDLEDGDLVLDIEKQQSGTSQELGIDGAPTNEQGPLLRFVRNCVCRLQLKSVWARFFLIISGILLLIGICVLLR

SEQ ID NO: 8323 - DNA, 2484 bp, Muscodor strobelii
  misc_feature: SGI EST ID NO. CUFF.20306.0
  misc_feature: Variant of the nucleotide sequence at SEQ ID NO 8321
ctctagatgaatcttggttgttttgtctctttaacagacccaatgacgtcagaattagataatcacttctcaatgcgacgacaaggaatcgtgcctcagttttgaactactcatctacagggaaaaagacgaaacatattcacactaagctcgagtatattggccctcagtctatacctatatacaatgcaaggaccaaatctcatgggttggaaagtctggaacagtaccaatccgtcaatataggatgtcagaggcgttacgcttctctttgttgttcgggtatgcaggttcttaactgacatttgcagatttgaataccgcgatgagattgtaccgagaacattcaattaagctgaatatgccccttgacgatagtcctatagctagggagaagacttacgtccctcccataccgtcgccacttcgcccatcagattcagacttgcctctcgataagcgacctgaagctgcgcgaatacgacgaaatgccacttcttctagccccaccgagcatctcatgcgcatgaaaggtgctgctgcttggcgagtcatggccgagcgtattgcccttcgagaaggtgaccacggttcaggtacaaatggaaaaagcagtacccataacgcagttctggaagagatgcgagtcgtcgccgtaaagactccaggcggccaggcaggaagaaactccttggctcaagttgacgaaaatcaagacctcgaagatggcgatcttgtactcgacattgagaaacaacagtccggaacaagccaagagctcggcatcgatggcgcaccgacaaatgagcagggccccttattacgattcgttcgaaactgcgtttgtagactccaactcaaatcagtctgggctagattctttctcataatatccggcatcctactcctaatcggcatctgtgtactattgcgctagatggggaatcgtacacctgacgaagggtggaagagagtctgagtcgcggtcatgattgagtgaagattccaagtccgaagtggtcattatcggctgagtggcattgattcctcccggcgccctatttagtcttcaattgctttctatttcttaagcaaagacggtcgtatacaacatatataatacagtgggaaatattcatctcatttcttttcggacgcggaatcagattcggaagatggcttgcttggttcgtgctgtttttggatatcggtttccacttgccaaattgctcgctcaatttcgacttcaagctccggaatttcaagcgccttgacgagttggcggccactcgcctgggtcaaaagcatcttttcttcggcgggtgatgttttgtcagcttggtatgatgatgtttgccctgaggatgaattcgagtctggcttgacagctgtttgcgaagggaggcgcttaggatacacggtatcgagcgtcgaggagggcgaaagagtgaggaagttattcgacacgagccactggatgtgtttaccaccagcaaaggctcggtaatgcgaccaggcccgatataccaagtagaagaaaggcaaattggggatgacaggcactagggcaaaaggtgcgctaattggcatgccgacaaaacaccaaattagtctggagcgatgcaaggactcccgctcggttgcaagtgttcgcagtatttgcggagcttgcgccgctgaaatgactgactcgggaaacacgacatgatgcttctctttgccaagcacctcctcctgtttgcgtctgctggataaggtgggaacagatttcaaaccccattcttcatatggtattcgtcgcagcgccttattgccgtagcggacaacggtcttctgccacccactctctttctgctcccagccggcccatagttttgctgcgcgttgagtgccccaatcggcccaagatagcttgtccgagggtagtgtctggagcttctgacagtacaagagcgtgcgacgcgtcgaaatggggacaaggaagagtcgcatttcgaggaaagatcggatatcgagagatagaagaacgcgacgagaacaagagagatgctacagaggtgatgggagaagtggtcggaggcaatgtgtgaggctgtagcacaagctacggtgaatgcgacgaagtagaagagatcatggcgagctgcgaatagtcaacgacgagacgaaactttgcgcaaggtggacaggtaattagcagagactggatgcagtggaattttcatggagctaccttagctctctgatcttgagtaagcctggcgcctggtcccgccgctgtacttggcggcatctggctgtgacgcacttgactaggatctcattgcccagtacctaacttggcttcccaagattcgttcgtccatgccaatgagtcaaccgagttagactcacacagcgggatgttcaccttgttcagataagttgtacgtaggtagtatgagcagcgaatattataatccactatgctgagttcaagggccc

SEQ ID NO: 8324 - DNA, 852 bp, Muscodor strobelii
  misc_feature: SGI cDNA ID NO. 562556
  misc_feature: Reduced expression when VOC is produced
  misc_feature: Encodes the peptide sequence at SEQ ID NO 8325
atgcgactcttccttgtccccatttcgacgcgtcgcacgctcttgtactgtcagaagctccagacactaccctcggacaagctatcttgggccgattggggcactcaacgcgcagcaaaactatgggccggctgggagcagaaagagagtgggtggcagaagaccgttgtccgctacggcaataaggcgctgcgacgaataccatatgaagaatggggtttgaaatctgttcccaccttatccagcagacgcaaacaggaggaggtgcttggcaaagagaagcatcatgtcgtgtttcccgagtcagtcatttcagcggcgcaagctccgcaaatactgcgaacacttgcaaccgagcgggagtccttgcatcgctccagactaatttggtgttttgtcggcatgccaattagcgcaccttttgccctagtgcctgtcatccccaatttgcctttcttctacttggtatatcgggcctggtcgcattaccgagcctttgctggtggtaaacacatccagtggctcgtgtcgaataacttcctcactctttcgccctcctcgacgctcgataccgtgtatcctaagcgcctcccttcgcaaacagctgtcaagccagactcgaattcatcctcagggcaaacatcatcataccaagctgacaaaacatcacccgccgaagaaaagatgcttttgacccaggcgagtggccgccaactcgtcaaggcgcttgaaattccggagcttgaagtcgaaattgagcgagcaatttggcaagtggaaaccgatatccaaaaacagcacgaaccaagcaagccatcttccgaatctgattccgcgtccgaaaagaaatga

SEQ ID NO: 8325 - protein, 283 aa, Muscodor strobelii
  misc_feature: SGI Peptide ID NO. 562556
  misc_feature (1)..(266): NCBI GI: 116194442 Blast Desc: CHGG_03819 [Chaetomium globosum CBS 148.51] gi|88179732|gb|EAQ87200.1| CHGG_03819 [Chaetomium globosum CBS 148.51]
  misc_feature (1)..(283): NCBI GI: 171683553 Blast Desc: protein product [Podospora anserina] gi|170941736|emb|CAP67390.1| protein product [Podospora anserina]
  misc_feature (1)..(279): NCBI GI: 261355829 Blast Desc: conserved [Verticillium albo-atrum VaMs.102]
  misc_feature (1)..(282): NCBI GI: 256727482 Blast Desc: NECHADRAFT_66358 [Nectria haematococca mpVI 77-13-4]
  misc_feature (1)..(280): NCBI GI: 46121383 Blast Desc: FG05070.1 [Gibberella zeae PH-1]
  misc_feature (1)..(264): NCBI GI: 154294578 Blast Desc: BC1G_13759 [Botryotinia fuckeliana B05.10] gi|150844638|gb|EDN19831.1| BC1G_13759 [Botryotinia fuckeliana B05.10]
  misc_feature (1)..(266): NCBI GI: 238844585 Blast Desc: conserved [Microsporum canis CBS 113480]
  misc_feature (1)..(280): NCBI GI: 189198449 Blast Desc: conserved [Pyrenophora tritici-repentis Pt-1C-BFP] gi|187981510|gb|EDU48136.1| conserved [Pyrenophora tritici-repentis Pt-1C-BFP]
  misc_feature (1)..(267): NCBI GI: 39976043 Blast Desc: MGG_06052 [Magnaporthe grisea 70-15] gi|145011669|gb|EDJ96325.1| MGG_06052 [Magnaporthe grisea 70-15]
  misc_feature (1)..(266): NCBI GI: 239610003 Blast Desc: conserved [Ajellomyces dermatitidis ER-3]
  misc_feature: Useful for introducing or modulating the production of volatile compounds
MRLFLVPISTRRTLLYCQKLQTLPSDKLSWADWGTQRAAKLWAGWEQKESGWQKTVVRYGNKALRRIPYEEWGLKSVPTLSSRRKQEEVLGKEKHHVVFPESVISAAQAPQILRTLATERESLHRSRLIWCFVGMPISAPFALVPVIPNLPFFYLVYRAWSHYRAFAGGKHIQWLVSNNFLTLSPSSTLDTVYPKRLPSQTAVKPDSNSSSGQTSSYQADKTSPAEEKMLLTQASGRQLVKALEIPELEVEIERAIWQVETDIQKQHEPSKPSSESDSASEKK

SEQ ID NO: 8326 - DNA, 2484 bp, Muscodor strobelii
  misc_feature: SGI EST ID NO. CUFF.20306.0
  misc_feature: Variant of the nucleotide sequence at SEQ ID NO 8324
gggcccttgaactcagcatagtggattataatattcgctgctcatactacctacgtacaacttatctgaacaaggtgaacatcccgctgtgtgagtctaactcggttgactcattggcatggacgaacgaatcttgggaagccaagttaggtactgggcaatgagatcctagtcaagtgcgtcacagccagatgccgccaagtacagcggcgggaccaggcgccaggcttactcaagatcagagagctaaggtagctccatgaaaattccactgcatccagtctctgctaattacctgtccaccttgcgcaaagtttcgtctcgtcgttgactattcgcagctcgccatgatctcttctacttcgtcgcattcaccgtagcttgtgctacagcctcacacattgcctccgaccacttctcccatcacctctgtagcatctctcttgttctcgtcgcgttcttctatctctcgatatccgatctttcctcgaaatgcgactcttccttgtccccatttcgacgcgtcgcacgctcttgtactgtcagaagctccagacactaccctcggacaagctatcttgggccgattggggcactcaacgcgcagcaaaactatgggccggctgggagcagaaagagagtgggtggcagaagaccgttgtccgctacggcaataaggcgctgcgacgaataccatatgaagaatggggtttgaaatctgttcccaccttatccagcagacgcaaacaggaggaggtgcttggcaaagagaagcatcatgtcgtgtttcccgagtcagtcatttcagcggcgcaagctccgcaaatactgcgaacacttgcaaccgagcgggagtccttgcatcgctccagactaatttggtgttttgtcggcatgccaattagcgcaccttttgccctagtgcctgtcatccccaatttgcctttcttctacttggtatatcgggcctggtcgcattaccgagcctttgctggtggtaaacacatccagtggctcgtgtcgaataacttcctcactctttcgccctcctcgacgctcgataccgtgtatcctaagcgcctcccttcgcaaacagctgtcaagccagactcgaattcatcctcagggcaaacatcatcataccaagctgacaaaacatcacccgccgaagaaaagatgcttttgacccaggcgagtggccgccaactcgtcaaggcgcttgaaattccggagcttgaagtcgaaattgagcgagcaatttggcaagtggaaaccgatatccaaaaacagcacgaaccaagcaagccatcttccgaatctgattccgcgtccgaaaagaaatgagatgaatatttcccactgtattatatatgttgtatacgaccgtctttgcttaagaaatagaaagcaattgaagactaaatagggcgccgggaggaatcaatgccactcagccgataatgaccacttcggacttggaatcttcactcaatcatgaccgcgactcagactctcttccacccttcgtcaggtgtacgattccccatctagcgcaatagtacacagatgccgattaggagtaggatgccggatattatgagaaagaatctagcccagactgatttgagttggagtctacaaacgcagtttcgaacgaatcgtaataaggggccctgctcatttgtcggtgcgccatcgatgccgagctcttggcttgttccggactgttgtttctcaatgtcgagtacaagatcgccatcttcgaggtcttgattttcgtcaacttgagccaaggagtttcttcctgcctggccgcctggagtctttacggcgacgactcgcatctcttccagaactgcgttatgggtactgctttttccatttgtacctgaaccgtggtcaccttctcgaagggcaatacgctcggccatgactcgccaagcagcagcacctttcatgcgcatgagatgctcggtggggctagaagaagtggcatttcgtcgtattcgcgcagcttcaggtcgcttatcgagaggcaagtctgaatctgatgggcgaagtggcgacggtatgggagggacgtaagtcttctccctagctataggactatcgtcaaggggcatattcagcttaattgaatgttctcggtacaatctcatcgcggtattcaaatctgcaaatgtcagttaagaacctgcatacccgaacaacaaagagaagcgtaacgcctctgacatcctatattgacggattggtactgttccagactttccaacccatgagatttggtccttgcattgtatataggtatagactgagggccaatatactcgagcttagtgtgaatatgtttcgtctttttccctgtagatgagtagttcaaaactgaggcacgattccttgtcgtcgcattgagaagtgattatctaattctgacgtcattgggtctgttaaagagacaaaacaaccaagattcatctagag

SEQ ID NO: 8327 - DNA, 2307 bp, Muscodor strobelii
  misc_feature: SGI cDNA ID NO. 562557
  misc_feature: Encodes the peptide sequence at SEQ ID NO 8328
atgtcggccacagcgaccaggaccatcctgatgccccctcagcccaacagggaggacatcgatgccacctggaactatctccagaccggcatcaccaagatcatgctcaatcttcaagatggcatggatatgacaacttacatgggcatctatacggcggttcacaatttttgcacgtctcagaaagccgtcacaattagcaactcgaccaacgtgggccaagctcacagaggggcacatctactcggagaggacttgtatcgcaagctgaaggggcatctcaacgagcacctcgatcagctgtgtcacgactccaaggcgcatagcgatgaggcactgttggcattctatatcagagaatgggacaggtacaccatggctgccaagtatgttcaccacctcttccgataccttaacaggcattgggtgaagcgtgagatggatgaagggaaaaagaacacctacgacatctacactcttcatttgtatcagtggcggactgagttcttcgcgatggtccacgagaaggtcatgggcgccgtgctcaagctggtggagaagcagaggaatggcgagacgatcgagcacggccagataaaacaggtcgtcgactctttcgtctctcttggcctcgacgagcacgacgcctccaagtccaccctcgatatataccgatctcatttcgagaaaccgttcgtggcggccacgaaagtcttctaccaggaagagtccaaacagttcgtcgctgagaacagcgtcgtcgagtatatgaagaaggctgaagccaggctggatgaagaagaagagagggtccggatgtacctgcataacgacattgcatcccccctcaagaagacttgtcacgaggccttgatagcagaccactcagccttgctgcgagacgagttccaggtgctcttggataacgaccgcgaagaggacatggcacgtatgtacaagcttctttctcgtatcgccgacggtctagaaccgctgcgccagaaatttgaagcgcacgtgagaaatgccggtcttgcggcagtcaccaaagtggcatccgatgccgagaaactagagccgaaagtctacgtggaggccttactggagacgcacacgcaatatcagtcgttggtgaagcgagcctttgccgacgagccagaattcacccgctcattagataatgcatgtcgagagtttgtgaatagaaacgacatttgcaaggctggctccaacaagtctcctgagttgttggccaaatataccgatgtgttgttacggaagagcggcactggtgttgaagaggccgagctagatgcaaccctaacccagatcatgacagtcttcaaatatatcgaagacaaagatgtgttccaaaagttttattcgcggatgctggcaagacgtttagtccatagcaattcgtcctctgatgatgcagagacgagcatgattagcaaactcaaggaagcttgcggcttcgagtatacgaacaaactgcagcgcatgttccaagatatgcaaatttcaaaggatctcaataccggattccgagagcacaccaagcagctcggcacgcaaccactcgattcgtcttactctattctcggaaccagtttctggcctttgagtgcaccgactaccactttcaacccaccagcggaaattcaacaagatattgagcggttctctctcttctacaagaacaagcatgaaggtcgcaagctcacgtggctttggcagctctgtaagggtgaggtcaagacaggatactgcaaatccaccaagacgccatacacctttcaagttagcgtatatcagatggccatcctcttattgttcaacgacaaagacgcccacacttacgaggacatattgtccgctacgcaattgacaagtgagtttcatgacgctgcgatgggtgtgcttctgaaagccaaagtcctcctcatgaagcctgagggcgacaagcctggtcctggcaagacattccatctgaattacgacttcaagaacaagaaaatccgtgtcaatctaaacattagcacaaagacggagtctaagcaagaggaggccgatacgaacaagactatcgaggaggatcgtcagttggtcttgcagtccgccattgtgcgtatcatgaaggccagaaagaagatgaagcatgctgtcctcgtgagcgaatgcatcaatcaaatcaagtcacgctttatgcctaagatagcagacatcaagaagaacattgagattcttcttgacaaagagtacttggagcgattagacgatgacgagctgggctatcttgcttga

SEQ ID NO: 8328 - protein, 768 aa, Muscodor strobelii
  misc_feature: SGI Peptide ID NO. 562557
  misc_feature (24)..(670): Pfam Id: PF00888 Pfam Desc: Cullin family
  misc_feature (10)..(768): NCBI GI: 121701395 Blast Desc: cullin [Aspergillus clavatus NRRL 1] gi|119397105|gb|EAW07536.1| cullin [Aspergillus clavatus NRRL 1]
  misc_feature (78)..(768): NCBI GI: 171683549 Blast Desc: protein product [Podospora anserina] gi|170941734|emb|CAP67388.1| protein product [Podospora anserina]
  misc_feature (40)..(768): NCBI GI: 164429183 Blast Desc: NCU05204 [Neurospora crassa OR74A] gi|157072972|gb|EAA32967.2| NCU05204 [Neurospora crassa OR74A]
  misc_feature (11)..(768): NCBI GI: 115491899 Blast Desc: cullin-1 [Aspergillus terreus NIH2624] gi|114197437|gb|EAU39137.1| cullin-1 [Aspergillus terreus NIH2624]
  misc_feature (10)..(768): NCBI GI: 259488684 Blast Desc: TPA: SCF ubiquitin ligase complex subunit CulA, (AFU_orthologue; AFUA_1G12960) [Aspergillus nidulans FGSC A4]
  misc_feature (17)..(768): NCBI GI: 212532175 Blast Desc: SCF ubiquitin ligase complex subunit CulA, [Penicillium marneffei ATCC 18224] gi|210071608|gb|EEA25697.1| SCF ubiquitin ligase complex subunit CulA, [Penicillium marneffei
  misc_feature (8)..(768): NCBI GI: 255937121 Blast Desc: Pc13g11700 [Penicillium chrysogenum Wisconsin 54-1255] gi|211584207|emb|CAP92239.1| Pc13g11700 [Penicillium chrysogenum Wisconsin 54-1255]
  misc_feature (11)..(768): NCBI GI: 189198453 Blast Desc: cullin-2 [Pyrenophora tritici-repentis Pt-1C-BFP] gi|187981512|gb|EDU48138.1| cullin-2 [Pyrenophora tritici-repentis Pt-1C-BFP]
  misc_feature (11)..(768): NCBI GI: 225557950 Blast Desc: Cullin [Ajellomyces capsulatus G186AR]
  misc_feature (1)..(768): NCBI GI: 169620213 Blast Desc: SNOG_13309 [Phaeosphaeria nodorum SN15] gi|111058073|gb|EAT79193.1| SNOG_13309 [Phaeosphaeria nodorum SN15]
MSATATRTILMPPQPNREDIDATWNYLQTGITKIMLNLQDGMDMTTYMGIYTAVHNFCTSQKAVTISNSTNVGQAHRGAHLLGEDLYRKLKGHLNEHLDQLCHDSKAHSDEALLAFYIREWDRYTMAAKYVHHLFRYLNRHWVKREMDEGKKNTYDIYTLHLYQWRTEFFAMVHEKVMGAVLKLVEKQRNGETIEHGQIKQVVDSFVSLGLDEHDASKSTLDIYRSHFEKPFVAATKVFYQEESKQFVAENSVVEYMKKAEARLDEEEERVRMYLHNDIASPLKKTCHEALIADHSALLRDEFQVLLDNDREEDMARMYKLLSRIADGLEPLRQKFEAHVRNAGLAAVTKVASDAEKLEPKVYVEALLETHTQYQSLVKRAFADEPEFTRSLDNACREFVNRNDICKAGSNKSPELLAKYTDVLLRKSGTGVEEAELDATLTQIMTVFKYIEDKDVFQKFYSRMLARRLVHSNSSSDDAETSMISKLKEACGFEYTNKLQRMFQDMQISKDLNTGFREHTKQLGTQPLDSSYSILGTSFWPLSAPTTTFNPPAEIQQDIERFSLFYKNKHEGRKLTWLWQLCKGEVKTGYCKSTKTPYTFQVSVYQMAILLLFNDKDAHTYEDILSATQLTSEFHDAAMGVLLKAKVLLMKPEGDKPGPGKTFHLNYDFKNKKIRVNLNISTKTESKQEEADTNKTIEEDRQLVLQSAIVRIMKARKKMKHAVLVSECINQIKSRFMPKIADIKKNIEILLDKEYLERLDDDELGYLA

SEQ ID NO: 8329 - DNA, 3395 bp, Muscodor strobelii
  misc_feature: SGI EST ID NO. CUFF.20429.0
  misc_feature: Variant of the nucleotide sequence at SEQ ID NO 8327
gtcatttacgtacataagtagcaggggcgtcctgctggtgtgcacaggcacgtactgtaggcctggaaggcaagaagtggttataagagacctacagtggggtggttctgcctcgcaaggccgccatagcaacttactaacaccgagcaacagtgactggacggcctcacctcacatccatccagtcttccgcggatggttgtcgagcctgcattcccgcaacctcttcacccagcctgtctcttctccccaaacctccaccacccacgtcgccgcgtccccgccccatctacaaacagcccgacaacttgcgacaagacttctcgctcgtctcgtcgccgactcatcctccgccgctgtgggcacatcccgcccgcggccgtccgtggcacccaaaccgccaccatctgcatttcatcttagtgtctggcccggcgctgcttctgctttgcttctactcctgcatctgccagcatctacagctctgcacgcctctgtttgcgcggcagcgccagcatcaacactgccagcgtcccgctctgccgatcgaccgacacggttccgttcgactcgccaaaatgtcggccacagcgaccaggaccatcctgatgccccctcagcccaacagggaggacatcgatgccacctggaactatctccagaccggcatcaccaagatcatgctcaatcttcaagatggcatggatatgacaacttacatgggcatctatacggcggttcacaatttttgcacgtctcagaaagccgtcacaattagcaactcgaccaacgtgggccaagctcacagaggggcacatctactcggagaggacttgtatcgcaagctgaaggggcatctcaacgagcacctcgatcagctgtgtcacgactccaaggcgcatagcgatgaggcactgttggcattctatatcagagaatgggacaggtacaccatggctgccaagtatgttcaccacctcttccgataccttaacaggcattgggtgaagcgtgagatggatgaagggaaaaagaacacctacgacatctacactcttcatttgtatcagtggcggactgagttcttcgcgatggtccacgagaaggtcatgggcgccgtgctcaagctggtggagaagcagaggaatggcgagacgatcgagcacggccagataaaacaggtcgtcgactctttcgtctctcttggcctcgacgagcacgacgcctccaagtccaccctcgatatataccgatctcatttcgagaaaccgttcgtggcggccacgaaagtcttctaccaggaagagtccaaacagttcgtcgctgagaacagcgtcgtcgagtatatgaagaaggctgaagccaggctggatgaagaagaagagagggtccggatgtacctgcataacgacattgcatcccccctcaagaagacttgtcacgaggccttgatagcagaccactcagccttgctgcgagacgagttccaggtgctcttggataacgaccgcgaagaggacatggcacgtatgtacaagcttctttctcgtatcgccgacggtctagaaccgctgcgccagaaatttgaagcgcacgtgagaaatgccggtcttgcggcagtcaccaaagtggcatccgatgccgagaaactagagccgaaagtctacgtggaggccttactggagacgcacacgcaatatcagtcgttggtgaagcgagcctttgccgacgagccagaattcacccgctcattagataatgcatgtcgagagtttgtgaatagaaacgacatttgcaaggctggctccaacaagtctcctgagttgttggccaaatataccgatgtgttgttacggaagagcggcactggtgttgaagaggccgagctagatgcaaccctaacccagatcatgacagtcttcaaatatatcgaagacaaagatgtgttccaaaagttttattcgcggatgctggcaagacgtttagtccatagcaattcgtcctctgatgatgcagagacgagcatgattagcaaactcaaggaagcttgcggcttcgagtatacgaacaaactgcagcgcatgttccaagatatgcaaatttcaaaggatctcaataccggattccgagagcacaccaagcagctcggcacgcaaccactcgattcgtcttactctattctcggaaccagtttctggcctttgagtgcaccgactaccactttcaacccaccagcggaaattcaacaagatattgagcggttctctctcttctacaagaacaagcatgaaggtcgcaagctcacgtggctttggcagctctgtaagggtgaggtcaagacaggatactgcaaatccaccaagacgccatacacctttcaagttagcgtatatcagatggccatcctcttattgttcaacgacaaagacgcccacacttacgaggacatattgtccgctacgcaattgacaagtgagtttcatgacgctgcgatgggtgtgcttctgaaagccaaagtcctcctcatgaagcctgagggcgacaagcctggtcctggcaagacattccatctgaattacgacttcaagaacaagaaaatccgtgtcaatctaaacattagcacaaagacggagtctaagcaagaggaggccgatacgaacaagactatcgaggaggatcgtcagttggtcttgcagtccgccattgtgcgtatcatgaaggccagaaagaagatgaagcatgctgtcctcgtgagcgaatgcatcaatcaaatcaagtcacgctttatgcctaagatagcagacatcaagaagaacattgagattcttcttgacaaagagtacttggagcgattagacgatgacgagctgggctatcttgcttgagagacttcaacctacacttacagaggaagcccaggagttcgcgatttggagtggtgaatgctttcatcagagttatggtgcagcagtctgaatgcaaatcctctacagttcatggtctatcgagcagggatcgagatggtagtcctttaaaacggcttggtgcatcgccaagtttcttgttgcatggccggtgttcaggaaatgaggatggcggcagcccgtatgaatttgccagggctatcccatcgtccctcttaatgaacatatcttacacgactttacggtgccgcggcgcgatatggtacacgttatcgacgcaatgatttgaccttcgtcgatgtcagtatcccatctctagtgccggaagactgtgtcaaggtctacggggcagagggatttgatatcataggggtagtatgcagttagcgtataattgctcggaggcattgcatagacagaaattcagctagatcagcttctacagtagcttctatcccagctattccgaac

SEQ ID NO: 8330 - DNA, 2310 bp, Muscodor strobelii
  misc_feature: SGI cDNA ID NO. 562558
  misc_feature: Encodes the peptide sequence at SEQ ID NO 8331
atgtcggccacagcgaccaggaccatcctgatgccccctcagcccaacagggaggacatcgatgccacctggaactatctccagaccggcatcaccaagatcatgctcaatcttcaagatggcatggatatgacaacttacatgggcatctatacggcggttcacaatttttgcacgtctcagaaagccgtcacaattagcaactcgaccaacgtgggccaagctcacagaggggcacatctactcggagaggacttgtatcgcaagctgaaggggcatctcaacgagcacctcgatcagctgtgtcacgactccaaggcgcatagcgatgaggcactgttggcattctatatcagagaatgggacaggtacaccatggctgccaagtatgttcaccacctcttccgataccttaacaggcattgggtgaagcgtgagatggatgaagggaaaaagaacacctacgacatctacactcttcatttgtatcagtggcggactgagttcttcgcgatggtccacgagaaggtcatgggcgccgtgctcaagctggtggagaagcagaggaatggcgagacgatcgagcacggccagataaaacaggtcgtcgactctttcgtctctcttggcctcgacgagcacgacgcctccaagtccaccctcgatatataccgatctcatttcgagaaaccgttcgtggcggccacgaaagtcttctaccaggaagagtccaaacagttcgtcgctgagaacagcgtcgtcgagtatatgaagaaggctgaagccaggctggatgaagaagaagagagggtccggatgtacctgcataacgacattgcatcccccctcaagaagacttgtcacgaggccttgatagcagaccactcagccttgctgcgagacgagttccaggtgctcttggataacgaccgcgaagaggacatggcacgtatgtacaagcttctttctcgtatcgccgacggtctagaaccgctgcgccagaaatttgaagcgcacgtgagaaatgccggtcttgcggcagtcaccaaagtggcatccgatgccgagaaactagagccgaaagtctacgtggaggccttactggagacgcacacgcaatatcagtcgttggtgaagcgagcctttgccgacgagccagaattcacccgctcattagataatgcatgtcgagagtttgtgaatagaaacgacatttgcaaggctggctccaacaagtctcctgagttgttggccaaatataccgatgtgttgttacggaagagcggcactggtgttgaagaggccgagctagatgcaaccctaacccagatcatgacagtcttcaaatatatcgaagacaaagatgtgttccaaaagttttattcgcggatgctggcaagacgtttagtccatagcaattcgtcctctgatgatgcagagacgagcatgattagcaaactcaaggaagcttgcggcttcgagtatacgaacaaactgcagcgcatgttccaagatatgcaaatttcaaaggatctcaataccggattccgagagcacaccaagcagctcggcacgcaaccactcgattcgtcttactctattctcggaaccagtttctggcctttgagtgcaccgactaccactttcaacccaccagcggaaattcaacaagatattgagcggttctctctcttctacaagaacaagcatgaaggtcgcaagctcacgtggctttggcagctctgtaagggtgaggtcaagacaggatactgcaaatccaccaagacgccatacacctttcaagttagcgtatatcagatggccatcctcttattgttcaacgacaaagacgcccacacttacgaggacatattgtccgctacgcaattgacaagtgagtttcatgacgctgcgatgggtgtgcttctgaaagccaaagtcctcctcatgaagcctgagggcgacaagcctggtcctggcaagacattccatctgaattacgacttcaagaacaagaaaatccgtgtcaatctaaacattagcacaaagacggagtctaagcaagaggaggccgatacgaacaagactatcgaggaggatccaacactaactcttgtgaagtccgccattgtgcgtatcatgaaggccagaaagaagatgaagcatgctgtcctcgtgagcgaatgcatcaatcaaatcaagtcacgctttatgcctaagatagcagacatcaagaagaacattgagattcttcttgacaaagagtacttggagcgattagacgatgacgagctgggctatcttgcttga

SEQ ID NO: 8331 - protein, 769 aa, Muscodor strobelii
  misc_feature: SGI Peptide ID NO. 562558
  misc_feature (24)..(670): Pfam Id: PF00888 Pfam Desc: Cullin family
  misc_feature (16)..(769): NCBI GI: 39971659 Blast Desc: MGG_07145 [Magnaporthe grisea 70-15] gi|145019619|gb|EDK03847.1| MGG_07145 [Magnaporthe grisea 70-15]
  misc_feature (1)..(769): NCBI GI: 256727609 Blast Desc: [Nectria haematococca mpVI 77-13-4]
  misc_feature (11)..(769): NCBI GI: 116194438 Blast Desc: CHGG_03817 [Chaetomium globosum CBS 148.51] gi|88179730|gb|EAQ87198.1| CHGG_03817 [Chaetomium globosum CBS 148.51]
  misc_feature (1)..(769): NCBI GI: 46136201 Blast Desc: FG09616.1 [Gibberella zeae PH-1]
  misc_feature (4)..(769): NCBI GI: 156050013 Blast Desc: SS1G_07592 [Sclerotinia sclerotiorum 1980] gi|154691994|gb|EDN91732.1| SS1G_07592 [Sclerotinia sclerotiorum 1980]
  misc_feature (1)..(769): NCBI GI: 154318042 Blast Desc: BC1G_03004 [Botryotinia fuckeliana B05.10] gi|150843662|gb|EDN18855.1| BC1G_03004 [Botryotinia fuckeliana B05.10]
  misc_feature (10)..(769): NCBI GI: 121701395 Blast Desc: cullin [Aspergillus clavatus NRRL 1] gi|119397105|gb|EAW07536.1| cullin [Aspergillus clavatus NRRL 1]
  misc_feature (78)..(769): NCBI GI: 171683549 Blast Desc: protein product [Podospora anserina] gi|170941734|emb|CAP67388.1| protein product [Podospora anserina]
  misc_feature (40)..(769): NCBI GI: 164429183 Blast Desc: NCU05204 [Neurospora crassa OR74A] gi|157072972|gb|EAA32967.2| NCU05204 [Neurospora crassa OR74A]
  misc_feature (11)..(769): NCBI GI: 115491899 Blast Desc: cullin-1 [Aspergillus terreus NIH2624] gi|114197437|gb|EAU39137.1| cullin-1 [Aspergillus terreus NIH2624]
MSATATRTILMPPQPNREDIDATWNYLQTGITKIMLNLQDGMDMTTYMGIYTAVHNFCTSQKAVTISNSTNVGQAHRGAHLLGEDLYRKLKGHLNEHLDQLCHDSKAHSDEALLAFYIREWDRYTMAAKYVHHLFRYLNRHWVKREMDEGKKNTYDIYTLHLYQWRTEFFAMVHEKVMGAVLKLVEKQRNGETIEHGQIKQVVDSFVSLGLDEHDASKSTLDIYRSHFEKPFVAATKVFYQEESKQFVAENSVVEYMKKAEARLDEEEERVRMYLHNDIASPLKKTCHEALIADHSALLRDEFQVLLDNDREEDMARMYKLLSRIADGLEPLRQKFEAHVRNAGLAAVTKVASDAEKLEPKVYVEALLETHTQYQSLVKRAFADEPEFTRSLDNACREFVNRNDICKAGSNKSPELLAKYTDVLLRKSGTGVEEAELDATLTQIMTVFKYIEDKDVFQKFYSRMLARRLVHSNSSSDDAETSMISKLKEACGFEYTNKLQRMFQDMQISKDLNTGFREHTKQLGTQPLDSSYSILGTSFWPLSAPTTTFNPPAEIQQDIERFSLFYKNKHEGRKLTWLWQLCKGEVKTGYCKSTKTPYTFQVSVYQMAILLLFNDKDAHTYEDILSATQLTSEFHDAAMGVLLKAKVLLMKPEGDKPGPGKTFHLNYDFKNKKIRVNLNISTKTESKQEEADTNKTIEEDPTLTLVKSAIVRIMKARKKMKHAVLVSECINQIKSRFMPKIADIKKNIEILLDKEYLERLDDDELGYLA

SEQ ID NO: 8332 - DNA, 3395 bp, Muscodor strobelii; identical to SEQ ID NO: 8329
  misc_feature: SGI EST ID NO. CUFF.20429.0
  misc_feature: Variant of the nucleotide sequence at SEQ ID NO 8330

SEQ ID NO: 8333 - DNA, 1872 bp, Muscodor strobelii
  misc_feature: SGI cDNA ID NO. 562559
  misc_feature: Elevated expression when VOC is produced
  misc_feature: Encodes the peptide sequence at SEQ ID NO 8334
atgagtcctttttcaaccaagtccgccctagggctggcaatcctcgctacttgcagcgtagcaaccgctggaaaagttgatgatttcgtgacgaaacaacgcgctgtgtctcttcaaggtgtactgaataacatcggtcctgatggctcgaaagcgtctggcgcttcttcaggagttgtcatagcctccccttcaacagaggaccccaattatttgtacacttgggtccgtgatgcatcccttacgttgaagatgctagtcgatgaattcctgctcggcaaaaaggagctccagaagcacatcgaggacttcatccactcccaagctgtcctgcaaactgtcacaaatccttcggggacgtttcttcccaacggcgtcggcctcggagaacccaagaataatattgatctcacccgattcaacggagcttggggcagaccacagagggatggacctgcacttcgcgccattgcgcttataacctattctaactggctcatatctcatggccagaagaccaaggcgaagcaagtcgtttggcctattatctcaaatgatctatcatatgtcggccagtattggaacacgacgggatttgatctttgggaagaggttaacggatcgagtttcttcactacccaaaaccagtaccgtgcccttgttgaaggcgcgacattgggaaagaagcttggggtcagatgcactggatgtgaccaggcagacaatgtggcctgtttcttgaacaatgcatactggaatggcgaatacttcattgccaacatcaacgtcgacaatggccgcgctggtaacgacgcgaacacaatgcttggctctatctccgtatttgatgtcaaggcaaaatgcgacgaccttagcatccagccctgcaacagccgagcattgtccagcttcaaggcctttgtcgatgtgttccggaacgagaccctgtatccaatcaacgcgggtatcccaaaaacgtcaggaattgctctgggacgctacactgaagatgtatactacaatggtaatccttggtatctgattacagccggagctgcagagtttctctacgatgctgctgcgcaatggaagagtcagggtgttctgaccatcgatgagacttcgctacctttctttcaagccatctacccagccgcccgcgcgaagaaatacactccctttggaaaatccccagagttccctaagatcatcaatgcagtgacgaagtatgccgatagcttcaccgaaatcctcgagaagtatatcccagcagatggttcactcgccgagcagttcaacaagaacgcaccattcaaaccactttccgccgaagacttgacctggtcatacgcagcattcatatccatggcagaacgccgcgccgggcaataccccccaagctgggtatccaagtcataccccagcataccgcaaacatgctcctctggatctaccaaaggcgtatacaagccagcgatcgccgccggagctcctaacgtgacagtcgagtgcacgaccaacgtgcgattccacgtcaacgcaacaacatactatggcgagaacatcttcgtatcaggaaattcatccgacctgggctctttcgacttcgccaacgcctggccgctcgatgccaacggctatacaagcgagcggcctctctggagcgcaactctagctctgacccccggccagacaatcagctatgtctacgtacgcgctgaagactgtgggcaagcccccatctgggagaactccaccgccaaccggaccctgattgtccctgcttgcgatcctaatgccgacgctaatacgatcgctatcactaccgatgatgcttgggacgggccgacggggaccagtgggggttgctag

SEQ ID NO: 8334 - protein, 623 aa, Muscodor strobelii
  misc_feature: SGI Peptide ID NO. 562559
  misc_feature (505)..(605): Pfam Id: PF00686 Pfam Desc: Starch binding domain
  misc_feature (35)..(458): Pfam Id: PF00723 Pfam Desc: Glycosyl hydrolases family 15
  misc_feature (505)..(596): Pfam Id: PF00686 Pfam Desc: Starch binding domain
  misc_feature (1)..(623): NCBI GI: 461509 Blast Desc: AMYG_HORRE RecName: Full=Glucoamylase P; AltName: Full=Glucan 1,4-alpha-glucosidase; AltName: Full=1,4-alpha-D-glucan glucohydrolase; Flags: Precursor 1, P P
  misc_feature (12)..(623): NCBI GI: 156032806 Blast Desc: SS1G_13809 [Sclerotinia sclerotiorum 1980] gi|154699211|gb|EDN98949.1| SS1G_13809 [Sclerotinia sclerotiorum 1980]
  misc_feature (17)..(623): NCBI GI: 171688444 Blast Desc: protein product [Podospora anserina] gi|170944184|emb|CAP70294.1| protein product [Podospora anserina]
  misc_feature (26)..(623): NCBI GI: 261352263 Blast Desc: glucoamylase P [Verticillium albo-atrum VaMs.102]
  misc_feature (24)..(613): NCBI GI: 12666724 Blast Desc: glucoamylase [Talaromyces emersonii]
  misc_feature (13)..(596): NCBI GI: 154303741 Blast Desc: BC1G_08755 [Botryotinia fuckeliana B05.10] gi|150854549|gb|EDN29741.1| BC1G_08755 [Botryotinia fuckeliana B05.10]
  misc_feature (8)..(596): NCBI GI: 242807399 Blast Desc: glucan 1,4-alpha-glucosidase, [Talaromyces stipitatus ATCC 10500] gi|218715573|gb|EED14995.1| glucan 1,4-alpha-glucosidase, [Talaromyces stipitatus ATCC 10500]
  misc_feature (9)..(595): NCBI GI: 70988699 Blast Desc: glucan 1,4-alpha-glucosidase [Aspergillus fumigatus Af293] gi|66846837|gb|EAL87168.1| glucan 1,4-alpha-glucosidase, [Aspergillus fumigatus Af293]
  misc_feature (9)..(595): NCBI GI: 159128620 Blast Desc: glucan 1,4-alpha-glucosidase, [Aspergillus fumigatus A1163]
  misc_feature (4)..(594): NCBI GI: 258567690 Blast Desc: glucoamylase [Uncinocarpus reesii 1704] gi|237906035|gb|EEP80436.1| glucoamylase [Uncinocarpus reesii 1704]
  misc_feature (1)..(623): SWISSPROT Homolog: EC 3.2.1.3 Glucan 1,4-alpha-glucosidase
  misc_feature: Useful for introducing or modulating the production of volatile compounds
MSPFSTKSALGLAILATCSVATAGKVDDFVTKQRAVSLQGVLNNIGPDGSKASGASSGVVIASPSTEDPNYLYTWVRDASLTLKMLVDEFLLGKKELQKHIEDFIHSQAVLQTVTNPSGTFLPNGVGLGEPKNNIDLTRFNGAWGRPQRDGPALRAIALITYSNWLISHGQKTKAKQVVWPIISNDLSYVGQYWNTTGFDLWEEVNGSSFFTTQNQYRALVEGATLGKKLGVRCTGCDQADNVACFLNNAYWNGEYFIANINVDNGRAGNDANTMLGSISVFDVKAKCDDLSIQPCNSRALSSFKAFVDVFRNETLYPINAGIPKTSGIALGRYTEDVYYNGNPWYLITAGAAEFLYDAAAQWKSQGVLTIDETSLPFFQAIYPAARAKKYTPFGKSPEFPKIINAVTKYADSFTEILEKYIPADGSLAEQFNKNAPFKPLSAEDLTWSYAAFISMAERRAGQYPPSWVSKSYPSIPQTCSSGSTKGVYKPAIAAGAPNVTVECTTNVRFHVNATTYYGENIFVSGNSSDLGSFDFANAWPLDANGYTSERPLWSATLALTPGQTISYVYVRAEDCGQAPIWENSTANRTLIVPACDPNADANTIAITTDDAWDGPTGTSGGC

SEQ ID NO: 8335 - DNA, 2389 bp, Muscodor strobelii
  misc_feature: SGI EST ID NO. CUFF.20356.0
  misc_feature: Variant of the nucleotide sequence at SEQ ID NO 8333
cttcgagccccggtcctatgagaagactcgaatggcatcttggccatcatcaattgtcaactcgacgataaccccagtcgatttctccatcatggcaaatcacccctgtattcggtccgaaaattcgctaactcctcgaaatatggccgagagatgcacataaacgcctcgttatcgaacagaatctcacgctagctctgcagtaatcgcggccaagtgctgttgaacctgttgacccatgtcgtatgaggcaattcgaaaagactgattagcacgtgaacgtgaatgaaaaaccctacataggtccttgatataacagcaggcaacccacgagaagccatgtctgctgaaattggtcttctctatctcactgtttcgttgcccgttgtcatccaagagtaagatgagtcctttttcaaccaagtccgccctagggctggcaatcctcgctacttgcagcgtagcaaccgctggaaaagttgatgatttcgtgacgaaacaacgcgctgtgtctcttcaaggtgtactgaataacatcggtcctgatggctcgaaagcgtctggcgcttcttcaggagttgtcatagcctccccttcaacagaggaccccaattatttgtacacttgggtccgtgatgcatcccttacgttgaagatgctagtcgatgaattcctgctcggcaaaaaggagctccagaagcacatcgaggacttcatccactcccaagctgtcctgcaaactgtcacaaatccttcggggacgtttcttcccaacggcgtcggcctcggagaacccaagaataatattgatctcacccgattcaacggagcttggggcagaccacagagggatggacctgcacttcgcgccattgcgcttataacctattctaactggctcatatctcatggccagaagaccaaggcgaagcaagtcgtttggcctattatctcaaatgatctatcatatgtcggccagtattggaacacgacgggatttgatctttgggaagaggttaacggatcgagtttcttcactacccaaaaccagtaccgtgcccttgttgaaggcgcgacattgggaaagaagcttggggtcagatgcactggatgtgaccaggcagacaatgtggcctgtttcttgaacaatgcatactggaatggcgaatacttcattgccaacatcaacgtcgacaatggccgcgctggtaacgacgcgaacacaatgcttggctctatctccgtatttgatgtcaaggcaaaatgcgacgaccttagcatccagccctgcaacagccgagcattgtccagcttcaaggcctttgtcgatgtgttccggaacgagaccctgtatccaatcaacgcgggtatcccaaaaacgtcaggaattgctctgggacgctacactgaagatgtatactacaatggtaatccttggttagtaatatcacctgctcagtagaaatatcaacgttctcacatcccacaggtatctgattacagccggagctgcagagtttctctacgatgctgctgcgcaatggaagagtcagggtgttctgaccatcgatgagacttcgctacctttctttcaagccatctacccagccgcccgcgcgaagaaatacactccctttggaaaatccccagagttccctaagatcatcaatgcagtgacgaagtatgccgatagcttcaccgaaatcctcgagaagtatatcccagcagatggttcactcgccgagcagttcaacaagaacgcaccattcaaaccactttccgccgaagacttgacctggtcatacgcagcattcatatccatggcagaacgccgcgccgggcaataccccccaagctgggtatccaagtcataccccagcataccgcaaacatgctcctctggatctaccaaaggcgtatacaagccagcgatcgccgccggagctcctaacgtgacagtcgagtgcacgaccaacgtgcgattccacgtcaacgcaacaacatactatggcgagaacatcttcgtatcaggaaattcatccgacctgggctctttcgacttcgccaacgcctggccgctcgatgccaacggctatacaagcgagcggcctctctggagcgcaactctagctctgacccccggccagacaatcagctatgtctacgtacgcgctgaagactgtgggcaagcccccatctgggagaactccaccgccaaccggaccctgattgtccctgcttgcgatcctaatgccgacgctaatacgatcgctatcactaccgatgatgcttgggacgggccgacggggaccagtgggggttgctagattagaatacataataggtatagaataaaatctaatagacttgtttaacttgcttgttacgc

SEQ ID NO: 8336 - DNA, 1224 bp, Muscodor strobelii
  misc_feature: SGI cDNA ID NO. 562560
  misc_feature: Encodes the peptide sequence at SEQ ID NO 8337
atggcgtatctacacgccagatattggctatcactcttcgtgtttgcagctgttgtgcttgcatcgggtgtcaagaggcatgccgaagcgtcagacgccttcacccttgattcgatacacgagcaactccaaacgtgcagcgtagtacaagaactcaatgccgtcaaggctgccgctgcgtctgaaacctccagtttaacctcaaggatcttcgccgtcctctttcccggcagccctgccgtaaatgccctactcgcaactctatacatctccggcccgcccaacttcctcctcgcactatgcccgaccaatatagatcccgcctcgctctctgtgatggtggcgtttgcggtgggtggtttgatgggagacaccctcttccacttgttgcctgagatatttcttggcgaagatgatccggatagtgtgcgcttcgtactggtcgagccgaatcgtaacttagtgctggggctcgctatcatggtaggatttatgacttttgtcgcaatggacaagggtctgcgaatcgccaccggtggtgaaggtcatactcataatcacgagagccatgagcacgagaaagtttcatctggaacttcaacctcgctgcagaatggtaccaaggaggcgaagaatcgcaagaagggaagcaacaaacccgaggccattgagaaaacagagactatgacgaaagaggtgaaccccagcgtgaagcttggcgggtatctcaatttgatcgccgatttcacccataatatcactgatggtttggcaatggcagcttcgttttacgcatctcctacaatcggtgctacaacgaccgtggccgtgttctttcacgaaataccgcacgaggttggcgattttgctctgcttgtccagtcgggcttctccaaaagacaagcgatgggagcccagttcgtgacggctataggagctctcctaggcacattgatcggaatcgctgttcaggagtttggaggcaacagtagttctggaggaagtgtcggattgacggagggggtttggggtacaagtctgtcacttggagacttgcttctgccgttcaccgccggcacattcctctatgtcgggacagtcgctgttatacccgagttattagagacgggtccagacaaggcattagagtttcagaggatgctaacacaattcgcagctgttgcactgggtgctggaattatgttgtatatcagctggagctaa

SEQ ID NO: 8337 - protein, 407 aa, Muscodor strobelii
  misc_feature: SGI Peptide ID NO. 562560
  misc_feature (77)..(405): Pfam Id: PF02535 Pfam Desc: ZIP Zinc transporter
  misc_feature (110)..(405): Pfam Id: PF02535 Pfam Desc: ZIP Zinc transporter
  misc_feature (1)..(407): NCBI GI: 156032714 Blast Desc: SS1G_13762 [Sclerotinia sclerotiorum 1980] gi|154699165|gb|EDN98903.1| SS1G_13762 [Sclerotinia sclerotiorum 1980]
  misc_feature (32)..(406): NCBI GI: 46121831 Blast Desc: FG05293.1 [Gibberella zeae PH-1]
  misc_feature (2)..(407): NCBI GI: 258573103 Blast Desc: conserved [Uncinocarpus reesii 1704] gi|237900999|gb|EEP75400.1| conserved [Uncinocarpus reesii 1704]
  misc_feature (23)..(406): NCBI GI: 164425128 Blast Desc: NCU06380 [Neurospora crassa OR74A] gi|157070801|gb|EAA32982.2| NCU06380 [Neurospora crassa OR74A]
  misc_feature (39)..(407): NCBI GI: 119191526 Blast Desc: CIMG_00140 [Coccidioides immitis RS]
  misc_feature (39)..(407): NCBI GI: 261192639 Blast Desc: imidazoleglycerol-phosphate dehydratase [Ajellomyces dermatitidis SLH14081] gi|239589208|gb|EEQ71851.1| imidazoleglycerol-phosphate dehydratase [Ajellomyces dermatitidis
  misc_feature (7)..(407): NCBI GI: 154301582 Blast Desc: BC1G_10118 [Botryotinia fuckeliana B05.10] gi|150855780|gb|EDN30972.1| BC1G_10118 [Botryotinia fuckeliana B05.10]
  misc_feature (34)..(406): NCBI GI: 255944645 Blast Desc: Pc20g05560 [Penicillium chrysogenum Wisconsin 54-1255] gi|211587825|emb|CAP85885.1| Pc20g05560 [Penicillium chrysogenum Wisconsin 54-1255]
  misc_feature (39)..(402): NCBI GI: 240106435 Blast Desc: ZIP Zinc transporter family protein [Coccidioides posadasii C735 delta SOWgp]
  misc_feature (4)..(406): NCBI GI: 238837619 Blast Desc: imidazoleglycerol-phosphate dehydratase [Microsporum canis CBS 113480]
MAYLHARYWLSLFVFAAVVLASGVKRHAEASDAFTLDSIHEQLQTCSVVQELNAVKAAAASETSSLTSRIFAVLFPGSPAVNALLATLYISGPPNFLLALCPTNIDPASLSVMVAFAVGGLMGDTLFHLLPEIFLGEDDPDSVRFVLVEPNRNLVLGLAIMVGFMTFVAMDKGLRIATGGEGHTHNHESHEHEKVSSGTSTSLQNGTKEAKNRKKGSNKPEAIEKTETMTKEVNPSVKLGGYLNLIADFTHNITDGLAMAASFYASPTIGATTTVAVFFHEIPHEVGDFALLVQSGFSKRQAMGAQFVTAIGALLGTLIGIAVQEFGGNSSSGGSVGLTEGVWGTSLSLGDLLLPFTAGTFLYVGTVAVIPELLETGPDKALEFQRMLTQFAAVALGAGIMLYISWS

SEQ ID NO: 8338 - DNA, 1539 bp, Muscodor strobelii
  misc_feature: SGI EST ID NO. CUFF.20331.0
  misc_feature: Variant of the nucleotide sequence at SEQ ID NO 8336
cggcgttgttcggagggccaaaaacggagctgaaaagaggtcgtcattatatgatctcgcgatctctcaggaaatactgcacaactagcacgaatttcggtcttcttagaatggcgtatctacacgccagatattggctatcactcttcgtgtttgcagctgttgtgcttgcatcgggtgtcaagaggcatgccgaagcgtcagacgccttcacccttgattcgatacacgagcaactccaaacgtgcagcgtagtacaagaactcaatgccgtcaaggctgccgctgcgtctgaaacctccagtttaacctcaaggatcttcgccgtcctctttcccggcagccctgccgtaaatgccctactcgcaactctatacatctccggcccgcccaacttcctcctcgcactatgcccgaccaatatagatcccgcctcgctctctgtgatggtggcgtttgcggtgggtggtttgatgggagacaccctcttccacttgttgcctgagatatttcttggcgaagatgatccggatagtgtgcgcttcgtactggtcgagccgaatcgtaacttagtgctggggctcgctatcatggtaggatttatgacttttgtcgcaatggacaagggtctgcgaatcgccaccggtggtgaaggtcatactcataatcacgagagccatgagcacgagaaagtttcatctggaacttcaacctcgctgcagaatggtaccaaggaggcgaagaatcgcaagaagggaagcaacaaacccgaggccattgagaaaacagagactatgacgaaagaggtgaaccccagcgtgaagcttggcgggtatctcaatttgatcgccgatttcacccataatatcactgatggtttggcaatggcagcttcgttttacgcatctcctacaatcggtgctacaacgaccgtggccgtgttctttcacgaaataccgcacgaggttggcgattttgctctgcttgtccagtcgggcttctccaaaagacaagcgatgggagcccagttcgtgacggctataggagctctcctaggcacattgatcggaatcgctgttcaggagtttggaggcaacagtagttctggaggaagtgtcggattgacggagggggtttggggtacaagtctgtcacttggagacttgcttctgccgttcaccgccggcacattcctctatgtcgggacagtcgctgttatacccgagttattagagacgggtccagacaaggcattagagtttcagaggatgctaacacaattcgcagctgttgcactgggtgctggaattatgttgtatatcagctggagctaatgaagtatggtcagcctaggtgagatcaaggctactggcctgtgtcgaatttgaaagttggaatatggtgcacaaagatggcacgaaatcagtttcaagcgttgcaaacattgtacaggtggccaatcttagagtagatgatattttccacctagagtcatgtgcccaatagacaaattagatagataaatgcttgatattgtag

SEQ ID NO: 8339 - DNA, 1449 bp, Muscodor strobelii
  misc_feature: SGI cDNA ID NO. 562561
  misc_feature: Reduced expression when VOC is produced
  misc_feature: Encodes the peptide sequence at SEQ ID NO 8340
atgtcggctcccgaaccaacacggaggagctctacaaagagcacaatggtcgttcatatcgataatcattatcaatccaagatctatacgacatcgtcggtggtatctggacatgtcgagatcaacgtgcatcaagatgtggacttcagtttactgcagatcttgctattaggaacaagcaggactcgcattgatgctgtttcgattcctcaggccacatctcacacatttctcaagttaacaatgcccataccgagggaattctaccctgagccacggcgcttcgaagcaggaaacacgtacacgattccatttcacttcgttatccctgatcaacttaccatcaatgcttgcagccatcgtatagcaaacgaaactctgaaggaacaacacgtgaggctaccacctacggttggaacctgggataaggatgactttgctccgctcatgtcgcgggtcacgtaccaaatcagggcgagggcttacaacgacgaggcagaagggccaagcgtcaaggtcatggaagcagcccaggagatcaaggtgctaccagtagttcctgaggatgcccctctggttgtcaccaagcacgacaagctatatgtcatgtctaagacgaaaacattgagaaagtcgattctatcagcaaagtcgggcaagatcacagtttctgcgaagcaacctagccccgtgatgctcaactgtgatgcccgatccgccgcgccctcactcgcgcaactagatctggtattcgaacctacatcaaatgaatctcagccgcccaaaatcacgggcgtttcgtcgaagatatctgcagtgacgtactatagtgcaggaggagttaaccagtatcctaatctcaaagattggagccgcagctatgggaccgagggtcggggttcttatacgggatcgatctctctccctacgacgtccatcgagaatgcgagttggaagcagcatatctcggagcaagctagacgagactctggctactgttcagaagtgctttcagactctgatgaagcggcagttgcgtcgtcaggtcaaagcagacgtgcacgcgccaacaagcgggccccgtatcactatacagccaagatccagcttccaatcgaattacctgtggctaagaggcagtttgtgcccacattccactcgtgcatcacatcgcgagtgtatgtgttgtcgatgacggttacgttgtctacatcgacgggatcaagcaccaacatgtcgctttcggtaccgctgcaagttggagtggcacctcaacaggggagccgtgtcgacgcaactggtttacccactttcgaggcggccctagaggcagcggaactggagatagacccattcatgcaggctcgcactatgtcagtgccgaacattgacttccagagcgaactccccggatatgcagagctcagcgggactcgaatcgttgtatga

SEQ ID NO: 8340 - protein, 482 aa, Muscodor strobelii
  misc_feature: SGI Peptide ID NO. 562561
  misc_feature (8)..(422): NCBI GI: 116196530 Blast Desc: CHGG_04863 [Chaetomium globosum CBS 148.51] gi|88180776|gb|EAQ88244.1| CHGG_04863 [Chaetomium globosum CBS 148.51]
  misc_feature (13)..(469): NCBI GI: 171688466 Blast Desc: protein product [Podospora anserina] gi|170944195|emb|CAP70305.1| protein product [Podospora anserina]
  misc_feature (6)..(473): NCBI GI: 39976029 Blast Desc: MGG_06059 [Magnaporthe grisea 70-15] gi|145011659|gb|EDJ96315.1| MGG_06059 [Magnaporthe grisea 70-15]
  misc_feature (2)..(482): NCBI GI: 256720717 Blast Desc: NECHADRAFT_85700 [Nectria haematococca mpVI 77-13-4]
  misc_feature (8)..(475): NCBI GI: 46121833 Blast Desc: FG05294.1 [Gibberella zeae PH-1]
  misc_feature (13)..(440): NCBI GI: 85107599 Blast Desc: NCU06376 [Neurospora crassa OR74A] gi|28924015|gb|EAA33174.1| [Neurospora crassa OR74A]
  misc_feature (8)..(420): NCBI GI: 256728000 Blast Desc: NECHADRAFT_46030 [Nectria haematococca mpVI 77-13-4]
  misc_feature (6)..(429): NCBI GI: 156040467 Blast Desc: SS1G_12250 [Sclerotinia sclerotiorum 1980] gi|154696306|gb|EDN96044.1| SS1G_12250 [Sclerotinia sclerotiorum 1980]
  misc_feature (9)..(420): NCBI GI: 46133797 Blast Desc: FG09038.1 [Gibberella zeae PH-1]
  misc_feature (29)..(461): NCBI GI: 115390096 Blast Desc: conserved [Aspergillus terreus NIH2624] gi|114194949|gb|EAU36649.1| conserved [Aspergillus terreus NIH2624]
  misc_feature: Useful for introducing or modulating the production of volatile compounds
MSAPEPTRRSSTKSTMVVHIDNHYQSKIYTTSSVVSGHVEINVHQDVDFSLLQILLLGTSRTRIDAVSIPQATSHTFLKLTMPIPREFYPEPRRFEAGNTYTIPFHFVIPDQLTINACSHRIANETLKEQHVRLPPTVGTWDKDDFAPLMSRVTYQIRARAYNDEAEGPSVKVMEAAQEIKVLPVVPEDAPLVVTKHDKLYVMSKTKTLRKSILSAKSGKITVSAKQPSPVMLNCDARSAAPSLAQLDLVFEPTSNESQPPKITGVSSKISAVTYYSAGGVNQYPNLKDWSRSYGTEGRGSYTGSISLPTTSIENASWKQHISEQARRDSGYCSEVLSDSDEAAVASSGQSRRARANKRAPYHYTAKIQLPIELPVAKRQFVPTFHSCITSRVYVLSMTVTLSTSTGSSTNMSLSVPLQVGVAPQQGSRVDATGLPTFEAALEAAELEIDPFMQARTMSVPNIDFQSELPGYAELSGTRIVV

SEQ ID NO: 8341 - DNA, 2405 bp, Muscodor strobelii
  misc_feature: SGI EST ID NO. CUFF.20358.0
  misc_feature: Variant of the nucleotide sequence at SEQ ID NO 8339
gcgtgactcaattgtgtatccactcgccatgtactttattaaaagatcgggaccctagtctgaccaacatcgccaatgtcaagtcaaaggcgtagctagggaggttgattattaaatccgaaagcgggccaagtccttttgcattaagacaaaccaacttattgaagagcacctagatctgttatatagccttcgaatcaccaccactttcagcttggcaaccttttgtaacaagcagacatattttatatgttgatttgacggggtctatatttctgttcgagcaattcagcagaatccatttacatttctcaccaacaacctacacaactgattcccagtgtggactgtaaggatcagacaagggaggcaacgctccaccgccagttattgtcaaccatcgggagcttggagggggttcgtcatcagcgtagggttggaaagcaaatcccccaactgacctcacccctcactcttacaccaccctactctactgtgtttcgagtcgctacgcatatcaggtgcaacggtcacgcgacgccacaaaattcagcttcgagctacaataacaccaagatgtcggctcccgaaccaacacggaggagctctacaaagagcacaatggtcgttcatatcgataatcattatcaatccaagatctatacgacatcgtcggtggtatctggacatgtcgagatcaacgtgcatcaagatgtggacttcagtttactgcagatcttgctattaggaacaagcaggactcgcattgatgctgtttcgattcctcaggccacatctcacacatttctcaagttaacaatgcccataccgagggaattctaccctgagccacggcgcttcgaagcaggaaacacgtacacgattccatttcacttcgttatccctgatcaacttaccatcaatgcttgcagccatcgtatagcaaacgaaactctgaaggaacaacacgtgaggctaccacctacggttggaacctgggataaggatgactttgctccgctcatgtcgcgggtcacgtaccaaatcagggcgagggcttacaacgacgaggcagaagggccaagcgtcaaggtcatggaagcagcccaggagatcaaggtgctaccagtagttcctgaggatgcccctctggttgtcaccaagcacgacaagctatatgtcatgtctaagacgaaaacattgagaaagtcgattctatcagcaaagtcgggcaagatcacagtttctgcgaagcaacctagccccgtgatgctcaactgtgatgcccgatccgccgcgccctcactcgcgcaactagatctggtattcgaacctacatcaaatgaatctcagccgcccaaaatcacgggcgtttcgtcgaagatatctgcagtgacgtactatagtgcaggaggagttaaccagtatcctaatctcaaagattggagccgcagctatgggaccgagggtcggggttcttatacgggatcgatctctctccctacgacgtccatcgagaatgcgagttggaagcagcatatctcggagcaagctagacgagactctggctactgttcagaagtgctttcagactctgatgaagcggcagttgcgtcgtcaggtcaaagcagacgtgcacgcgccaacaagcgggccccgtatcactatacagccaagatccagcttccaatcgaattacctgtggctaagaggcagtttgtgcccacattccactcgtgcatcacatcgcgagtgtatgtgttgtcgatgacggttacgttgtctacatcgacgggatcaagcaccaacatgtcgctttcggtaccgctgcaagttggagtggcacctcaacaggggagccgtgtcgacgcaactggtttacccactttcgaggcggccctagaggcagcggaactggagatagacccattcatgcaggctcgcactatgtcagtgccgaacattgacttccagagcgaactccccggatatgcagagctcagcgggactcgaatcgttgtatgagtttgtgacgtgcacttacactcaaaagttggaagtagaggcaatttgacctcattggaatttgactttcggttgtgttagcggcagtttgtaagattggttctcgattgacaaaacttcaagactcggaaccggaaaaggagcacgatgaacaagttaggtttagcaggcccgttcatgatggatgatacccttacctacgagtgcatcatatatatacccctggcgcattggatgttttttaagtttataaattgttaatgaggatacggttgtggacttggaacggacgggatcatgacggctatgaaacagagtagtatcaaataacttaagcagtaccttacacctttaaatcacataattatattcaattctca

SEQ ID NO: 8342 - DNA, 1971 bp, Muscodor strobelii
  misc_feature: SGI cDNA ID NO. 562562
  misc_feature: Reduced expression when VOC is produced
  misc_feature: Encodes the peptide sequence at SEQ ID NO 8343
atggctgaagtagaagagcccgtgttcagctcgcttgccgaccgcatcgccgccttgaacaagcagaagaacttcacggcccctccgcccgcgacagcgaaacgcgcgccgcccccgcctcccaccaagaagactcccaatgtgagtgtagagtcggtacaagccacgccgactgctccggctcggccacagaggagagaccctcctcccgtgcctgcgaccaccgtcagatccccagagccagccgtcgagacgtcccccgccttgcctgtgcgcaagacaccatccatcccgccgctgcccacgcgcaagagctcctcacaggccatctcgacatcgaccccgaccccgactctaccaccacgtaggcctacgaaccagctcgcgacaaggagagactcaaactcctctatagtgtcccatgtgtccagcatctccaacctgtccctctcgagaacaaacactgccacagccgagtcgccagcagccaggcgagtccttgcgcccaccttcgatcaatcaaagctgccgcctctggccccctcgcgcaaggagagggaagcccaggctgcgaaagaggctgccgagcgagagagggccgaagtggccgacccgcctccagttgactcgtccggtcgccctggcattccgcgactcccttccaggcctgccaccaccccagccgctgtgcaagacaacgaggctcctcccacactccctcgtcgtcttccacctcctgcctctgcctacgtgaggccaaagacagttctacaaggttcgtcaagacccccgccagtgcctacaaaccggccggaacctagctcgccacctccggtaccgctttcgtcccgtcccacctttgctcaagtcgaagccgtttctgttcgtacaactgctgctggtcagacagtcagttgtatgatctgcagggacttctctggcccagacaacgtagctgcacaatacccctatcagacgctaccgcgagatgatcccgtcggttatctagctcgtgttctctgctcgccattcccttccgccacggacaaggctcgcgctatcttcacatggtgccaccacaatattgcctacaatgtcgaagatttctttggcaagtgcgtcaagtcccgtaatgtaaacgagaccatcttcatggggaaagctgtttgccagggctatgccgaagtctatcgtgccgttgcagaaagagctggcctagaatgtgtcatggttgttggtcatggcaagggatacggttatacaccccttgaaaagggacaagcaccgccacccaaaaatgccactggccatgcatggaatgctgtgcgcatcgataatggggaatggaaactgttggatgcttgctggggcgctggccacgttaatgatgaaaaatacaacaaagctttcaatcccaagatgttcacgctcaccaacgagcgctttggcgagtcgcattacccaagcaacgaccggcactttttccgcgaggatggtagggttctcccatggccagaatactacataggacctacgggagtacccaaaccgcagtggtgcggtaacgcagctcaggaaggtctttccgagtacgaatacagtcctgcagaaaggcatattccagtatatagcggcgagaatgtccgtttccagttctccaaggtgtgtgaacactggacgcatgagaaacatggtaaagggccgccatacctactccttctcaagatccacggcgtcgatggtcggaaggaagacttggtgccactcgacactgatggtaagttttggtggtggtgtgatataccgtcccgcgatctgggagctccgggcatgaaggtccagttgtttgccctgactgttcttaatggtaaggacgcgagaggcgtgacaaagaacgagtattttaagattaagggaagtggttgtttctcgatgagctgggctatttggtgcacgtgggatctggtctaa

SEQ ID NO: 8343 - protein, 656 aa, Muscodor strobelii
  misc_feature: SGI Peptide ID NO. 562562
  misc_feature (1)..(655): NCBI GI: 39952275 Blast Desc: MGG_01780 [Magnaporthe grisea 70-15] gi|145020365|gb|EDK04494.1| MGG_01780 [Magnaporthe grisea 70-15]
  misc_feature (1)..(610): NCBI GI: 261352409 Blast Desc: conserved [Verticillium albo-atrum VaMs.102]
  misc_feature (1)..(656): NCBI GI: 85085231 Blast Desc: NCU04382 [Neurospora crassa OR74A] gi|28918551|gb|EAA28223.1| conserved [Neurospora crassa OR74A] gi|40882241|emb|CAF06066.1| conserved [Neurospora crassa]
  misc_feature (1)..(656): NCBI GI: 46136133 Blast Desc: FG09582.1 [Gibberella zeae PH-1]
  misc_feature (1)..(656): NCBI GI: 256727018 Blast Desc: NECHADRAFT_99278 [Nectria haematococca mpVI 77-13-4]
  misc_feature (267)..(656): NCBI GI: 156061917 Blast Desc: SS1G_03104 [Sclerotinia sclerotiorum 1980] gi|154700505|gb|EDO00244.1| SS1G_03104 [Sclerotinia sclerotiorum 1980]
  misc_feature (1)..(567): NCBI GI: 116196584 Blast Desc: CHGG_04890 [Chaetomium globosum CBS 148.51] gi|88180803|gb|EAQ88271.1| CHGG_04890 [Chaetomium globosum CBS 148.51]
  misc_feature (98)..(656): NCBI GI: 121699734 Blast Desc: ACLA_084010 [Aspergillus clavatus NRRL 1] gi|119396274|gb|EAW06706.1| ACLA_084010 [Aspergillus clavatus NRRL 1]
  misc_feature (279)..(655): NCBI GI: 154311754 Blast Desc: BC1G_06336 [Botryotinia fuckeliana B05.10] gi|150850847|gb|EDN26040.1| BC1G_06336 [Botryotinia fuckeliana B05.10]
  misc_feature (111)..(656): NCBI GI: 169614594 Blast Desc: SNOG_10443 [Phaeosphaeria nodorum SN15] gi|111060717|gb|EAT81837.1| SNOG_10443 [Phaeosphaeria nodorum SN15]
  misc_feature: Useful for introducing or modulating the production of volatile compounds
MAEVEEPVFSSLADRIAALNKQKNFTAPPPATAKRAPPPPPTKKTPNVSVESVQATPTAPARPQRRDPPPVPATTVRSPEPAVETSPALPVRKTPSIPPLPTRKSSSQAISTSTPTPTLPPRRPTNQLATRRDSNSSIVSHVSSISNLSLSRTNTATAESPAARRVLAPTFDQSKLPPLAPSRKEREAQAAKEAAERERAEVADPPPVDSSGRPGIPRLPSRPATTPAAVQDNEAPPTLPRRLPPPASAYVRPKTVLQGSSRPPPVPTNRPEPSSPPPVPLSSRPTFAQVEAVSVRTTAAGQTVSCMICRDFSGPDNVAAQYPYQTLPRDDPVGYLARVLCSPFPSATDKARAIFTWCHHNIAYNVEDFFGKCVKSRNVNETIFMGKAVCQGYAEVYRAVAERAGLECVMVVGHGKGYGYTPLEKGQAPPPKNATGHAWNAVRIDNGEWKLLDACWGAGHVNDEKYNKAFNPKMFTLTNERFGESHYPSNDRHFFREDGRVLPWPEYYIGPTGVPKPQWCGNAAQEGLSEYEYSPAERHIPVYSGENVRFQFSKVCEHWTHEKHGKGPPYLLLLKIHGVDGRKEDLVPLDTDGKFWWWCDIPSRDLGAPGMKVQLFALTVLNGKDARGVTKNEYFKIKGSGCFSMSWAIWCTWDLV

SEQ ID NO: 8344 - DNA, 666 bp, Muscodor strobelii
  misc_feature: SGI cDNA ID NO. 562563
  misc_feature: Encodes the peptide sequence at SEQ ID NO 8345
atgagcagtcaggccatggagacgatacacttcgggccctttgaggtcacgacacaggtcttcatgacaacaccccactcattcgccgtagtgaatctcaaaccgctactgcccggacacatcctagtgtgtccaaagacaccccacaagcggctcacagatctcacaccacccgagctaacagatctcttcaccaccgtgcaacgcgtccagcggatgctagcccagcactacttcacagactcgccctcaaacgcatcctcaaacttagcaaccccaacaaaagacacctcatcaaacccagaatcaggctccttcaacatagcaatccaagacgggatcgaagcaggccaaacagtgccccatctacacgtgcacgtgatcccgcggatccgcggcgcaacatcaaagaacccagaaacagacggcgacgccctctacgagtccatggccgccgagccgggaaacgtaggaggtgcgctctgggaccgggaactgaaaagtcggccgaaggctggaggtgcgttcccgcggatcgaggaccaggatcggttggcacggtctatggatgagatggaggctgaggctgaggagtttaagagtgtattaagaagtatggatggtggtgagagtgctgttaatggcgagggtgaaagtagtagataa

SEQ ID NO: 8345 - protein, 221 aa, Muscodor strobelii
  misc_feature: SGI Peptide ID NO. 562563
  misc_feature (13)..(133): Pfam Id: PF01230 Pfam Desc: HIT domain
  misc_feature (1)..(206): NCBI GI: 261359732 Blast Desc: Bis(5'-adenosyl)-triphosphatase [Verticillium albo-atrum VaMs.102]
  misc_feature (2)..(215): NCBI GI: 39951749 Blast Desc: MGG_01517 [Magnaporthe grisea 70-15] gi|145020638|gb|EDK04767.1| MGG_01517 [Magnaporthe grisea 70-15]
  misc_feature (8)..(207): NCBI GI: 171690392 Blast Desc: protein product [Podospora anserina] gi|170945144|emb|CAP71255.1| protein product [Podospora anserina]
  misc_feature (4)..(162): NCBI GI: 116196224 Blast Desc: CHGG_04710 [Chaetomium globosum CBS 148.51] gi|88180623|gb|EAQ88091.1| CHGG_04710 [Chaetomium globosum CBS 148.51]
  misc_feature (9)..(165): NCBI GI: 164423547 Blast Desc: Bis(5'-adenosyl)-triphosphatase [Neurospora crassa OR74A] gi|157070141|gb|EAA33270.2| Bis(5'-adenosyl)-triphosphatase [Neurospora crassa OR74A]
  misc_feature (5)..(206): NCBI GI: 46136579 Blast Desc: FG09805.1 [Gibberella zeae PH-1]
  misc_feature (9)..(206): NCBI GI: 256727551 Blast Desc: NECHADRAFT_91080 [Nectria haematococca mpVI 77-13-4]
  misc_feature (9)..(214): NCBI GI: 156063598 Blast Desc: SS1G_01917 [Sclerotinia sclerotiorum 1980] gi|154697251|gb|EDN96989.1| SS1G_01917 [Sclerotinia sclerotiorum 1980]
  misc_feature (1)..(197): NCBI GI: 238840069 Blast Desc: HIT domain-containing protein [Microsporum canis CBS 113480]
  misc_feature (9)..(196): NCBI GI: 238496467 Blast Desc: HIT domain protein [Aspergillus flavus NRRL3357] gi|220694349|gb|EED50693.1| HIT domain protein [Aspergillus flavus NRRL3357]
  misc_feature (9)..(200): SWISSPROT Homolog: EC 3.6.1.17 Bis(5'-nucleosyl)-tetraphosphatase (asymmetrical)
MSSQAMETIHFGPFEVTTQVFMTTPHSFAVVNLKPLLPGHILVCPKTPHKRLTDLTPPELTDLFTTVQRVQRMLAQHYFTDSPSNASSNLATPTKDTSSNPESGSFNIAIQDGIEAGQTVPHLHVHVIPRIRGATSKNPETDGDALYESMAAEPGNVGGALWDRELKSRPKAGGAFPRIEDQDRLARSMDEMEAEAEEFKSVLRSMDGGESAVNGEGESSR

SEQ ID NO: 8346 - DNA, 3678 bp, Muscodor strobelii
  misc_feature: SGI EST ID NO. CUFF.20362.0
  misc_feature: Variant of the nucleotide sequence at SEQ ID NO 8344
caaaaggaagttgcctgaagacaatattcggagtcaatagattgtgtaaattttcatgtcatgaagaaaagatactcagttgtaaactgtgaaacgaagctattacttgtgactgaccaacacgcaattctgagggcaatgacgttgaggaccacttgctgccaaaactaaaccaatttaccctgttctaacaacgtgccatcagttgcctcttgacataaccactctacagccccaaacacaatgataataaggaatagactactacctctcacattctcatcacatagattctttagacagcaatactcccggctcactatgagcagtcaggccatggagacgatacacttcgggccctttgaggtcacgacacaggtcttcatgacaacaccccactcattcgccgtagtgaatctcaaaccgctactgcccggacacatcctagtgtgtccaaagacaccccacaagcggctcacagatctcacaccacccgagctaacagatctcttcaccaccgtgcaacgcgtccagcggatgctagcccagcactacttcacagactcgccctcaaacgcatcctcaaacttagcaaccccaacaaaagacacctcatcaaacccagaatcaggctccttcaacatagcaatccaagacgggatcgaagcaggccaaacagtgccccatctacacgtgcacgtgatcccgcggatccgcggcgcaacatcaaagaacccagaaacagacggcgacgccctctacgagtccatggccgccgagccgggaaacgtaggaggtgcgctctgggaccgggaactgaaaagtcggccgaaggctggaggtgcgttcccgcggatcgaggaccaggatcggttggcacggtctatggatgagatggaggctgaggctgaggagtttaagagtgtattaagaagtatggatggtggtgagagtgctgttaatggcgagggtgaaagtagtagataacgcgtggccgtctgggcgatagactcatcagcatctagatagatgatgtgtacattggtatttttgcgctaccccttgcatctaatctgataggagccagagacacctcgagggaaacacgcgacatatgctaccagaaagacaagtgacactgatctacggtaattggtcaagcatgatttccaatgttcaaaaagaaaaaatgacgtccatagattcgtctacttggatgaaagctgcgtggcgcaagctacctgagacacccacgtggctccaatccatcaatgcaaggggaatgcccatcgcatttcacaatcaataccctcataattaccacataatctcagaatgtcatgttgaacaaacgccagctccataatatatgattattagtctcctcatgggaagcaggtctcctttagaccagatcccacgtgcaccaaatagcccagctcatcgagaaacaaccacttcccttaatcttaaaatactcgttctttgtcacgcctctcgcgtccttaccattaagaacagtcagggcaaacaactggaccttcatgcccggagctcccagatcgcgggacggtatatcacaccaccaccaaaacttaccatcagtgtcgagtggcaccaagtcttccttccgaccatcgacgccgtggatcttgagaaggagtaggtatggcggccctttaccatgtttctcatgcgtccagtgttcacacaccttggagaactggaaacggacattctcgccgctatatactggaatatgcctttctgcaggactgtattcgtactcggaaagaccttcctgagctgcgttaccgcaccactgcggtttgggtactcccgtaggtcctatgtagtattctggccatgggagaaccctaccatcctcgcggaaaaagtgccggtcgttgcttgggtaatgcgactcgccaaagcgctcgttggtgagcgtgaacatcttgggattgaaagctttgttgtatttttcatcattaacgtggccagcgccccagcaagcatccaacagtttccattccccattatcgatgcgcacagcattccatgcatggccagtggcatttttgggtggcggtgcttgtcccttttcaaggggtgtataaccgtatcccttgccatgaccaacaaccatgacacattctaggccagctctttctgcaacggcacgatagacttcggcatagccctggcaaacagctttccccatgaagatggtctcgtttacattacgggacttgacgcacttgccaaagaaatcttcgacattgtaggcaatattgtggtggcaccatgtgaagatagcgcgagccttgtccgtggcggaagggaatggcgagcagagaacacgagctagataaccgacgggatcatctcgcggtagcgtctgataggggtattgtgcagctacgttgtctgggccagagaagtccctgcagatcatacaactgactgtctgaccagcagcagttgtacgaacagaaacggcttcgacttgagcaaaggtgggacgggacgaaagcggtaccggaggtggcgagctaggttccggccggtttgtaggcactggcgggggtcttgacgaaccttgtagaactgtctttggcctcacgtaggcagaggcaggaggtggaagacgacgagggagtgtgggaggagcctcgttgtcttgcacagcggctggggtggtggcaggcctggaagggagtcgcggaatgccagggcgaccggacgagtcaactggaggcgggtcggccacttcggccctctctcgctcggcagcctctttcgcagcctgggcttccctctccttgcgcgagggggccagaggcggcagctttgattgatcgaaggtgggcgcaaggactcgcctggctgctggcgactcggctgtggcagtgtttgttctcgagagggacaggttggagatgctggacacatgggacactatagaggagtttgagtctctccttgtcgcgagctggttcgtaggcctacgtggtggtagagtcggggtcggggtcgatgtcgagatggcctgtgaggagctcttgcgcgtgggcagcggcgggatggatggtgtcttgcgcacaggcaaggcgggggacgtctcgacggctggctctggggatctgacggtggtcgcaggcacgggaggagggtctctcctctgtggccgagccggagcagtcggcgtggcttgtaccgactctacactcacattgggagtcttcttggtgggaggcgggggcggcgcgcgtttcgctgtcgcgggcggaggggccgtgaagttcttctgcttgttcaaggcggcgatgcggtcggcaagcgagctgaacacgggctcttctacttcagccatcgtagctagccagctcgacttgtatgtgcagagaggataggagaagtgagacgtcgggagcgaagcgaggcagacgatgttcgcggcgtgcggcgcagccaaacaatttgggtttggaagtccgaagtcctggaccgatgtaatcgacagagtttggagccaagacttcgtgtatcattcatatgtcctctgtctctatgatgaaagcatcggacgtagtctcatgttatgttgatgggtagatgttacaagaagagaagaatggggttttcattcgtcgctgacggatcgaccaagttgga

SEQ ID NO: 8347 - DNA, 2487 bp, Muscodor strobelii
  misc_feature: SGI cDNA ID NO. 562564
  misc_feature: Reduced expression when VOC is produced
  misc_feature: Encodes the peptide sequence at SEQ ID NO 8348
atggacacatctaatgtcaccgccgagtcgtcgcctgcggatgaggcggggtcccctgctgttgaaaatataggcaacgtctcagctgctcccaatcctgcgcagcctgtacatctccgaagctgcgttctctgtcgccagagaaaagtgaagtgcgaccgtcgtcaaccatgctccaattgtataaaatcgggcgcgacgtgcgttcatccgcctggcgcggggcgagctgctaaaagacctagacaggcggtagacacgaaagttttagatcgcctttcacagttagagggtacgataaagagattacagcatcaggctaaagagcgcgaaaatgccctctatgattctccttctggcctacaaaatgcattttcttcaagaggatccagattgtcggaacagactactcatgcgcaaagccctgatagtgccgtcacacaagatcttggccgcttggtcgtagatgagtcgtccacgcgatatgtgagcaatgccatgtgggcggatctgacggactcgatcgaacaactgcgaggcatgttccttgagaccaatgacgacgacgatgaagatttaagtaggctgggaggcgacagccccttttctgatgatacgagaagctcgccaagcttgggagcgaatgcagcactatttgggtttcgatcgattgctcattcattacgcaactttcatccgtcactccagcagtcagtggctctttaccaaatctttacagacaacatttcgccagtcgtgcgaatattccatatgccgactctgactcgcatttactggaatgctgttgcgtcacttgattctctcgatagggaaactgaggcgctgttatttgctatatactattctgcagtgattagtctaaccgcaactcaatgcaccgagcttttgtcagcaacacgccctactcttctcgagcaataccgatttgctgctgaacaggcgctcgctcgcgcgaacttcctcaacaccaaaagtcttctagtattacagactttctcgctgtatctatcggtgttaagatccgacgatggaacacgtacggtctggtcgcttacggctctcgcaacgcacatggcacggggcatgggcgtccaccgtgatggcacgctgttcaatctccgaccattcgaaacagagattcgtcgccgtatttggcaccatctctatcttctcgactatcgctctaccgaataccatggctgtgagccaatcgttatggatagtacattcgacgtccgattgcccttgaatgtgaatgattcagatctcactccagacatgaccgagtttccggaggaaagtgatggtgctacggacatgacgtttttccacatccgatgtgaagccatgactattcttgggaagctgtatcgagaaattaacttcggcttcagcaacagcaaaggtcaaggaatagacaacagtcacacgcttcaagatcggctcaggattcttgatgactttgagcaatgggccaagagatatgctgcgcgttgcgacattgctgatcctttgctttttcttacgaaaaaggtttcgcagttcgtcgtgttgcgcaacaagatattcttttactacattgagctggttagacggaagcaagtgatagaagaccgggttaaaaatcccaatgcgacgagcagtcctaaaccagatgagccgccagaaatcccgagtacaccggtcttacgagactatctttttgagactgcaatcaatatgctggaatcgtcctgtgaggttctcaaggactcccgcctctcacgctggaattggcatacgagaacgtatcttcaatggtactcgatcgtatttgtaatttcagagatatgtacccgcccaccttctccgctatgcgatcgcgcatggtactacgccagtgcggtctacgacgaatggttgcgcactaagattcgagacggcgccgagcgtggtagcgagatcttaaaacccatcggccgacttatgagtagagcgcaacgtacacgagagtcacaacaatcttcgcagcaatcctcacagcaatctacacggccaacttcacaacaacctaaaactccaaatccgccgcaagagtcgagagcaggcgccggcgaatggttctatcctgggcagcgattcatatatgacacttctaaaacacaaactctatataatttttcaaatccggaagaccctgctcctatcacggcaagtacagaaagtagacgaccgataagtccctttgacttcaacatgggatctcctacagtgcccgcggtgcccgcagtccctgtagttgggaccaccaacagtcaagaagcgtacagcatgggcatcatcgacagtttcttggagatgcttcctgaggagctacaatccgaattcgtcggttccatcgttgacggccaataccggcccgattacaccgccgattctcatgaaatgatgtctggtagtcctttctttcacacaaataacccttga

SEQ ID NO: 8348 - protein, 828 aa, Muscodor strobelii
  misc_feature: SGI Peptide ID NO. 562564
  misc_feature (40)..(77): Pfam Id: PF00172 Pfam Desc: Fungal Zn(2)-Cys(6) binuclear cluster domain
  misc_feature (332)..(428): Pfam Id: PF04082 Pfam Desc: Fungal specific transcription factor domain
  misc_feature (11)..(691): NCBI GI: 121702473 Blast Desc: fungal specific transcription factor domain protein [Aspergillus clavatus NRRL 1] gi|119397644|gb|EAW08075.1| fungal specific transcription factor domain protein [Aspergillus NRRL 1]
  misc_feature (18)..(674): NCBI GI: 145228335 Blast Desc: An01g00260 [Aspergillus niger] gi|134054563|emb|CAK43418.1| protein product [Aspergillus niger]
  misc_feature (40)..(673): NCBI GI: 119485863 Blast Desc: fungal specific transcription factor, [Neosartorya fischeri NRRL 181] gi|119410430|gb|EAW20377.1| fungal specific transcription factor, [Neosartorya fischeri NRRL 181]
  misc_feature (39)..(676): NCBI GI: 259485260 Blast Desc: TPA: Zn(II)2Cys6 transcription factor (Eurofung) [Aspergillus nidulans FGSC A4]
  misc_feature (28)..(676): NCBI GI: 67538262 Blast Desc: AN5301.2 [Aspergillus nidulans FGSC A4] gi|40743271|gb|EAA62461.1| AN5301.2 [Aspergillus nidulans FGSC A4]
  misc_feature (31)..(688): NCBI GI: 238839621 Blast Desc: fungal specific transcription factor domain-containing protein [Microsporum canis CBS 113480]
  misc_feature (24)..(685): NCBI GI: 164510007 Blast Desc: transcription factor [Gibberella fujikuroi]
  misc_feature (40)..(674): NCBI GI: 256731941 Blast Desc: NECHADRAFT_13054 [Nectria haematococca mpVI 77-13-4]
  misc_feature (32)..(688): NCBI GI: 115391009 Blast Desc: conserved [Aspergillus terreus NIH2624] gi|114193933|gb|EAU35633.1| conserved [Aspergillus terreus NIH2624]
  misc_feature (38)..(526): NCBI GI: 115449671 Blast Desc: [Aspergillus terreus NIH2624] gi|114187615|gb|EAU29315.1| [Aspergillus terreus NIH2624]
  misc_feature: Useful for introducing or modulating the production of volatile compounds
MDTSNVTAESSPADEAGSPAVENIGNVSAAPNPAQPVHLRSCVLCRQRKVKCDRRQPCSNCIKSGATCVHPPGAGRAAKRPRQAVDTKVLDRLSQLEGTIKRLQHQAKERENALYDSPSGLQNAFSSRGSRLSEQTTHAQSPDSAVTQDLGRLVVDESSTRYVSNAMWADLTDSIEQLRGMFLETNDDDDEDLSRLGGDSPFSDDTRSSPSLGANAALFGFRSIAHSLRNFHPSLQQSVALYQIFTDNISPVVRIFHMPTLTRIYWNAVASLDSLDRETEALLFAIYYSAVISLTATQCTELLSATRPTLLEQYRFAAEQALARANFLNTKSLLVLQTFSLYLSVLRSDDGTRTVWSLTALATHMARGMGVHRDGTLFNLRPFETEIRRRIWHHLYLLDYRSTEYHGCEPIVMDSTFDVRLPLNVNDSDLTPDMTEFPEESDGATDMTFFHIRCEAMTILGKLYREINFGFSNSKGQGIDNSHTLQDRLRILDDFEQWAKRYAARCDIADPLLFLTKKVSQFVVLRNKIFFYYIELVRRKQVIEDRVKNPNATSSPKPDEPPEIPSTPVLRDYLFETAINMLESSCEVLKDSRLSRWNWHTRTYLQWYSIVFVISEICTRPPSPLCDRAWYYASAVYDEWLRTKIRDGAERGSEILKPIGRLMSRAQRTRESQQSSQQSSQQSTRPTSQQPKTPNPPQESRAGAGEWFYPGQRFIYDTSKTQTLYNFSNPEDPAPITASTESRRPISPFDFNMGSPTVPAVPAVPVVGTTNSQEAYSMGIIDSFLEMLPEELQSEFVGSIVDGQYRPDYTADSHEMMSGSPFFHTNNP

SEQ ID NO: 8349 - DNA, 2803 bp, Muscodor strobelii
  misc_feature: SGI EST ID NO. CUFF.20374.0
  misc_feature: Variant of the nucleotide sequence at SEQ ID NO 8347
tctttgttcactgcttgaagaaattcttgctctttgccactaaccatggttcaactccagacctcgaagattagcaatggacacatctaatgtcaccgccgagtcgtcgcctgcggatgaggcggggtcccctgctgttgaaaatataggcaacgtctcagctgctcccaatcctgcgcagcctgtacatctccgaagctgcgttctctgtcgccagagaaaagtgaagtgcgaccgtcgtcaaccatgctccaattgtataaaatcgggcgcgacgtgcgttcatccgcctggcgcggggcgagctgctaaaagacctagacaggcggtagacacgaaagttttagatcgcctttcacagttagagggtacgataaagagattacagcatcaggctaaagagcgcgaaaatgccctctatgattctccttctggcctacaaaatgcattttcttcaagaggatccagattgtcggaacagactactcatgcgcaaagccctgatagtgccgtcacacaagatcttggccgcttggtcgtagatgagtcgtccacgcgatatgtgagcaatgccatgtgggcggatctgacggactcgatcgaacaactgcgaggcatgttccttgagaccaatgacgacgacgatgaagatttaagtaggctgggaggcgacagccccttttctgatgatacgagaagctcgccaagcttgggagcgaatgcagcactatttgggtttcgatcgattgctcattcattacgcaactttcatccgtcactccagcagtcagtggctctttaccaaatctttacagacaacatttcgccagtcgtgcgaatattccatatgccgactctgactcgcatttactggaatgctgttgcgtcacttgattctctcgatagggaaactgaggcgctgttatttgctatatactattctgcagtgattagtctaaccgcaactcaatgcaccgagcttttgtcagcaacacgccctactcttctcgagcaataccgatttgctgctgaacaggcgctcgctcgcgcgaacttcctcaacaccaaaagtcttctagtattacagactttctcgctgtatctatcggtgttaagatccgacgatggaacacgtacggtctggtcgcttacggctctcgcaacgcacatggcacggggcatgggcgtccaccgtgatggcacgctgttcaatctccgaccattcgaaacagagattcgtcgccgtatttggcaccatctctatcttctcgactatcgctctaccgaataccatggctgtgagccaatcgttatggatagtacattcgacgtccgattgcccttgaatgtgaatgattcagatctcactccagacatgaccgagtttccggaggaaagtgatggtgctacggacatgacgtttttccacatccgatgtgaagccatgactattcttgggaagctgtatcgcaacagcaaaggtcaaggaatagacaacagtcacacgcttcaagatcggctcaggattcttgatgactttgagcaatgggccaagagatatgctgcgcgttgcgacattgctgatcctttgctttttcttacgaaaaaggtttcgcagttcgtcgtgttgcgcaacaagatattcttttactacattgagctggttagacggaagcaagtgatagaagaccgggttaaaaatcccaatgcgacgagcagtcctaaaccagatgagccgccagaaatcccgagtacaccggtcttacgagactatctttttgagactgcaatcaatatgctggaatcgtcctgtgaggttctcaaggactcccgcctctcacgctggaattggcatacgagaacgtatcttcaatggtactcgatcgtatttgtaatttcagagatatgtacccgcccaccttctccgctatgcgatcgcgcatggtactacgccagtgcggtctacgacgaatggttgcgcactaagattcgagacggcgccgagcgtggtagcgagatcttaaaacccatcggccgacttatgagtagagcgcaacgtacacgagagtcacaacaatcttcgcagcaatcctcacagcaatctacacggccaacttcacaacaacctaaaactccaaatccgccgcaagagtcgagagcaggcgccggcgaatggttctatcctgggcagcgattcatatatgacacttctaaaacacaaactctatataatttttcaaatccggaagaccctgctcctatcacggcaagtacagaaagtagacgaccgataagtccctttgacttcaacatgggatctcctacagtgcccgcggtgcccgcagtccctgtagttgggaccaccaacagtcaagaagcgtacagcatgggcatcatcgacagtttcttggagatgcttcctgaggagctacaatccgaattcgtcggttccatcgttgacggccaataccggcccgattacaccgccgattctcatgaaatgatgtctggtagtcctttctttcacacaaataacccttgatacccttcatcttatacaccagccagatgcacagtgtatatatctgcgtgctacatagttgaatctgtttgaaagtagcgaaatggacgatgataatgaaggttatgaaggcatgatgattggagttatatattatgttcgatatacaaaacatatcacaagtataggcgccggtggccagcgaattgatgacagcgctggacgccactgaacattctcagattagaagatgtacacgagacaaacccacctcaaatctac

SEQ ID NO: 8350 - DNA, 2466 bp, Muscodor strobelii
  misc_feature: SGI cDNA ID NO. 562565
  misc_feature: Encodes the peptide sequence at SEQ ID NO 8351
atggacacatctaatgtcaccgccgagtcgtcgcctgcggatgaggcggggtcccctgctgttgaaaatataggcaacgtctcagctgctcccaatcctgcgcagcctgtacatctccgaagctgcgttctctgtcgccagagaaaagtgaagtgcgaccgtcgtcaaccatgctccaattgtataaaatcgggcgcgacgtgcgttcatccgcctggcgcggggcgagctgctaaaagacctagacaggcggtagacacgaaagttttagatcgcctttcacagttagagggtacgataaagagattacagcatcaggctaaagagcgcgaaaatgccctctatgattctccttctggcctacaaaatgcattttcttcaagaggatccagattgtcggaacagactactcatgcgcaaagccctgatagtgccgtcacacaagatcttggccgcttggtcgtagatgagtcgtccacgcgatatgtgagcaatgccatgtgggcggatctgacggactcgatcgaacaactgcgaggcatgttccttgagaccaatgacgacgacgatgaagatttaagtaggctgggaggcgacagccccttttctgatgatacgagaagctcgccaagcttgggagcgaatgcagcactatttgggtttcgatcgattgctcattcattacgcaactttcatccgtcactccagcagtcagtggctctttaccaaatctttacagacaacatttcgccagtcgtgcgaatattccatatgccgactctgactcgcatttactggaatgctgttgcgtcacttgattctctcgatagggaaactgaggcgctgttatttgctatatactattctgcagtgattagtctaaccgcaactcaatgcaccgagcttttgtcagcaacacgccctactcttctcgagcaataccgatttgctgctgaacaggcgctcgctcgcgcgaacttcctcaacaccaaaagtcttctagtattacagactttctcgctgtatctatcggtgttaagatccgacgatggaacacgtacggtctggtcgcttacggctctcgcaacgcacatggcacggggcatgggcgtccaccgtgatggcacgctgttcaatctccgaccattcgaaacagagattcgtcgccgtatttggcaccatctctatcttctcgactatcgctctaccgaataccatggctgtgagccaatcgttatggatagtacattcgacgtccgattgcccttgaatgtgaatgattcagatctcactccagacatgaccgagtttccggaggaaagtgatggtgctacggacatgacgtttttccacatccgatgtgaagccatgactattcttgggaagctgtatcgcaacagcaaaggtcaaggaatagacaacagtcacacgcttcaagatcggctcaggattcttgatgactttgagcaatgggccaagagatatgctgcgcgttgcgacattgctgatcctttgctttttcttacgaaaaaggtttcgcagttcgtcgtgttgcgcaacaagatattcttttactacattgagctggttagacggaagcaagtgatagaagaccgggttaaaaatcccaatgcgacgagcagtcctaaaccagatgagccgccagaaatcccgagtacaccggtcttacgagactatctttttgagactgcaatcaatatgctggaatcgtcctgtgaggttctcaaggactcccgcctctcacgctggaattggcatacgagaacgtatcttcaatggtactcgatcgtatttgtaatttcagagatatgtacccgcccaccttctccgctatgcgatcgcgcatggtactacgccagtgcggtctacgacgaatggttgcgcactaagattcgagacggcgccgagcgtggtagcgagatcttaaaacccatcggccgacttatgagtagagcgcaacgtacacgagagtcacaacaatcttcgcagcaatcctcacagcaatctacacggccaacttcacaacaacctaaaactccaaatccgccgcaagagtcgagagcaggcgccggcgaatggttctatcctgggcagcgattcatatatgacacttctaaaacacaaactctatataatttttcaaatccggaagaccctgctcctatcacggcaagtacagaaagtagacgaccgataagtccctttgacttcaacatgggatctcctacagtgcccgcggtgcccgcagtccctgtagttgggaccaccaacagtcaagaagcgtacagcatgggcatcatcgacagtttcttggagatgcttcctgaggagctacaatccgaattcgtcggttccatcgttgacggccaataccggcccgattacaccgccgattctcatgaaatgatgtctggtagtcctttctttcacacaaataacccttga

SEQ ID NO: 8351 - protein, 821 aa, Muscodor strobelii
  misc_feature: SGI Peptide ID NO. 562565
  misc_feature (40)..(77): Pfam Id: PF00172 Pfam Desc: Fungal Zn(2)-Cys(6) binuclear cluster domain
  misc_feature (332)..(428): Pfam Id: PF04082 Pfam Desc: Fungal specific transcription factor domain
  misc_feature (11)..(684): NCBI GI: 121702473 Blast Desc: fungal specific transcription factor domain protein [Aspergillus clavatus NRRL 1] gi|119397644|gb|EAW08075.1| fungal specific transcription factor domain protein [Aspergillus NRRL 1]
  misc_feature (18)..(667): NCBI GI: 145228335 Blast Desc: An01g00260 [Aspergillus niger] gi|134054563|emb|CAK43418.1| protein product [Aspergillus niger]
  misc_feature (40)..(666): NCBI GI: 119485863 Blast Desc: fungal specific transcription factor, [Neosartorya fischeri NRRL 181] gi|119410430|gb|EAW20377.1| fungal specific transcription factor, [Neosartorya fischeri NRRL 181]
  misc_feature (39)..(669): NCBI GI: 259485260 Blast Desc: TPA: Zn(II)2Cys6 transcription factor (Eurofung) [Aspergillus nidulans FGSC A4]
  misc_feature (28)..(669): NCBI GI: 67538262 Blast Desc: AN5301.2 [Aspergillus nidulans FGSC A4] gi|40743271|gb|EAA62461.1| AN5301.2 [Aspergillus nidulans FGSC A4]
  misc_feature (31)..(681): NCBI GI: 238839621 Blast Desc: fungal specific transcription factor domain-containing protein [Microsporum canis CBS 113480]
  misc_feature (24)..(678): NCBI GI: 164510007 Blast Desc: transcription factor [Gibberella fujikuroi]
  misc_feature (40)..(667): NCBI GI: 256731941 Blast Desc: NECHADRAFT_13054 [Nectria haematococca mpVI 77-13-4]
  misc_feature (32)..(681): NCBI GI: 115391009 Blast Desc: conserved [Aspergillus terreus NIH2624] gi|114193933|gb|EAU35633.1| conserved [Aspergillus terreus NIH2624]
  misc_feature (38)..(519): NCBI GI: 115449671 Blast Desc: [Aspergillus terreus NIH2624] gi|114187615|gb|EAU29315.1| [Aspergillus terreus NIH2624]
MDTSNVTAESSPADEAGSPAVENIGNVSAAPNPAQPVHLRSCVLCRQRKVKCDRRQPCSNCIKSGATCVHPPGAGRAAKRPRQAVDTKVLDRLSQLEGTIKRLQHQAKERENALYDSPSGLQNAFSSRGSRLSEQTTHAQSPDSAVTQDLGRLVVDESSTRYVSNAMWADLTDSIEQLRGMFLETNDDDDEDLSRLGGDSPFSDDTRSSPSLGANAALFGFRSIAHSLRNFHPSLQQSVALYQIFTDNISPVVRIFHMPTLTRIYWNAVASLDSLDRETEALLFAIYYSAVISLTATQCTELLSATRPTLLEQYRFAAEQALARANFLNTKSLLVLQTFSLYLSVLRSDDGTRTVWSLTALATHMARGMGVHRDGTLFNLRPFETEIRRRIWHHLYLLDYRSTEYHGCEPIVMDSTFDVRLPLNVNDSDLTPDMTEFPEESDGATDMTFFHIRCEAMTILGKLYRNSKGQGIDNSHTLQDRLRILDDFEQWAKRYAARCDIADPLLFLTKKVSQFVVLRNKIFFYYIELVRRKQVIEDRVKNPNATSSPKPDEPPEIPSTPVLRDYLFETAINMLESSCEVLKDSRLSRWNWHTRTYLQWYSIVFVISEICTRPPSPLCDRAWYYASAVYDEWLRTKIRDGAERGSEILKPIGRLMSRAQRTRESQQSSQQSSQQSTRPTSQQPKTPNPPQESRAGAGEWFYPGQRFIYDTSKTQTLYNFSNPEDPAPITASTESRRPISPFDFNMGSPTVPAVPAVPVVGTTNSQEAYSMGIIDSFLEMLPEELQSEFVGSIVDGQYRPDYTADSHEMMSGSPFFHTNNP

SEQ ID NO: 8352 - DNA, 2803 bp, Muscodor strobelii; identical to SEQ ID NO: 8349
  misc_feature: SGI EST ID NO. CUFF.20374.0
  misc_feature: Variant of the nucleotide sequence at SEQ ID NO 8350

SEQ ID NO: 8353 - DNA, 2331 bp, Muscodor strobelii
  misc_feature: SGI cDNA ID NO. 562566
  misc_feature: Elevated expression when VOC is produced
  misc_feature: Encodes the peptide sequence at SEQ ID NO 8354
atgacgcctgccaccccagagtcgtctggcgatactcctacctacaaccaaaccaccccaactgggccctcggtggccaacaccccgcctgacccggactcttctgtcgtcaaggtcacccgtgggcactcgtgtgtcttgtgccagcagcgcaaggtccgctgcgacaagaagaagccatgctccaactgtgtcaaggccaatgtggactgccgcgtcgtgccacctcagcctccgaggcgacggaagaagcgcatacccgagcgcgacctcgttgagcgactgaggaagtatgagaccttgctgtctcaaaatggcattgatttcgagtccctaggcccggacataaagatcactgatcctggttcctttgaagacggcgatgagcttgaccctgactttatgaggcaaagagtcaaaggctcgcctgctgctccagatgagagcttgatcacatctccgggcgagaatttacacaggccgcgcacattcaaatggtttccttttcagaaggagtttcgagtgcacgaccagctagttcgagattcttcggaggaagaggacgttggctccacgatcaactacgcctttgacaagatgttcggcgaatctgatgggtttcccttcataattggggcgcgagacgagagcgtcacagctcttcatccttcaccaatccagatattccagctatggcagttgtaccttgacaacgtcaatcctcttctgaaaatcacacatacaccatccctgcaagtacagatcattgaagccggagcgaacttgaaaaaggtatccaaaagcctcgaagctttgatgtttaccatctatctcatggctctcacaagcattaccgatgaagaatgcgaggacactttcaacgagtccagatcagcgctcctgggaaaataccaccacggcgcacaacaagccttatttaatgcagggttcatgcgcatgccggacatcactgttttgcaagcatatatcctatactgccttgccgcacggcagtataccgaccctcggtccttgttttgtttgacgggcatcggtgtacgcttggcacatcgccttggtctgcagagagacggtgccgagtacggtatgacaccattcgaagtcgaagagaggaggaggctttggtggaacctagctggtttcgacaggcgcatcggcgagatgtgtggctcgaccatcaccgctatttctaacggcggcaactgcaaactgccactcaacatcaatgacacagatttacatatccatgccaaagatccgccacaacctcatatcggagctaccgagatgatgtttgccctcacccggctcgaatttgcgaaagcgcccggcaacgacaaaatgagagctaagctaacagcggcaaatccacaagcggtcaccaatctggctgaccaccggcttacgacctacttggatcagttctcgcattatatggaagagacgtatttgaagtattgtgacccaaaaatccctgttcattacatgacgctccttatgacgcgcggcaacatttgcaagctgaaggtggtgtctggctttttccgtgtggccataaccgccccatcaccattgccagccaatgagagcgaggccctcatgatcgaggccattcaaatggtggagtatgacagtctgatgcaaggacacgaaaagttgaaagggttcaattggtatacaaaaatgcacttcccgtttcccgcctacgtctgtttgttgaccgaactccggtctcgtacgaccggcgatctttgcgaacgggcatgggaaaccatcttcgaacacgcagagcggaagaagatgacaactacaacaaagactccattacacttgtcgttcagtgcacttttcgtaaaagcatgggatgcccgagaagctgccgaggctgccaatggccgcaccctcgcgccgcccaggctcattacactcatgcgacagatcgatgctcgaatgcctaagaaaacgaaggacaagacgccactcccaacaccatcgcctacaatcccaatagccagcgcacagtatgcccccagcgctgccgctcctcctccgacctccggtgcaccccctgacaacatgatgcccaaccccatgtatccccaagccatgttcaacaatatgcaaccccaggacatcaacagacaattctcgaccgcgttccccgatgttaattttggcggcgagatggactggaactatctagtacaagaatacgggggtttcatgcctccgcagagcatgcctccagactatagtgcacctatccagatggtgcatcaggatccttcgcaagttgtgtcttggcactga

SEQ ID NO: 8354 - protein, 776 aa, Muscodor strobelii
  misc_feature: SGI Peptide ID NO. 562566
  misc_feature (43)..(81): Pfam Id: PF00172 Pfam Desc: Fungal Zn(2)-Cys(6) binuclear cluster domain
  misc_feature (322)..(418): Pfam Id: PF04082 Pfam Desc: Fungal specific transcription factor domain
  misc_feature (35)..(767): NCBI GI: 85085263 Blast Desc: NCU04390 [Neurospora crassa OR74A] gi|28918559|gb|EAA28231.1| conserved [Neurospora crassa OR74A] gi|40882233|emb|CAF06058.1| conserved [Neurospora crassa]
  misc_feature (37)..(750): NCBI GI: 116196550 Blast Desc: CHGG_04873 [Chaetomium globosum CBS 148.51] gi|88180786|gb|EAQ88254.1| CHGG_04873 [Chaetomium globosum CBS 148.51]
  misc_feature (33)..(751): NCBI GI: 256727600 Blast Desc: NECHADRAFT_66570 [Nectria haematococca mpVI 77-13-4]
  misc_feature (14)..(653): NCBI GI: 261352264 Blast Desc: fungal specific transcription factor domain-containing protein [Verticillium albo-atrum VaMs.102]
  misc_feature (33)..(745): NCBI GI: 46136157 Blast Desc: FG09594.1 [Gibberella zeae PH-1]
  misc_feature (16)..(667): NCBI GI: 145613247 Blast Desc: MGG_01777 [Magnaporthe grisea 70-15] gi|145020368|gb|EDK04497.1| MGG_01777 [Magnaporthe grisea 70-15]
  misc_feature (38)..(652): NCBI GI: 156065607 Blast Desc: SS1G_00814 [Sclerotinia sclerotiorum 1980] gi|154691673|gb|EDN91411.1| SS1G_00814 [Sclerotinia sclerotiorum 1980]
  misc_feature (41)..(634): NCBI GI: 242791049 Blast Desc: C6 transcription factor, [Talaromyces stipitatus ATCC 10500] gi|218718271|gb|EED17691.1| C6 transcription factor, [Talaromyces stipitatus ATCC 10500]
  misc_feature (43)..(638): NCBI GI: 225563034 Blast Desc: C6 zinc finger domain-containing protein [Ajellomyces capsulatus G186AR]
  misc_feature (43)..(652): NCBI GI: 238840269 Blast Desc: fungal specific transcription factor domain-containing protein [Microsporum canis CBS 113480]
  misc_feature: Useful for introducing or modulating the production of volatile compounds
MTPATPESSGDTPTYNQTTPTGPSVANTPPDPDSSVVKVTRGHSCVLCQQRKVRCDKKKPCSNCVKANVDCRVVPPQPPRRRKKRIPERDLVERLRKYETLLSQNGIDFESLGPDIKITDPGSFEDGDELDPDFMRQRVKGSPAAPDESLITSPGENLHRPRTFKWFPFQKEFRVHDQLVRDSSEEEDVGSTINYAFDKMFGESDGFPFIIGARDESVTALHPSPIQIFQLWQLYLDNVNPLLKITHTPSLQVQIIEAGANLKKVSKSLEALMFTIYLMALTSITDEECEDTFNESRSALLGKYHHGAQQALFNAGFMRMPDITVLQAYILYCLAARQYTDPRSLFCLTGIGVRLAHRLGLQRDGAEYGMTPFEVEERRRLWWNLAGFDRRIGEMCGSTITAISNGGNCKLPLNINDTDLHIHAKDPPQPHIGATEMMFALTRLEFAKAPGNDKMRAKLTAANPQAVTNLADHRLTTYLDQFSHYMEETYLKYCDPKIPVHYMTLLMTRGNICKLKVVSGFFRVAITAPSPLPANESEALMIEAIQMVEYDSLMQGHEKLKGFNWYTKMHFPFPAYVCLLTELRSRTTGDLCERAWETIFEHAERKKMTTTTKTPLHLSFSALFVKAWDAREAAEAANGRTLAPPRLITLMRQIDARMPKKTKDKTPLPTPSPTIPIASAQYAPSAAAPPPTSGAPPDNMMPNPMYPQAMFNNMQPQDINRQFSTAFPDVNFGGEMDWNYLVQEYGGFMPPQSMPPDYSAPIQMVHQDPSQVVSWH

SEQ ID NO: 8355 - DNA, 3922 bp, Muscodor strobelii
  misc_feature: SGI EST ID NO. CUFF.20418.1
  misc_feature: Variant of the nucleotide sequence at SEQ ID NO 8353
agggtatatagtcttaaccatattaagtaagcactattaaatagtggtcccgccaaggaatcacttttacgaaattatacggtaggcggggatcctctcgtcatgtcaagggtgactagttggtcacaaccggcggatcggtgccctggtcgccgactataaagcgccaaggacatggtcctcgcgtgtactgtggaggatgtgagccctgagagagagctctactgtaccctcgccgagcctaccttagctcttgctctcctctgctctgcccgtctccccgagcaatgagaggacgcggacagaagccgggtaggagacgggcgtggcgactcacgaacagggagcaggggtgtgtgtggaatggggggaatggaactggtctgtgaaaatggccgccaatcgagtccaataataagactctgagcaggcaaggcgggctcggggagggcaggaggatgagagcaagcaagagcaaacgtggtactgcaataatcaaataccactttatcgcaggtatatcgcagggtaattctggtatcttttggacgtagccttgggttttgcagtttgcgggcagtgcccagagcagcaagagagggacccccccggccaaattcacatcatcatacccacgcctgctttgaactgcctgactaaacgtcgtgctgctatgtatggccttatgccctcgatgcggtcttatcacctggtgccgcacctctgtcgctttctcttttgtttcgtgactgtctgcattgtgagccactgagatttctcgatttctcgccttttcttttcaacttctccgtcacgctcgccatcggccgctattcccggcatctcgacagcggctcaccacctccaccacatcactgttcaggccctgctccagccagacgcgcctcttgttcgatcggtcccgagtgctctcaaccccccgcagcaagcacaggcagagctatcccacttgcatttcccgcattgcgtgcattgccgtgcgagcgtgctgttgttatgtagagctgcctccggcctttcgccagcattgccgagcacggcagctctctcatcctgaccctgggaccgcctgtgtccgcctgtgtccgcgagtgaccagtcctgtcgcgcctgtctctccttctccctcctcgggaccgacaggccgacgatgacgcctgccaccccagagtcgtctggcgatactcctacctacaaccaaaccaccccaactgggccctcggtggccaacaccccgcctgacccggactcttctgtcgtcaaggtcacccgtgggcactcgtgtgtcttgtgccagcagcgcaaggtccgctgcgacaagaagaagccatgctccaactgtgtcaaggccaatgtggactgccgcgtcgtgccacctcagcctccgaggcgacggaagaagcgcatacccgagcgcgacctcgttgagcgactgaggaagtatgagaccttgctgtctcaaaatggcattgatttcgagtccctaggcccggacataaagatcactgatcctggttcctttgaagacggcgatgagcttgaccctgactttatgaggcaaagagtcaaaggctcgcctgctgctccagatgagagcttgatcacatctccgggcgagaatttacacaggccgcgcacattcaaatggtttccttttcagaaggagtttcgagtgcacgaccagctagttcgagattcttcggaggaagaggacgttggctccacgatcaactacgcctttgacaagatgttcggcgaatctgatgggtttcccttcataattggggcgcgagacgagagcgtcacagctcttcatccttcaccaatccagatattccagctatggcagttgtaccttgacaacgtcaatcctcttctgaaaatcacacatacaccatccctgcaagtacagatcattgaagccggagcgaacttgaaaaaggtatccaaaagcctcgaagctttgatgtttaccatctatctcatggctctcacaagcattaccgatgaagaatgcgaggacactttcaacgagtccagatcagcgctcctgggaaaataccaccacggcgcacaacaagccttatttaatgcagggttcatgcgcatgccggacatcactgttttgcaagcatatatcctatactgccttgccgcacggcagtataccgaccctcggtccttgttttgtttgacgggcatcggtgtacgcttggcacatcgccttggtctgcagagagacggtgccgagtacggtatgacaccattcgaagtcgaagagaggaggaggctttggtggaacctagctggtttcgacaggcgcatcggcgagatgtgtggctcgaccatcaccgctatttctaacggcggcaactgcaaactgccactcaacatcaatgacacagatttacatatccatgccaaagatccgccacaacctcatatcggagctaccgagatgatgtttgccctcacccggctcgaatttgcgaaagcgcccggcaacgacaaaatgagagctaagctaacagcggcaaatccacaagcggtcaccaatctggctgaccaccggcttacgacctacttggatcagttctcgcattatatggaagagacgtatttgaagtattgtgacccaaaaatccctgttcattacatgacgctccttatgacgcgcggcaacatttgcaagctgaaggtggtgtctggctttttccgtgtggccataaccgccccatcaccattgccagccaatgagagcgaggccctcatgatcgaggccattcaaatggtggagtatgacagtctgatgcaaggacacgaaaagttgaaagggttcaattggtatacaaaaatgcacttcccgtttcccgcctacgtctgtttgttgaccgaactccggtctcgtacgaccggcgatctttgcgaacgggcatgggaaaccatcttcgaacacgcagagcggaagaagatgacaactacaacaaagactccattacacttgtcgttcagtgcacttttcgtaaaagcatgggatgcccgagaagctgccgaggctgccaatggccgcaccctcgcgccgcccaggctcattacactcatgcgacagatcgatgctcgaatgcctaagaaaacgaaggacaagacgccactcccaacaccatcgcctacaatcccaatagccagcgcacagtatgcccccagcgctgccgctcctcctccgacctccggtgcaccccctgacaacatgatgcccaaccccatgtatccccaagccatgttcaacaatatgcaaccccaggacatcaacagacaattctcgaccgcgttccccgatgttaattttggcggcgagatggactggaactatctagtacaagaatacgggggtttcatgcctccgcagagcatgcctccagactatagtgcacctatccagatggtgcatcaggatccttcgcaagttgtgtcttggcactgagtgggaatgtacgatggaaatgtccggtgaatgcgtcgaactaaatgttcttcgatgatgatgatgatgatcatgacgtgagattcttttcaatatgttcggagaaaaacatacccagatttacatagtcttcggttttgctgtatattaaataccaatttagttctgagctgaaatgtacccactcttgcatcacgcaatcttgcaaccgggtaaggttcctcgtggtagttgtcgtagatgcacaggattatgtggtggcgatacacacgggaaacacaaggtggtcatgcattccagatctacaagtcatggggttgcttgtggcactccagagtgagaggatgacgtacactctgccaaataagtgcttattggaagtttgccatagtgtacaccgtagaaaaggcgttgcaacag

SEQ ID NO: 8356 - DNA, 2337 bp, Muscodor strobelii
  misc_feature: SGI cDNA ID NO. 562567
  misc_feature: Reduced expression when VOC is produced
  misc_feature: Encodes the peptide sequence at SEQ ID NO 8357
atgacgcctgccaccccagagtcgtctggcgatactcctacctacaaccaaaccaccccaactgggccctcggtggccaacaccccgcctgacccggactcttctgtcgtcaaggtcacccgtgggcactcgtgtgtcttgtgccagcagcgcaaggtccgctgcgacaagaagaagccatgctccaactgtgtcaaggccaatgtggactgccgcgtcgtgccacctcagcctccgaggcgacggaagaagcgcatacccgagcgcgacctcgttgagcgactgaggaagtatgagaccttgctgtctcaaaatggcattgatttcgagtccctaggcccggacataaagatcactgatcctggttcctttgaagacggcgatgagcttgaccctgactttatgaggcaaagagtcaaaggctcgcctgctgctccagatgagagcttgatcacatctccgggcgagaatttacacaggccgcgcacattcaaatggtttccttttcagaaggagtttcgagtgcacgaccagctagttcgagattcttcggaggaagaggacgttggctccacgatcaactacgcctttgacaagatgttcggcgaatctgatgggtttcccttcataattggggcgcgagacgagagcgtcacagctcttcatccttcaccaatccagatattccagctatggcagttgtaccttgacaacgtcaatcctcttctgaaaatcacacatacaccatccctgcaagtacagatcattgaagccggagcgaacttgaaaaaggtatccaaaagcctcgaagctttgatgtttaccatctatctcatggctctcacaagcattaccgatgaagaatgcgaggacactttcaacgagtccagatcagcgctcctgggaaaataccaccacggcgcacaacaagccttatttaatgcagggttcatgcgcatgccggacatcactgttttgcaagcatatatcctatactgcatccagcttgccgcacggcagtataccgaccctcggtccttgttttgtttgacgggcatcggtgtacgcttggcacatcgccttggtctgcagagagacggtgccgagtacggtatgacaccattcgaagtcgaagagaggaggaggctttggtggaacctagctggtttcgacaggcgcatcggcgagatgtgtggctcgaccatcaccgctatttctaacggcggcaactgcaaactgccactcaacatcaatgacacagatttacatatccatgccaaagatccgccacaacctcatatcggagctaccgagatgatgtttgccctcacccggctcgaatttgcgaaagcgcccggcaacgacaaaatgagagctaagctaacagcggcaaatccacaagcggtcaccaatctggctgaccaccggcttacgacctacttggatcagttctcgcattatatggaagagacgtatttgaagtattgtgacccaaaaatccctgttcattacatgacgctccttatgacgcgcggcaacatttgcaagctgaaggtggtgtctggctttttccgtgtggccataaccgccccatcaccattgccagccaatgagagcgaggccctcatgatcgaggccattcaaatggtggagtatgacagtctgatgcaaggacacgaaaagttgaaagggttcaattggtatacaaaaatgcacttcccgtttcccgcctacgtctgtttgttgaccgaactccggtctcgtacgaccggcgatctttgcgaacgggcatgggaaaccatcttcgaacacgcagagcggaagaagatgacaactacaacaaagactccattacacttgtcgttcagtgcacttttcgtaaaagcatgggatgcccgagaagctgccgaggctgccaatggccgcaccctcgcgccgcccaggctcattacactcatgcgacagatcgatgctcgaatgcctaagaaaacgaaggacaagacgccactcccaacaccatcgcctacaatcccaatagccagcgcacagtatgcccccagcgctgccgctcctcctccgacctccggtgcaccccctgacaacatgatgcccaaccccatgtatccccaagccatgttcaacaatatgcaaccccaggacatcaacagacaattctcgaccgcgttccccgatgttaattttggcggcgagatggactggaactatctagtacaagaatacgggggtttcatgcctccgcagagcatgcctccagactatagtgcacctatccagatggtgcatcaggatccttcgcaagttgtgtcttggcactga

SEQ ID NO: 8357 - protein, 778 aa, Muscodor strobelii
  misc_feature: SGI Peptide ID NO. 562567
  misc_feature (43)..(81): Pfam Id: PF00172 Pfam Desc: Fungal Zn(2)-Cys(6) binuclear cluster domain
  misc_feature (322)..(420): Pfam Id: PF04082 Pfam Desc: Fungal specific transcription factor domain
  misc_feature (35)..(769): NCBI GI: 85085263 Blast Desc: NCU04390 [Neurospora crassa OR74A] gi|28918559|gb|EAA28231.1| conserved [Neurospora crassa OR74A] gi|40882233|emb|CAF06058.1| conserved [Neurospora crassa]
  misc_feature (37)..(752): NCBI GI: 116196550 Blast Desc: CHGG_04873 [Chaetomium globosum CBS 148.51] gi|88180786|gb|EAQ88254.1| CHGG_04873 [Chaetomium globosum CBS 148.51]
  misc_feature (33)..(753): NCBI GI: 256727600 Blast Desc: NECHADRAFT_66570 [Nectria haematococca mpVI 77-13-4]
  misc_feature (14)..(655): NCBI GI: 261352264 Blast Desc: fungal specific transcription factor domain-containing protein [Verticillium albo-atrum VaMs.102]
  misc_feature (33)..(747): NCBI GI: 46136157 Blast Desc: FG09594.1 [Gibberella zeae PH-1]
  misc_feature (16)..(669): NCBI GI: 145613247 Blast Desc: MGG_01777 [Magnaporthe grisea 70-15] gi|145020368|gb|EDK04497.1| MGG_01777 [Magnaporthe grisea 70-15]
  misc_feature (38)..(654): NCBI GI: 156065607 Blast Desc: SS1G_00814 [Sclerotinia sclerotiorum 1980] gi|154691673|gb|EDN91411.1| SS1G_00814 [Sclerotinia sclerotiorum 1980]
  misc_feature (41)..(636): NCBI GI: 242791049 Blast Desc: C6 transcription factor, [Talaromyces stipitatus ATCC 10500] gi|218718271|gb|EED17691.1| C6 transcription factor, [Talaromyces stipitatus ATCC 10500]
  misc_feature (43)..(640): NCBI GI: 225563034 Blast Desc: C6 zinc finger domain-containing protein [Ajellomyces capsulatus G186AR]
  misc_feature (43)..(654): NCBI GI: 238840269 Blast Desc: fungal specific transcription factor domain-containing protein [Microsporum canis CBS 113480]
  misc_feature: Useful for introducing or modulating the production of volatile compounds
MTPATPESSGDTPTYNQTTPTGPSVANTPPDPDSSVVKVTRGHSCVLCQQRKVRCDKKKPCSNCVKANVDCRVVPPQPPRRRKKRIPERDLVERLRKYETLLSQNGIDFESLGPDIKITDPGSFEDGDELDPDFMRQRVKGSPAAPDESLITSPGENLHRPRTFKWFPFQKEFRVHDQLVRDSSEEEDVGSTINYAFDKMFGESDGFPFIIGARDESVTALHPSPIQIFQLWQLYLDNVNPLLKITHTPSLQVQIIEAGANLKKVSKSLEALMFTIYLMALTSITDEECEDTFNESRSALLGKYHHGAQQALFNAGFMRMPDITVLQAYILYCIQLAARQYTDPRSLFCLTGIGVRLAHRLGLQRDGAEYGMTPFEVEERRRLWWNLAGFDRRIGEMCGSTITAISNGGNCKLPLNINDTDLHIHAKDPPQPHIGATEMMFALTRLEFAKAPGNDKMRAKLTAANPQAVTNLADHRLTTYLDQFSHYMEETYLKYCDPKIPVHYMTLLMTRGNICKLKVVSGFFRVAITAPSPLPANESEALMIEAIQMVEYDSLMQGHEKLKGFNWYTKMHFPFPAYVCLLTELRSRTTGDLCERAWETIFEHAERKKMTTTTKTPLHLSFSALFVKAWDAREAAEAANGRTLAPPRLITLMRQIDARMPKKTKDKTPLPTPSPTIPIASAQYAPSAAAPPPTSGAPPDNMMPNPMYPQAMFNNMQPQDINRQFSTAFPDVNFGGEMDWNYLVQEYGGFMPPQSMPPDYSAPIQMVHQDPSQVVSWH

SEQ ID NO: 8358 - DNA, 3922 bp, Muscodor strobelii; identical to SEQ ID NO: 8355
  misc_feature: SGI EST ID NO. CUFF.20418.1
  misc_feature: Variant of the nucleotide sequence at SEQ ID NO 8356

SEQ ID NO: 8359 - DNA, 491 bp, Muscodor strobelii
  misc_feature: SGI cDNA ID NO. 562568
  misc_feature: Encodes the peptide sequence at SEQ ID NO 8360
atggccgaggagtacgaagaagaaatgaacggtgatgatggtggcatgactggtcctggcgctccaaccccagtcagtgcattggagggtctcgctgggcttacaaagcgcgattgtcagttgttgatggaaggtggttttcagacggtcgaatctgtagcttatgcgcccaaacgtgtactggagcaggtcaagggtatctcagagcagaagtctgccaaaattcttgctgaagcctccaaacttgtccctttgggttttactacagcgactgagatgcaccagaggagaagtgagctaatctccattacaacgggatcaaagaacttggacacgctgctagctggtggtatcgagaccggctcagtaaccgagctcttcggcgagtttcgtaccggaaagagtcagatttgccatactttggccgttacgtgtcagttgccttttgatatgggtggtggagaaggcaaatgtctctacatcgacaccga

SEQ ID NO: 8360 - protein, 163 aa, Muscodor strobelii
  misc_feature: SGI Peptide ID NO. 562568
  misc_feature (79)..(163): Pfam Id: PF08423 Pfam Desc: Rad51
  misc_feature (3)..(163): NCBI GI: 261355883 Blast Desc: DNA repair protein RAD51 [Verticillium albo-atrum VaMs.102]
  misc_feature (3)..(163): NCBI GI: 85116816 Blast Desc: DNA repair protein RAD51 [Neurospora crassa OR74A] gi|2182133|dbj|BAA20366.1| MEI3 [Neurospora crassa] gi|28926929|gb|EAA35890.1| DNA repair protein RAD51 [Neurospora
  misc_feature (3)..(163): NCBI GI: 145614388 Blast Desc: MGG_11350 [Magnaporthe grisea 70-15] gi|145021318|gb|EDK05447.1| MGG_11350 [Magnaporthe grisea 70-15]
  misc_feature (6)..(163): NCBI GI: 212542819 Blast Desc: DNA repair protein RAD51, [Penicillium marneffei ATCC 18224] gi|111380646|gb|ABH09700.1| RAD51-like protein [Penicillium marneffei] gi|210066471|gb|EEA20564.1| DNA repair
  misc_feature (2)..(163): NCBI GI: 242767957 Blast Desc: DNA repair protein RAD51, [Talaromyces stipitatus ATCC 10500] gi|218724668|gb|EED24085.1| DNA repair protein RAD51, [Talaromyces stipitatus ATCC 10500]
  misc_feature (3)..(163): NCBI GI: 116206996 Blast Desc: CHGG_02791 [Chaetomium globosum CBS 148.51] gi|88183388|gb|EAQ90856.1| CHGG_02791 [Chaetomium globosum CBS 148.51]
  misc_feature (3)..(163): NCBI GI: 171680227 Blast Desc: protein product [Podospora anserina] gi|170939740|emb|CAP64966.1| protein product [Podospora anserina]
  misc_feature (7)..(163): NCBI GI: 189210816 Blast Desc: DNA repair protein RAD51 [Pyrenophora tritici-repentis Pt-1C-BFP] gi|187977832|gb|EDU44458.1| DNA repair protein RAD51 [Pyrenophora tritici-repentis Pt-1C-BFP]
  misc_feature (1)..(163): NCBI GI: 46108550 Blast Desc: FG01157.1 [Gibberella zeae PH-1]
  misc_feature (1)..(163): NCBI GI: 1816461 Blast Desc: uvsC [Emericella nidulans] gi|259488442|tpe|CBF87878.1| TPA: UvsC protein [Source:UniProtKB/TrEMBL;Acc:P78579] [Aspergillus nidulans FGSC
MAEEYEEEMNGDDGGMTGPGAPTPVSALEGLAGLTKRDCQLLMEGGFQTVESVAYAPKRVLEQVKGISEQKSAKILAEASKLVPLGFTTATEMHQRRSELISITTGSKNLDTLLAGGIETGSVTELFGEFRTGKSQICHTLAVTCQLPFDMGGGEGKCLYIDT

SEQ ID NO: 8361 - DNA, 741 bp, Muscodor strobelii
  misc_feature: SGI EST ID NO. CUFF.20369.0
  misc_feature: Variant of the nucleotide sequence at SEQ ID NO 8359
gcgccttaacgcgtcgtctttaatctctcttcaattcctcacgcaacatctgccttttcacaccaaacattcagccagtccttcttatctgcattgtcgatcgtgttcctctgatattgcgacctcttgtcgatttcattctctccgacttcaaacactcattctagaaattcaggatggccgaggagtacgaagaagaaatgaacggtgatgatggtggcatgactggtcctggcgctccaaccccagtcagtgcattggagggtctcgctgggcttacaaagcgcgattgtcagttgttgatggaaggtggttttcagacggtcgaatctgtagcttatgcgcccaaacgtgtactggagcaggtcaagggtatctcagagcagaagtctgccaaaattcttgctgaaggtaaatttcaaattcatttctgtttgaatagcttgatcaccagtctgtattatccatgtactgactgatatcagcctccaaacttgtccctttgggttttactacagcgactgagatgcaccagaggagaagtgagctaatctccattacaacgggatcaaagaacttggacacgctgctagctggtggtatcgagaccggctcagtaaccgagctcttcggcgagtttcgtaccggaaagagtcagatttgccatactttggccgttacgtgtcagttgccttttgatatgggtggtggagaaggcaaatgtctctacatcgacaccga

SEQ ID NO: 8362 - DNA, 3504 bp, Muscodor strobelii
  misc_feature: SGI cDNA ID NO. 562569
  misc_feature: Encodes the peptide sequence at SEQ ID NO 8363
atggcgactcgggagccaccttatgccttcaaagaggctcgcctgagcttcgagcccgcctcgtcggctgcgatagtcaatattcaacttcctgacccgtctaattccgccccaaagcgccagactaagacgtcggctggcacgaacgatcacacaactgcttttcgcgcccgcaattgcgctacttcctctgccatctaccatcgcaaacaccaccacttccctggaagctttctctggagagtcttggacgacaaccatgtgctcagcatacgaaccatcgatgtgtgcaagccagacaaagcatctgacgcgaatcttgttctgaacttctactttcccaaccaaatacggccctcatgtgttgcgctctcggacccgcaagatcacgatgcgctcgctgtctacgtcgtcgaccaggtcggccagctatatactctcttccttcgacccgactcctttcgtaaacgatccttcgtcgagactgggctgggcgatgtctgcaaggtccatatgcctgcggccttgaagggtggcttcaagacagcctacaggctgatagccgtcaacagcaaccaactcgttgtagcgcttaccgacggcggcaatctccgacttgacaaaaatgcatcccagcctgggtggaaggaagttcattataatgcgagaagtctgctccgcggttttcaaaagtacatcatgggcaagccaggcttcgacgagacggctgccgctgcagcggttcagaccgggcttggattgaacaatgcttccttcctactgactgtttgtctcgaccaccgtctgcgaatctggaatcttaacaatggtcagatactaggagcgatggatctactggatgctccacgcgacccccaggagatcggaaagtggcaactcgactcgacacagaccaacctgatccgtattgttggcgagacggagggcaaacggttgtgcatcacgtattcccctattggcgcgggcgaattcaagttctggaagctggaatctgacgatgataatactgtcgatgtcaatgacctctacccagatactcgcttggtaccatcaccgccactaggatctgacgtttggaccctggccgatttcaacgtaacagaacgcgttggtgggcacgggcttcgaatgtggatcatgtggaagaataacatggcctatcgcattcaggagttgagcttcttaattgacgaattgcccgaggtgtggtcggatcagtggcgttctgtatactcggacacaacgataccctcagcaccggtctccggctcttcagacccagttcaatcgagcgagcgatggctaaatctcattctcactcccgacagattctcccatgcaaccttaaaagctgcactgagtgcttacgaacaagcaattggcataccagagaagaaagcccgggctagtcaggacatagcagagtcaatatgtactgcaatttcctcgtctgcgtctcttcagaaaacctcatcaggggcgttagattatgaaggatttcgcaattcaaccgagagccagtggagaaaattctacagaattctcattgaaatcgacaagccccggggcgaggcactgtctctagcttatgagcctaggacagaaatgccctgggtagtttgcgcagacagcatttcagctatcagagattttacagcactggagcgcatttgtcacaacccacagtctaggcacttcgagccagaagatctctcatcatttattagtacaggccagaacttcgtcgaagcattctctgacagtacactgcaaatctgcaagtctgttcttcacgcagagctttttgaggagagttcaaagaccgatcaagagcgcattcagttcttctctgataaggctgggttttggcgccaaatttctgacgaagactgctctcaggccacggatgttctaggcgccaatttcaatgttgttacatcgaatctttatcagcaaatgatggcattatgcaatgcgacctggaatccgaagcgccccatggaatacccattgacagattttggacgaggtgttatcattagagccgccaaagatgttgctcagttacaatgggatgtctgtttcagtcaactcatattgctggtccatatggaatttgagttcgatcgtcccgaagacgctctccacaaccgaatcaatataggtcttgtgtataggagcttactgcaggccctccgcagattagaattgattcggtggcttgcgaacaccagattaccgtccagtgtgtctaaaggagacaagtctaactcattgtctggctcccctccaagtcgtgcgaagcgacccggcgacgatgtcaagttcagcacagtcttagaagagagcattgggcatctccttggtgtttctgatattggtttcgaacctgccgctactctaccctccgccatcacaaatattgtgggaaatctgtgcgcatacgaaagcgatgtcgagctgcagccacagtatgttcaatgtgcgttgcttgtacgagagagagccgaccttgctctcgaattgggtccattcaccgatcaggatccattctctgtatatatccaaggccgagtgtctcttactcttcgagatttcgcaaatgctgccacgtatttcaagaaggcagcttacggcatgagcacacctcaagctaatccgggtcgacatagcagtggtctgcttgacgatgaggaatggaatctgctgttcaacggcgcacctcgctactatgctcacattgtttcattatacgaaaagcagaaagcctactccttcgttgtagactttgcccaacttgctctgcaatttatcaacaaaaagacacaagatccggatctcattcgaacggaggttcagagccgtttgtttagtgctgcaacagctctctcacgattcgagctagcgcactctattctggtcgccatgaaagaccacgccctgcaacactcctttttgcggaccctcatacagaaaatgtgcgataatcttcacaacacggagctggtgggactgtcattccctagcctgcagaatgttgtagatgatattctggagcagaaatgcgaagagacggtggatgtcataacaggaatcccgtatcaccagatactctactcatggcgtattaagcggaacgactaccgcggtgctgcggccaccctccttgatcggatacagaaactccgacagctgggagagggcgatcaactgacaggcgaagacatgctcgatacggcaatcacacgacagtacttgatgctcatcaatgtcttgagttgtgttgaggagaagcaagcgtgggttactactgaggatatcattcaacaacctcatggcaagggggcagcactacgtgggaagcgcaaggtagtgacacttgcggacatccgaaaggaatatcaagatgaactcgatcggattgcggctattcagaataaccagtttgggttcgctgctgatgatgagatggatattctctga

SEQ ID NO: 8363 - protein, 1167 aa, Muscodor strobelii
  misc_feature: SGI Peptide ID NO. 562569
  misc_feature (1)..(1167): NCBI GI: 261355884 Blast Desc: conserved [Verticillium albo-atrum VaMs.102]
  misc_feature (1)..(1167): NCBI GI: 256734390 Blast Desc: NECHADRAFT_89992 [Nectria haematococca mpVI 77-13-4]
  misc_feature (1)..(1112): NCBI GI: 85116820 Blast Desc: NCU02742 [Neurospora crassa OR74A] gi|28926930|gb|EAA35891.1| conserved [Neurospora crassa OR74A]
  misc_feature (1)..(1166): NCBI GI: 171680225 Blast Desc: protein product [Podospora anserina] gi|170939739|emb|CAP64965.1| protein product [Podospora anserina]
  misc_feature (1)..(1163): NCBI GI: 39945696 Blast Desc: MGG_04831 [Magnaporthe grisea 70-15] gi|145021319|gb|EDK05448.1| MGG_04831 [Magnaporthe grisea 70-15]
  misc_feature (1)..(1129): NCBI GI: 116206998 Blast Desc: CHGG_02792 [Chaetomium globosum CBS 148.51] gi|88183389|gb|EAQ90857.1| CHGG_02792 [Chaetomium globosum CBS 148.51]
  misc_feature (1)..(1158): NCBI GI: 156053231 Blast Desc: SS1G_06783 [Sclerotinia sclerotiorum 1980] gi|154704561|gb|EDO04300.1| SS1G_06783 [Sclerotinia sclerotiorum 1980]
  misc_feature (1)..(1158): NCBI GI: 154314606 Blast Desc: BC1G_04012 [Botryotinia fuckeliana B05.10] gi|150848634|gb|EDN23827.1| BC1G_04012 [Botryotinia fuckeliana B05.10]
  misc_feature (10)..(1159): NCBI GI: 70995293 Blast Desc: conserved [Aspergillus fumigatus Af293] gi|66850041|gb|EAL90368.1| conserved [Aspergillus fumigatus Af293]
  misc_feature (10)..(1159): NCBI GI: 159131161 Blast Desc: conserved [Aspergillus fumigatus A1163]
MATREPPYAFKEARLSFEPASSAAIVNIQLPDPSNSAPKRQTKTSAGTNDHTTAFRARNCATSSAIYHRKHHHFPGSFLWRVLDDNHVLSIRTIDVCKPDKASDANLVLNFYFPNQIRPSCVALSDPQDHDALAVYVVDQVGQLYTLFLRPDSFRKRSFVETGLGDVCKVHMPAALKGGFKTAYRLIAVNSNQLVVALTDGGNLRLDKNASQPGWKEVHYNARSLLRGFQKYIMGKPGFDETAAAAAVQTGLGLNNASFLLTVCLDHRLRIWNLNNGQILGAMDLLDAPRDPQEIGKWQLDSTQTNLIRIVGETEGKRLCITYSPIGAGEFKFWKLESDDDNTVDVNDLYPDTRLVPSPPLGSDVWTLADFNVTERVGGHGLRMWIMWKNNMAYRIQELSFLIDELPEVWSDQWRSVYSDTTIPSAPVSGSSDPVQSSERWLNLILTPDRFSHATLKAALSAYEQAIGIPEKKARASQDIAESICTAISSSASLQKTSSGALDYEGFRNSTESQWRKFYRILIEIDKPRGEALSLAYEPRTEMPWVVCADSISAIRDFTALERICHNPQSRHFEPEDLSSFISTGQNFVEAFSDSTLQICKSVLHAELFEESSKTDQERIQFFSDKAGFWRQISDEDCSQATDVLGANFNVVTSNLYQQMMALCNATWNPKRPMEYPLTDFGRGVIIRAAKDVAQLQWDVCFSQLILLVHMEFEFDRPEDALHNRINIGLVYRSLLQALRRLELIRWLANTRLPSSVSKGDKSNSLSGSPPSRAKRPGDDVKFSTVLEESIGHLLGVSDIGFEPAATLPSAITNIVGNLCAYESDVELQPQYVQCALLVRERADLALELGPFTDQDPFSVYIQGRVSLTLRDFANAATYFKKAAYGMSTPQANPGRHSSGLLDDEEWNLLFNGAPRYYAHIVSLYEKQKAYSFVVDFAQLALQFINKKTQDPDLIRTEVQSRLFSAATALSRFELAHSILVAMKDHALQHSFLRTLIQKMCDNLHNTELVGLSFPSLQNVVDDILEQKCEETVDVITGIPYHQILYSWRIKRNDYRGAAATLLDRIQKLRQLGEGDQLTGEDMLDTAITRQYLMLINVLSCVEEKQAWVTTEDIIQQPHGKGAALRGKRKVVTLADIRKEYQDELDRIAAIQNNQFGFAADDEMDIL

SEQ ID NO: 8364 - DNA, 4984 bp, Muscodor strobelii
  misc_feature: SGI EST ID NO. CUFF.20566.0
  misc_feature: Variant of the nucleotide sequence at SEQ ID NO 8362
gcgtgccaacccggaagctgcagcgctcccttgcaagtttctgagcatttgacatcgagcattgagtcgacttgtgagtcgcgttgcggtggttcccattttctagtttccagattaaagcttccctcccgcgtcgctaagctccaccaccaccaatcctctcggcgtgtcaataattgccatacctagagcttcggcagcctgtcgcaggctgtggatggacccggcatggcgactcgggagccaccttatgccttcaaagaggctcgcctgagcttcgagcccgcctcgtcggctgcgatagtcaatattcaacttcctgacccgtctaattccgccccaaagcgccagactaagacgtcggctggcacgaacgatcacacaactgcttttcgcgcccgcaattgcgctacttcctctgccatctaccatcgcaaacaccaccacttccctggaagctttctctggagagtcttggacgacaaccatgtgctcagcatacgaaccatcgatgtgtgcaagccagacaaagcatctgacgcgaatcttgttctgaacttctactttcccaaccaaatacggccctcatgtgttgcgctctcggacccgcaagatcacgatgcgctcgctgtctacgtcgtcgaccaggtcggccagctatatactctcttccttcgacccgactcctttcgtaaacgatccttcgtcgagactgggctgggcgatgtctgcaaggtccatatgcctgcggccttgaagggtggcttcaagacagcctacaggctgatagccgtcaacagcaaccaactcgttgtagcgcttaccgacggcggcaatctccgacttgacaaaaatgcatcccagcctgggtggaaggaagttcattataatgcgagaagtctgctccgcggttttcaaaagtacatcatgggcaagccaggcttcgacgagacggctgccgctgcagcggttcagaccgggcttggattgaacaatgcttccttcctactgactgtttgtctcgaccaccgtctgcgaatctggaatcttaacaatggtcagatactaggagcgatggatctactggatgctccacgcgacccccaggagatcggaaagtggcaactcgactcgacacagaccaacctgatccgtattgttggcgagacggagggcaaacggttgtgcatcacgtattcccctattggcgcgggcgaattcaagttctggaagctggaatctgacgatgataatactgtcgatgtcaatgacctctacccagatactcgcttggtaccatcaccgccactaggatctgacgtttggaccctggccgatttcaacgtaacagaacgcgttggtgggcacgggcttcgaatgtggatcatgtggaagaataacatggcctatcgcattcaggagttgagcttcttaattgacgaattgcccgaggtgtggtcggatcagtggcgttctgtatactcggacacaacgataccctcagcaccggtctccggctcttcagacccagttcaatcgagcgagcgatggctaaatctcattctcactcccgacagattctcccatgcaaccttaaaagctgcactgagtgcttacgaacaagcaattggcataccagagaagaaagcccgggctagtcaggacatagcagagtcaatatgtactgcaatttcctcgtctgcgtctcttcagaaaacctcatcaggggcgttagattatgaaggatttcgcaattcaaccgagagccagtggagaaaattctacagaattctcattgaaatcgacaagccccggggcgaggcactgtctctagcttatgagcctaggacagaaatgccctgggtagtttgcgcagacagcatttcagctatcagagattttacagcactggagcgcatttgtcacaacccacagtctaggcacttcgagccagaagatctctcatcatttattagtacaggccagaacttcgtcgaagcattctctgacagtacactgcaaatctgcaagtctgttcttcacgcagagctttttgaggagagttcaaagaccgatcaagagcgcattcagttcttctctgataaggctgggttttggcgccaaatttctgacgaagactgctctcaggccacggatgttctaggcgccaatttcaatgttgttacatcgaatctttatcagcaaatgatggcattatgcaatgcgacctggaatccgaagcgccccatggaatacccattgacagattttggacgaggtgttatcattagagccgccaaagatgttgctcagttacaatgggatgtctgtttcagtcaactcatattgctggtccatatggaatttgagttcgatcgtcccgaagacgctctccacaaccgaatcaatataggtcttgtgtataggagcttactgcaggccctccgcagattagaattgattcggtggcttgcgaacaccagattaccgtccagtgtgtctaaaggagacaagtctaactcattgtctggctcccctccaagtcgtgcgaagcgacccggcgacgatgtcaagttcagcacagtcttagaagagagcattgggcatctccttggtgtttctgatattggtttcgaacctgccgctactctaccctccgccatcacaaatattgtgggaaatctgtgcgcatacgaaagcgatgtcgagctgcagccacagtatgttcaatgtgcgttgcttgtacgagagagagccgaccttgctctcgaattgggtccattcaccgatcaggatccattctctgtatatatccaaggccgagtgtctcttactcttcgagatttcgcaaatgctgccacgtatttcaagaaggcagcttacggcatgagcacacctcaagctaatccgggtcgacatagcagtggtctgcttgacgatgaggaatggaatctgctgttcaacggcgcacctcgctactatgctcacattgtttcattatacgaaaagcagaaagcctactccttcgttgtagactttgcccaacttgctctgcaatttatcaacaaaaagacacaagatccggatctcattcgaacggaggttcagagccgtttgtttagtgctgcaacagctctctcacgattcgagctagcgcactctattctggtcgccatgaaagaccacgccctgcaacactcctttttgcggaccctcatacagaaaatgtgcgataatcttcacaacacggagctggtgggactgtcattccctagcctgcagaatgttgtagatgatattctggagcagaaatgcgaagagacggtggatgtcataacaggaatcccgtatcaccagatactctactcatggcgtattaagcggaacgactaccgcggtgctgcggccaccctccttgatcggatacagaaactccgacagctgggagagggcgatcaactgacaggcgaagacatgctcgatacggcaatcacacgacagtacttgatgctcatcaatgtcttgagttgtgttgaggagaagcaagcgtgggttactactgaggatatcattcaacaacctcatggcaagggggcagcactacgtgggaagcgcaaggtagtgacacttgcggacatccgaaaggaatatcaagatgaactcgatcggattgcggctattcagaataaccagtttgggttcgctgctgatgatgagatggatattctctgaacgaagaataagtgagaggggggaaaaaaaactgtaaattaattcggcgaagacaaaagctcgagggatacgctacggttggtttcgttagagactttctcacggatggctaatactcgattgtagtcatccccttataggggatattgcttggcttcatattatgttcgataggagtaagggagcctcggagaccagtgcggtatagctcaatgagaagacactgatgtatgatacccatacgagacagactaggcagctcacgcgagaaagaagtgatcgagctggacaattggttccattcattgtgatttacacgcaaataaacgccatgcttcctatgggccttcgtcgctaaactatgtacaatgttttaaagagaaatggggtgtctattatgctgtgacgggtggcatctgcttcgttgactcggggaccgtgaccacgccactgttgggctcgttggagatctggtcgggagcttgcctgtataatacaatctccgattgcttgaagtaccgccgggcgtcctcgtctatgaggacgagacttagatagtatcttgttgagaattttttgttgacgtcgcggaatgttggggttaggtcgaagccgcctaggaataaccggatggggatggtctcgccacgggatggggagccgtccattatctaagtcgcagttaataaactgattatattgaggcttgagggtttaggaagatttacctcgaaccgcactaaagtctcactctcattatactgattcggcgctgcgccggtagtctcccgcctaatgatgctcaactccatgtgcttgatcttcaatctcacgagcaagaagtagattctgccgacgatgacgtccttcaggtggtatttgctcttggagtactcgaactcgatgtggagacagtcctcgataccgacgtccatcttgatgctgctgttcatctccggggggatgcggtagctgtagacccacatgtccttctcgcggatgacgtcggccatgcgccgggcgacggtgacgcggacgaagtagcgcagcttcacgttgatgccgttgtaggactcgtaggctttctcgacgttcttgaagttgaagtcgaaggtctgcgggtgttgcagttcgccgggcgcggcgagctcttggtttaggcagaggaattcgtagtggttgcctcggtcgaagaacatctctgtatgaagcgatcaaatatcagtaaaattcaaggttggtgaggtgttgt

SEQ ID NO: 8365 - DNA, 507 bp, Muscodor strobelii
  misc_feature: SGI cDNA ID NO. 562570
  misc_feature: Encodes the peptide sequence at SEQ ID NO 8366
atgtgcgataatcttcacaacacggagctggtgggactgtcattccctagcctgcagaatgttgtagatgatattctggagcagaaatgcgaagagacggtggatgtcataacaggaatcccgtatcaccagatactctactcatggcgtattaagcggaacgactaccgcggtgctgcggccaccctccttgatcggatacagaaactccgacagctgggagagggcgatcaactgacaggcgaagacatgctcgatacggcaatcacacgacagtacttgatgctcatcaatgtcttgagttgtgttgaggagaagcaagcgtgggttactactgaggatatcattcaacaacctcatggcaagggggcagcactacgtgggaagcgcaaggtagtgacacttgcggacatccgaaaggaatatcaagatgaactcgatcggattgcggctattcagaataaccagtttgggttcgctgctgatgatgagatggatattctctga

SEQ ID NO: 8366 - protein, 168 aa, Muscodor strobelii
  misc_feature: SGI Peptide ID NO. 562570
  misc_feature (1)..(168): NCBI GI: 256734390 Blast Desc: NECHADRAFT_89992 [Nectria haematococca mpVI 77-13-4]
  misc_feature (1)..(168): NCBI GI: 261355884 Blast Desc: conserved [Verticillium albo-atrum VaMs.102]
  misc_feature (1)..(164): NCBI GI: 39945696 Blast Desc: MGG_04831 [Magnaporthe grisea 70-15] gi|145021319|gb|EDK05448.1| MGG_04831 [Magnaporthe grisea 70-15]
  misc_feature (1)..(167): NCBI GI: 171680225 Blast Desc: protein product [Podospora anserina] gi|170939739|emb|CAP64965.1| protein product [Podospora anserina]
  misc_feature (1)..(113): NCBI GI: 85116820 Blast Desc: NCU02742 [Neurospora crassa OR74A] gi|28926930|gb|EAA35891.1| conserved [Neurospora crassa OR74A]
  misc_feature (1)..(159): NCBI GI: 156053231 Blast Desc: SS1G_06783 [Sclerotinia sclerotiorum 1980] gi|154704561|gb|EDO04300.1| SS1G_06783 [Sclerotinia sclerotiorum 1980]
  misc_feature (1)..(159): NCBI GI: 154314606 Blast Desc: BC1G_04012 [Botryotinia fuckeliana B05.10] gi|150848634|gb|EDN23827.1| BC1G_04012 [Botryotinia fuckeliana B05.10]
  misc_feature (1)..(130): NCBI GI: 116206998 Blast Desc: CHGG_02792 [Chaetomium globosum CBS 148.51] gi|88183389|gb|EAQ90857.1| CHGG_02792 [Chaetomium globosum CBS 148.51]
  misc_feature (1)..(168): NCBI GI: 169623440 Blast Desc: SNOG_14961 [Phaeosphaeria nodorum SN15] gi|160704983|gb|EAT77504.2| SNOG_14961 [Phaeosphaeria nodorum SN15]
  misc_feature (1)..(154): NCBI GI: 189210818 Blast Desc: conserved [Pyrenophora tritici-repentis Pt-1C-BFP] gi|187977833|gb|EDU44459.1| conserved [Pyrenophora tritici-repentis Pt-1C-BFP]
MCDNLHNTELVGLSFPSLQNVVDDILEQKCEETVDVITGIPYHQILYSWRIKRNDYRGAAATLLDRIQKLRQLGEGDQLTGEDMLDTAITRQYLMLINVLSCVEEKQAWVTTEDIIQQPHGKGAALRGKRKVVTLADIRKEYQDELDRIAAIQNNQFGFAADDEMDIL

SEQ ID NO: 8367 - DNA, 4984 bp, Muscodor strobelii; identical to SEQ ID NO: 8364
  misc_feature: SGI EST ID NO. CUFF.20566.0
  misc_feature: Variant of the nucleotide sequence at SEQ ID NO 8365

SEQ ID NO: 8368 - DNA, 582 bp, Muscodor strobelii
  misc_feature: SGI cDNA ID NO. 562572
  misc_feature: Reduced expression when VOC is produced
  misc_feature: Encodes the peptide sequence at SEQ ID NO 8369
atgcggtacatccacagcgaggagatcctggagattccagagggagtcaccgtctccatcaagtccagaaaggtcaccgtcgagggaccccgaggcaagctgaccaaggatctctcccacttggccgtcaacttctcccacccccgcaagaatgccatcgccatcgagatccaccacggctcgaggaagaacgtcgccaccctccgaactgtccgcaccctcatcaacaacttggtcatcggtgtcaccaagggcttcaagtacaagatgcgttacgtctacgcccatttccccatcaacgtcaacctcgagaagaacaacgagaccaacaactgggaggtcgagatccgtaacttcgtcggtgagaagctcgtccgccgtgtcgtgatgcagcccggtgtcgatgtcgaggtctccaaggcccagaaggatgagctccttatcctcggtaactcgctcgaggccgtctcacagtccgcagccgacatccagcagatctgccgcgtccgcaacaaggatatccgaaagttcttggacggtatctacgtatcggagaagggcaacgttgtcgaggagttctaa

SEQ ID NO: 8369 - protein, 193 aa, Muscodor strobelii
  misc_feature: SGI Peptide ID NO. 562572
  misc_feature (12)..(85): Pfam Id: PF00347 Pfam Desc: Ribosomal protein L6
  misc_feature (97)..(180): Pfam Id: PF00347 Pfam Desc: Ribosomal protein L6
  misc_feature (1)..(192): NCBI GI: 116207002 Blast Desc: conserved [Chaetomium globosum CBS 148.51] gi|88183391|gb|EAQ90859.1| conserved [Chaetomium globosum CBS 148.51]
  misc_feature (1)..(192): NCBI GI: 85116829 Blast Desc: 60S ribosomal protein L9 [Neurospora crassa OR74A] gi|28926932|gb|EAA35893.1| 60S ribosomal protein L9 [Neurospora crassa OR74A]
  misc_feature (1)..(191): NCBI GI: 39945692 Blast Desc: conserved [Magnaporthe grisea 70-15] gi|145021321|gb|EDK05450.1| conserved [Magnaporthe grisea 70-15]
  misc_feature (1)..(191): NCBI GI: 261355886 Blast Desc: 60S ribosomal protein L9-A [Verticillium albo-atrum VaMs.102]
  misc_feature (1)..(192): NCBI GI: 256734391 Blast Desc: [Nectria haematococca mpVI 77-13-4]
  misc_feature (1)..(192): NCBI GI: 46108544 Blast Desc: FG01154.1 [Gibberella zeae PH-1]
  misc_feature (1)..(192): NCBI GI: 226509906 Blast Desc: 60S ribosomal protein L9 [Zea mays] gi|195657601|gb|ACG48268.1| 60S ribosomal protein L9 [Zea mays]
  misc_feature (1)..(192): NCBI GI: 171680221 Blast Desc: protein product [Podospora anserina] gi|170939737|emb|CAP64963.1| protein product [Podospora anserina]
  misc_feature (1)..(189): NCBI GI: 148909861 Blast Desc: [Picea sitchensis]
  misc_feature (1)..(192): NCBI GI: 75859014 Blast Desc: conserved [Aspergillus nidulans FGSC A4] gi|40747636|gb|EAA66792.1| conserved [Aspergillus nidulans FGSC A4] gi|259488291|tpe|CBF87624.1| TPA: 60S ribosomal protein L9,
  misc_feature: Useful for introducing or modulating the production of volatile compounds
MRYIHSEEILEIPEGVTVSIKSRKVTVEGPRGKLTKDLSHLAVNFSHPRKNAIAIEIHHGSRKNVATLRTVRTLINNLVIGVTKGFKYKMRYVYAHFPINVNLEKNNETNNWEVEIRNFVGEKLVRRVVMQPGVDVEVSKAQKDELLILGNSLEAVSQSAADIQQICRVRNKDIRKFLDGIYVSEKGNVVEEF

SEQ ID NO: 8370 - DNA, 1234 bp, Muscodor strobelii
  misc_feature: SGI EST ID NO. CUFF.20934.1
  misc_feature: Variant of the nucleotide sequence at SEQ ID NO 8368
aatttagcgactacacaggaatttccccatcgacgaaattcttcgacattggctgcttgctggtgcacccgacaaaagctcaaacaccacatcgtcgcatcgccaattcttcaggccgacttccaatccgactcccccgccacctgaagaaccaacgtcaagatgcggtacatccacagcgaggagatcctggagattccagagggagtcaccgtctccatcaagtccagaaaggtcaccgtcgagggaccccgaggcaagctgaccaaggatctctcccacttggccgtcaacttctcccacccccgcaagaatgccatcgccatcgagatccaccacggctcgaggaagaacgtcgccaccctccgaactgtccgcaccctcatcaacaacttggtcatcggtgtcaccaagggcttcaagtacaagatgcgttacgtctacgcccatttccccatcaacgtcaacctcgagaagaacaacgagaccaacaactgggaggtcgagatccgtaacttcgtcggtgagaagctcgtccgccgtgtcgtgatgcagcccggtgtcgatgtcgaggtctccaaggcccagaaggatgagctccttatcctcggtaactcgctcgaggccgtctcacagtccgcagccgacatccagcagatctgccgcgtccgcaacaaggatatccgaaagttcttggacggtatctacgtatcggagaagggcaacgttgtcgaggagttctaagcggtcaaccctgggggaggtttctttaattgctttctgggtccttatcaggagtcgccggggtgcatttgcatgtcacgtagcaaaaagctagctacgaaaatcggaaccaaatactgaatgaactggttattcttttcggcgacgaatcaacgaatcctgatacctcaacgcaacgcctgaaacacgatccatgaggaaatgccgacttgacgagaccgcgaagagggctagttcaaggactgcagatggcaatggcgcagtgtgaatttttttttcacttgctaaaccaaagcacggcattctgtcatggcatcaaaagacttgcctagatgagatatgaatccaaaaaagcatttgtacaagtgaatctggatcattgatccatcgtcgtctaaatcgtattatgagaattgcaacaccgctctattgttgcctgcagaaccttgcccaaacttggcatttaggatgctttaatgcttatttgaaa

SEQ ID NO: 8371 - DNA, 1206 bp, Muscodor strobelii
  misc_feature: SGI cDNA ID NO. 562573
  misc_feature: Encodes the peptide sequence at SEQ ID NO 8372
atgcaccccgtccggtccccactgggggtcctggccctcgcacttgctgccatcgtcagtgctagcccatatccccgcgacaatttgcgagatctcggctacggctacctcaagaacgaacaatgctccgagtactgcggcgccgataacgagatatgctgctccaatgatgagagctgttacacatcttcaggcgttgcaggctgcactgcagttccggaactcaagcgtgactttacaggctatacaaccacctggaccgaaaccctgacgttcacaagtgtcgtcagttcttggtatgtgccaaccaccactgctggtgtcggcaccaacggcgaggattgcgtgcctcctgagggttccggcgagatagcttgtggtaatatttgttgcgcgacctggcaatattgtgcctacaaaggccaatgtgtcgccaatgcaggctacagcacatggacagagatcaccaccacgggcgtcatggtcaccacacaatattcggcaccctggcgaccgacctctggccctgtaacagcaacgacgaccactgatacgactggtacactggcaagtgaaaccacgacacccacaagcagcatgggcaatggaacagtcgctagtacaagcccttctctcagtcccggtgctattgctggcattgttgtcggtgcacttgtcggtgtcgtcctactccttctcctctgcttctgttgcattgtgcgtggtctctggggaatcctcgcaggcattcttggtttcggcaagaagaagaagcgcgactctgagcgtgtcgaaatcatcgaagagcgatactcccgccacggcagtgcagccgcagctcgacccgcccacagaacctggtttggaggaggtggtggtggccgaccctcatcaggcgcctcaagaaaggagaagaaatcaggtggaggatggggctggatagcagccggtgccggtgccgcagcactcctcctcggtctgcgacggagtgacaagcacaagaagggggcagctagccacaggtctagaagcgattggagcagttcgtattataccgactcctataccgcgactagcccaagttcctttagtagtgacaggagaactcgccgatctgggcgaacacatcggtctggccactcgggccgctcgagacagtcgagaggcacgagagcctcgcgtgcttcacgaccttcgagggtgtag

SEQ ID NO: 8372 - protein, 401 aa, Muscodor strobelii
  misc_feature: SGI Peptide ID NO. 562573
  misc_feature (11)..(310): NCBI GI: 171680219 Blast Desc: protein product [Podospora anserina] gi|170939736|emb|CAP64962.1| protein product [Podospora anserina]
  misc_feature (10)..(309): NCBI GI: 256735111 Blast Desc: NECHADRAFT_98734 [Nectria haematococca mpVI 77-13-4]
  misc_feature (20)..(309): NCBI GI: 46108542 Blast Desc: FG01153.1 [Gibberella zeae PH-1]
  misc_feature (19)..(355): NCBI GI: 156062122 Blast Desc: SS1G_01176 [Sclerotinia sclerotiorum 1980] gi|154696513|gb|EDN96251.1| SS1G_01176 [Sclerotinia sclerotiorum 1980]
  misc_feature (4)..(327): NCBI GI: 39945690 Blast Desc: MGG_04828 [Magnaporthe grisea 70-15] gi|145021322|gb|EDK05451.1| MGG_04828 [Magnaporthe grisea 70-15]
  misc_feature (13)..(359): NCBI GI: 261355887 Blast Desc: [Verticillium albo-atrum VaMs.102]
  misc_feature (73)..(335): NCBI GI: 85116833 Blast Desc: NCU02745 [Neurospora crassa OR74A] gi|28926933|gb|EAA35894.1| NCU02745 [Neurospora crassa OR74A]
  misc_feature (19)..(222): NCBI GI: 154292076 Blast Desc: BC1G_14847 [Botryotinia fuckeliana B05.10] gi|150846274|gb|EDN21467.1| BC1G_14847 [Botryotinia fuckeliana B05.10]
  misc_feature (4)..(142): NCBI GI: 116207004 Blast Desc: CHGG_02795 [Chaetomium globosum CBS 148.51] gi|88183392|gb|EAQ90860.1| CHGG_02795 [Chaetomium globosum CBS 148.51]
  misc_feature (35)..(333): NCBI GI: 67526425 Blast Desc: AN3670.2 [Aspergillus nidulans FGSC A4] gi|40740688|gb|EAA59878.1| AN3670.2 [Aspergillus nidulans FGSC A4] gi|259481793|tpe|CBF75646.1| TPA: conserved [Aspergillus FGSC
MHPVRSPLGVLALALAAIVSASPYPRDNLRDLGYGYLKNEQCSEYCGADNEICCSNDESCYTSSGVAGCTAVPELKRDFTGYTTTWTETLTFTSVVSSWYVPTTTAGVGTNGEDCVPPEGSGEIACGNICCATWQYCAYKGQCVANAGYSTWTEITTTGVMVTTQYSAPWRPTSGPVTATTTTDTTGTLASETTTPTSSMGNGTVASTSPSLSPGAIAGIVVGALVGVVLLLLLCFCCIVRGLWGILAGILGFGKKKKRDSERVEIIEERYSRHGSAAAARPAHRTWFGGGGGGRPSSGASRKEKKSGGGWGWIAAGAGAAALLLGLRRSDKHKKGAASHRSRSDWSSSYYTDSYTATSPSSFSSDRRTRRSGRTHRSGHSGRSRQSRGTRASRASRPSRV

SEQ ID NO: 8373 - DNA, 2347 bp, Muscodor strobelii
  misc_feature: SGI EST ID NO. CUFF.20391.1
  misc_feature: Variant of the nucleotide sequence at SEQ ID NO 8371
cgctgtttggcgacagcctattccgctgggtgacggcaccacaccaaccccgcggcttttcacatcttatcgtgcagctttttgacacgcaaaaagtggctgggaattgatagtcggcaatccatgttaaagaccattgcatgcatgcacgatcttgcgtcgccgtactcccatcctctcttttcctcttcccattcttagtgattatacattgacgccctttttgtttttttttctcggcgacctcaaatttgaaaatctgcaagttgcgcgttaacctgtaaccttgtttccgacgtcaattcacctgttcactgacactgcattcgctgcgcagcagtctcgataagagtgtaacttccccgccgacctccgatcgcagaaatccgggacagccagcaaagcaaagctgcattgacctacagaacagtcagcagatcaatcaattcactgtcgcatgcgatcggctcttcgaaattgtaatcgagacccaacagaaggggcggaggtggaagacagctgcaattaggttttgaagccagcactaaagtcaatacctcaaagtcccaagaaacttagatcctcgacggcggtacaagatgcaccccgtccggtccccactgggggtcctggccctcgcacttgctgccatcgtcagtgctagcccatatccccgcgacaatttgcgagatctcggctacggctacctcaagaacgaacaatgctccgagtactgcggcgccgataacgagatatgctgctccaatgatgagagctgttacacatcttcaggcgttgcaggctgcactgcagttccggaactcaagcgtgactttacaggctatacaaccacctggaccgaaaccctgacgttcacaagtgtcgtcagttcttggtatgtgccaaccaccactgctggtgtcggcaccaacggcgaggattgcgtgcctcctgagggttccggcgagatagcttgtggtaatatttgttgcgcgacctggcaatattgtgcctacaaaggccaatgtgtcgccaatgcaggctacagcacatggacagagatcaccaccacgggcgtcatggtcaccacacaatattcggcaccctggcgaccgacctctggccctgtaacagcaacgacgaccactgatacgactggtacactggcaagtgaaaccacgacacccacaagcagcatgggcaatggaacagtcgctagtacaagcccttctctcagtcccggtgctattgctggcattgttgtcggtgcacttgtcggtgtcgtcctactccttctcctctgcttctgttgcattgtgcgtggtctctggggaatcctcgcaggcattcttggtttcggcaagaagaagaagcgcgactctgagcgtgtcgaaatcatcgaagagcgatactcccgccacggcagtgcagccgcagctcgacccgcccacagaacctggtttggaggaggtggtggtggccgaccctcatcaggcgcctcaagaaaggagaagaaatcaggtggaggatggggctggatagcagccggtgccggtgccgcagcactcctcctcggtctgcgacggagtgacaagcacaagaagggggcagctagccacaggtctagaagcgattggagcagttcctttagtagtgacaggagaactcgccgatctgggcgaacacatcggtctggccactcgggccgctcgagacagtcgagaggcacgagagcctcgcgtgcttcacgaccttcgagggtgtagcgcaccaggaatgatcgtggaggtgcgctgaaaaggcgaaccaaggcacgagagacacgaaagacacgacagtcacctacgcctcctgcaccgagtgcaccgagtttggactgattccggtcaccacttcttcaccactattgatgattacagactgttattataatcctttttcatccactgtctatactttccccaccccatgaagatacactgcacgaatcggcgtttggaggaaggaatcactacactgctttttcacacccggcatataagggagaagcacggcatttcacgaaagagaacgatgctcgatgtgatggatagaaactcacaagctagtgagagagatgacatgagaacgaaagagaactttggaatgatgaaatttccatgaacaatgctgtatatgagatgagagagatcctggcatttaaatgtgtgccacttgggatgagcgaaaatgcctggaagccagtgaacgggctcatgataggggcatgcatcgccgacagaatagagaagcacttgaggaatgaatgaatgaaaaaggcttttggccctaagtttaataccctgct

SEQ ID NO: 8374 - DNA, 1620 bp, Muscodor strobelii
  misc_feature: SGI cDNA ID NO. 562574
  misc_feature: Encodes the peptide sequence at SEQ ID NO 8375
atggcctcaagggccactgccacgaggcgcttggccgccaccgcacagcaactccggccgttgacggcgctggcttccaccgcgaccagctatcccaacacccacgagcgcatctccaagcccgaggacaccccttacttcatcgataaccagttcgtcgccagcaagaccgacaagttcatcgatctccatgatcccgccaccaacaacctcgtcacacgcgtcccccagatgagcgatgcagagctcgaggccgtcgtcgcgagcgccaagaaggccttcccggcctggcgcaacaccagcgtcctcgcccgccagcagatcatgttcaaattcgtgaatctggtccgcgagaactgggatcgcctggccgccagcatcaccctcgagcagggtaagactttccccgacgccaagggcgatgtcttgcgaggtcttcaggtcgccgaggccgcctgtggtgctcccgagctgctcaagggtgagctgctcgaggtcgccaaggatatggagacgaggtcatacaaggagccattgggtgtcgttgccgccatctgccccttcaacttccctgccatgattcccctctggtccatccccattgctaccgtcaccggcaataccctcattatcaagccctcggagcgagacccgggtgccgctatgatcctcgtcgagctcgccaagaaggccggtttccccgatggtgttgtcaacatcgtgcacggcgcccaccgcaccgtcgatttcctgattgactctccagatatcaaggccctcagctttgttggtggcaataaggcaggtgaatacatcttcgccagaggatctgccaacggaaagcgagtccaggccaatctcggcgccaagaaccacgctgctgtcctacccgactgcaacaagaaccacttcctcaactctgttgtaggtgctgctttcggtgctgccggtcagcggtgcatggctttgagcacgcttgtcatggtcggcgagaccaaggagtggctgcccgagttggccgagatggccaagaagctccaggtgaacggaggtttcgaagagggtgccgatctcggaccggtcatttcaccccagtctaaggaaagaatcgagtctttgattgccagcgctgaagaggagggtgctacgatcttgctcgatggccgtggctttaagcccgagaaataccccaacggaaactgggttgcgcctactatcatcaccaatgtgacgacggacatgaagtgctacaaggaggagatcttcggccctgtcctcgtctgtctcaacgtcgacacgctcgatgaggctgtcgagctgatcaacaagaacgagtacggaaacggcacagcgatcttcacaaggtcaggccctacggcggagaccttcaggaggaatatcgaggccggacaagttggtatcaacgtcccgattcctgtaccgctgcccatgttctcgttcactggtaacaagaagagtgttgcgggtggtggcgccaacactttctatggacgaccgggtattgcattctatacgcagcagaagactgttactgctatgtggtcttcggcggatgcgattagccagaaggctgatgtttctatgcctacgcatagttag

SEQ ID NO: 8375 - protein, 539 aa, Muscodor strobelii
  misc_feature: SGI Peptide ID NO. 562574
  misc_feature (52)..(517): Pfam Id: PF00171 Pfam Desc: Aldehyde dehydrogenase family
  misc_feature (6)..(539): NCBI GI: 39951927 Blast Desc: conserved [Magnaporthe grisea 70-15] gi|145020546|gb|EDK04675.1| conserved [Magnaporthe grisea 70-15]
  misc_feature (5)..(538): NCBI GI: 256734543 Blast Desc: [Nectria haematococca mpVI 77-13-4]
  misc_feature (5)..(539): NCBI GI: 116181718 Blast Desc: CHGG_01487 [Chaetomium globosum CBS 148.51] gi|88185784|gb|EAQ93252.1| CHGG_01487 [Chaetomium globosum CBS 148.51]
  misc_feature (5)..(539): NCBI GI: 164423067 Blast Desc: methylmalonate-semialdehyde dehydrogenase, mitochondrial precursor [Neurospora crassa OR74A] gi|157069934|gb|EAA35465.2| methylmalonate-semialdehyde precursor
  misc_feature (5)..(539): NCBI GI: 38567018 Blast Desc: methylmalonate-semialdehyde dehydrogenase (acylating) [Neurospora crassa]
  misc_feature (9)..(537): NCBI GI: 208658296 Blast Desc: methylmalonate semialdehyde dehydrogenase [Beauveria bassiana]
  misc_feature (7)..(539): NCBI GI: 154299017 Blast Desc: BC1G_11821 [Botryotinia fuckeliana B05.10] gi|150857524|gb|EDN32716.1| BC1G_11821 [Botryotinia fuckeliana B05.10]
  misc_feature (7)..(539): NCBI GI: 156058101 Blast Desc: SS1G_04782 [Sclerotinia sclerotiorum 1980] gi|154702567|gb|EDO02306.1| SS1G_04782 [Sclerotinia sclerotiorum 1980]
  misc_feature (2)..(539): NCBI GI: 171696128 Blast Desc: protein product [Podospora anserina] gi|170948306|emb|CAP60470.1| protein product [Podospora anserina]
  misc_feature (7)..(538): NCBI GI: 46107214 Blast Desc: FG00490.1 [Gibberella zeae PH-1]
  misc_feature (28)..(537): SWISSPROT Homolog: EC 1.2.1.27 Methylmalonate-semialdehyde dehydrogenase (acylating)
  misc_feature (28)..(537): SWISSPROT Homolog: EC 1.2.1.18 Malonate-semialdehyde dehydrogenase (acetylating)
  misc_feature: Useful for introducing or modulating the production of volatile compounds
  misc_feature: Useful for fungicidal and/or biocontrol applications
MASRATATRRLAATAQQLRPLTALASTATSYPNTHERISKPEDTPYFIDNQFVASKTDKFIDLHDPATNNLVTRVPQMSDAELEAVVASAKKAFPAWRNTSVLARQQIMFKFVNLVRENWDRLAASITLEQGKTFPDAKGDVLRGLQVAEAACGAPELLKGELLEVAKDMETRSYKEPLGVVAAICPFNFPAMIPLWSIPIATVTGNTLIIKPSERDPGAAMILVELAKKAGFPDGVVNIVHGAHRTVDFLIDSPDIKALSFVGGNKAGEYIFARGSANGKRVQANLGAKNHAAVLPDCNKNHFLNSVVGAAFGAAGQRCMALSTLVMVGETKEWLPELAEMAKKLQVNGGFEEGADLGPVISPQSKERIESLIASAEEEGATILLDGRGFKPEKYPNGNWVAPTIITNVTTDMKCYKEEIFGPVLVCLNVDTLDEAVELINKNEYGNGTAIFTRSGPTAETFRRNIEAGQVGINVPIPVPLPMFSFTGNKKSVAGGGANTFYGRPGIAFYTQQKTVTAMWSSADAISQKADVSMPTHS

SEQ ID NO: 8376 - DNA, 2306 bp, Muscodor strobelii
  misc_feature: SGI EST ID NO. CUFF.20411.0
  misc_feature: Variant of the nucleotide sequence at SEQ ID NO 8374
gccacttgctgtcaccaacagcgctgagtcttcagctcacctgaccacctggatctgcctgctctgctttactgtttgagctcccttttgtcccttagaaatccattggaggacctggttgactgatcaaccaaggatttcggggactcgtcatctttttgtctttcattccgtggaaactcaggtatttcgcgccttgttcattacccaaccccccttacgcattcccggaccatgcaccggctcgctcgaacgagaggccttgccaccggagctagccgcagctcgagccgtctctactcctcaacttcctcccgagccacctcaattctctcaatcgcacccagaatggcctcaagggccactgccacgaggcgcttggccgccaccgcacagcaactccggccgttgacggcgctggcttccaccgcgaccagctatcccaacacccacgagcgcatctccaagcccgaggacaccccttacttcatcgataaccagttcgtcgccagcaagaccgacaagttcatcgatctccatgatcccgccaccaacaacctcgtcacacgcgtcccccagatgagcgatgcagagctcgaggccgtcgtcgcgagcgccaagaaggccttcccggcctggcgcaacaccagcgtcctcgcccgccagcagatcatgttcaaattcgtgaatctggtccgcgagaactgggatcgcctggccgccagcatcaccctcgagcagggtaagactttccccgacgccaagggcgatgtcttgcgaggtcttcaggtcgccgaggccgcctgtggtgctcccgagctgctcaagggtgagctgctcgaggtcgccaaggatatggagacgaggtcatacaaggagccattgggtgtcgttgccgccatctgccccttcaacttccctgccatgattcccctctggtccatccccattgctaccgtcaccggcaataccctcattatcaagccctcggagcgagacccgggtgccgctatgatcctcgtcgagctcgccaagaaggccggtttccccgatggtgttgtcaacatcgtgcacggcgcccaccgcaccgtcgatttcctgattgactctccagatatcaaggccctcagctttgttggtggcaataaggcaggtgaatacatcttcgccagaggatctgccaacggaaagcgagtccaggccaatctcggcgccaagaaccacgctgctgtcctacccgactgcaacaagaaccacttcctcaactctgttgtaggtgctgctttcggtgctgccggtcagcggtgcatggctttgagcacgcttgtcatggtcggcgagaccaaggagtggctgcccgagttggccgagatggccaagaagctccaggtgaacggaggtttcgaagagggtgccgatctcggaccggtcatttcaccccagtctaaggaaagaatcgagtctttgattgccagcgctgaagaggagggtgctacgatcttgctcgatggccgtggctttaagcccgagaaataccccaacggaaactgggttgcgcctactatcatcaccaatgtgacgacggacatgaagtgctacaaggaggagatcttcggccctgtcctcgtctgtctcaacgtcgacacgctcgatgaggctgtcgagctgatcaacaagaacgagtacggaaacggcacagcgatcttcacaaggtcaggccctacggcggagaccttcaggaggaatatcgaggccggacaagttggtatcaacgtcccgattcctgtaccgctgcccatgttctcgttcactggtaacaagaagagtgttgcgggtggtggcgccaacactttctatggacgaccgggtattgcattctatacgcagcagaagactgttactgctatgtggtcttcggcggatgcgattagccagaaggctgatgtttctatgcctacgcatagttagggggagagatagatgcaaataaattgtatataagcaagctaagaaagaaagcattgagcattgagactgttttcctgcaatatcatgatgtctggcggcttggttatacctagaacgttgctgtgagctgtgtgatgattggttgcaggttgggtgtgtccaccctatgcagtggtggcagcacttttgatggagaattgttggcaagctttcgcttccagagcctgtagaatctgatactgtggcttcaagttcgtaactgcatccagggaggccattctctatcacgccatggttacgtttgagctacaagtgcatcaaggaactctaattgcaaa

SEQ ID NO: 8377 - DNA, 1434 bp, Muscodor strobelii
  misc_feature: SGI cDNA ID NO. 562575
  misc_feature: Encodes the peptide sequence at SEQ ID NO 8378
atgtcgctcgatcctcccccctacttagggtcgctacagaacaacatccgccagcggcctatcccctgggatggtgctgcacgtgcaggaacgatcacagaggagcaactcgccaagatcagagccgttgacaaagtgcggaaagagcagaggaagcaaatcgtcgaagctgatcttgacggctaccgcgccctcttcctcggtgagccaggtactccgggcgtcctcgagtccgccagccaacgctccgatgtcatacaatacatcctagttttactagcagatatccttcaaggcgtgccgacgcttgccaaagccctataccaaaacccagatccctaccaacatttcctgcctctacttgcgcattccaacaaccctgaagatcccatccctctcctcacatctaccgtcctggcagcactcatgtctaatgcgcgcgacgagtcggccgccaccgaacgagctctgcccctgatcctgagctatctttgtggccttgccaagaattccaacgatgcgggcctgcaagacattgccgtgatggaatactcggccttgctgtatggccagtccaaccgtcagcccttctggaaacagcggagcgagactgttgcacctctgatcgagatcctgcaaaaggccgccggcgtcggtggagaatcatccgctagcctgtggagtggcaacgcgcctgctcggactggtggcttcgaaggcttgagtggtggtgttggactacaacttctctatcatgttttgctcgtgctgtggcagctcagcttcgaagctgaagatattggcgatgacctgaatgacgaatacgacattattcttctgtacactcagcttctacgattatccccgaaggagaagacgacacggcttctgctttctacgctacataatctcctggacgacaatcaaacaacattattgccagtggccgtgctcgcccggctgccctccgtgctccagaatgtgggcgggcggcacatgacagaccccgatctacaggaggacctcgacaagctcaaggagatgctggaagagtaccagaaaaccaagacgaccttcgatgagtacgtggtcgaggtacagtctggacatttgcgatggtcaccgcctcaccgacaccaaaccttttggactgaaaatgcgcgtaagattctggagcatgagaacggggagatcccaagaaagctggcagacattatgaaaaagccttgggagaacgacaaggcggtgctggcgatcgcctgcaatgacgtgggttgcctggtcaaggaggtgccggagaagcgataccaactagagaagctgggcctcaagacgcgcatcatggagctcatgcaagatggagatgagaacgtgcgatgggagagcttacgggctctcggcggctggttgaagtacagctttgaagacaactga

SEQ ID NO: 8378 - protein, 477 aa, Muscodor strobelii
  misc_feature: SGI Peptide ID NO. 562575
  misc_feature (2)..(436): Pfam Id: PF03224 Pfam Desc: V-ATPase subunit H
  misc_feature (241)..(436): Pfam Id: PF03224 Pfam Desc: V-ATPase subunit H
  misc_feature (1)..(475): NCBI GI: 46108540 Blast Desc: FG01152.1 [Gibberella zeae PH-1]
  misc_feature (1)..(475): NCBI GI: 261355888 Blast Desc: vacuolar ATP synthase subunit H [Verticillium albo-atrum VaMs.102]
  misc_feature (1)..(475): NCBI GI: 85116837 Blast Desc: NCU02746 [Neurospora crassa OR74A] gi|28926934|gb|EAA35895.1| conserved [Neurospora crassa OR74A]
  misc_feature (1)..(475): NCBI GI: 171680217 Blast Desc: protein product [Podospora anserina] gi|170939735|emb|CAP64961.1| protein product [Podospora anserina]
  misc_feature (1)..(475): NCBI GI: 156053181 Blast Desc: SS1G_06758 [Sclerotinia sclerotiorum 1980] gi|154704536|gb|EDO04275.1| SS1G_06758 [Sclerotinia sclerotiorum 1980]
  misc_feature (1)..(475): NCBI GI: 242768079 Blast Desc: Vacuolar ATP synthase subunit H, [Talaromyces stipitatus ATCC 10500] gi|218724694|gb|EED24111.1| Vacuolar ATP synthase subunit H, [Talaromyces stipitatus ATCC 10500]
  misc_feature (1)..(475): NCBI GI: 261187780 Blast Desc: vacuolar ATP synthase subunit H [Ajellomyces dermatitidis SLH14081] gi|239593521|gb|EEQ76102.1| vacuolar ATP synthase subunit H [Ajellomyces dermatitidis SLH14081]
  misc_feature (1)..(475): NCBI GI: 239613324 Blast Desc: vacuolar ATP synthase subunit H [Ajellomyces dermatitidis ER-3]
  misc_feature (2)..(475): NCBI GI: 189188862 Blast Desc: vacuolar ATP synthase subunit H [Pyrenophora tritici-repentis Pt-1C-BFP] gi|187972376|gb|EDU39875.1| vacuolar ATP synthase subunit H [Pyrenophora tritici-repentis Pt-1C-BFP]
  misc_feature (2)..(475): NCBI GI: 119495849 Blast Desc: Vacuolar ATP synthase subunit H, [Neosartorya fischeri NRRL 181] gi|119412863|gb|EAW22804.1| Vacuolar ATP synthase subunit H, [Neosartorya fischeri NRRL 181]
MSLDPPPYLGSLQNNIRQRPIPWDGAARAGTITEEQLAKIRAVDKVRKEQRKQIVEADLDGYRALFLGEPGTPGVLESASQRSDVIQYILVLLADILQGVPTLAKALYQNPDPYQHFLPLLAHSNNPEDPIPLLTSTVLAALMSNARDESAATERALPLILSYLCGLAKNSNDAGLQDIAVMEYSALLYGQSNRQPFWKQRSETVAPLIEILQKAAGVGGESSASLWSGNAPARTGGFEGLSGGVGLQLLYHVLLVLWQLSFEAEDIGDDLNDEYDIILLYTQLLRLSPKEKTTRLLLSTLHNLLDDNQTTLLPVAVLARLPSVLQNVGGRHMTDPDLQEDLDKLKEMLEEYQKTKTTFDEYVVEVQSGHLRWSPPHRHQTFWTENARKILEHENGEIPRKLADIMKKPWENDKAVLAIACNDVGCLVKEVPEKRYQLEKLGLKTRIMELMQDGDENVRWESLRALGGWLKYSFEDN

SEQ ID NO: 8379 - DNA, 2052 bp, Muscodor strobelii
  misc_feature: SGI EST ID NO. CUFF.20415.0
  misc_feature: Variant of the nucleotide sequence at SEQ ID NO 8377
ttggtctaatgctgcatctctcccacctgatcgggagcccatgtcataaacgccgcagcaacggatcgtcttgtatacctatacttatctcatctatacctaggctaaaggacggaaactagagcgtattacgacggtctgttgaccacatccgctgcgggctaaggcagacacattgcgccggtcatctcgacggctacctttcccctcagctcgacaacttcaccacttcaccatgtcgctcgatcctcccccctacttagggtcgctacagaacaacatccgccagcggcctatcccctgggatggtgctgcacgtgcaggaacgatcacagaggagcaactcgccaagatcagagccgttgacaaagtgcggaaagagcagaggaagcaaatcgtcgaagctgatcttgacggctaccgcgccctcttcctcggtgagccaggtactccgggcgtcctcgagtccgccagccaacgctccgatgtcatacaatacatcctagttttactagcagatatccttcaaggcgtgccgacgcttgccaaagccctataccaaaacccagatccctaccaacatttcctgcctctacttgcgcattccaacaaccctgaagatcccatccctctcctcacatctaccgtcctggcagcactcatgtctaatgcgcgcgacgagtcggccgccaccgaacgagctctgcccctgatcctgagctatctttgtggccttgccaagaattccaacgatgcgggcctgcaagacattgccgtgatggaatactcggccttgctgtatggccagtccaaccgtcagcccttctggaaacagcggagcgagactgttgcacctctgatcgagatcctgcaaaaggccgccggcgtcggtggagaatcatccgctagcctgtggagtggcaacgcgcctgctcggactggtggcttcgaaggcttgagtggtggtgttggactacaacttctctatcatgttttgctcgtgctgtggcagctcagcttcgaagctgaagatattggcgatgacctgaatgacgaatacgacattattcttctgtacactcagcttctacgattatccccgaaggagaagacgacacggcttctgctttctacgctacataatctcctggacgacaatcaaacaacattattgccagtggccgtgctcgcccggctgccctccgtgctccagaatgtgggcgggcggcacatgacagaccccgatctacaggaggacctcgacaagctcaaggagatgctggaagagtaccagaaaaccaagacgaccttcgatgagtacgtggtcgaggtacagtctggacatttgcgatggtcaccgcctcaccgacaccaaaccttttggactgaaaatgcgcgtaagattctggagcatgagaacggggagatcccaagaaagctggcagacattatgaaaaagccttgggagaacgacaaggcggtgctggcgatcgcctgcaatgacgtgggttgcctggtcaaggaggtgccggagaagcgataccaactagagaagctgggcctcaagacgcgcatcatggagctcatgcaagatggagatgagaacgtgcgatgggagagcttacgggctctcggcggctggttgaagtacagctttgaagacaactgatgttcgtctagtagcgcgctcgcccatcctaatatttgacattgtttcatatcgatatagcatgtcaagcaatagatcttcgaaggctacacggcggaataagagcttggtggaagcacgctttatgccgcggagatacgatactgctaagcttgcatacctacatccgattcagatcagtagtagactaaagccataacttgaattccacagttccaacaaagtcgaataccagtcaggtctactggaaatacaaagcaatagactgaagaaagacacgtcaggaggtcagcagcgcgattagactgcaggttatcttacaaaatttgagcctgaggtgctgtggtgaatagtacgtaattaatgataatagtaaggtgagg

SEQ ID NO: 8380 - DNA, 537 bp, Muscodor strobelii
  misc_feature: SGI cDNA ID NO. 562576
  misc_feature: Encodes the peptide sequence at SEQ ID NO 8381
atgaccacattcgctatctttgcgccgcgtcagtcaggtgacacctggttttgtgcgggccttgcgtcaactttcccagatatcaccgagcctgtcatcgagggtctttgcgaagctcagccttgcggagacgacagacttactcctggttgtaaagtatttacggtgccttcgggagatggatcgaaagcatcgcagattgagtgcgatgacatgacttcacacaatggcgacgcacttcaggaccaggtgctgatcttcaagtataagggcaaattccatgctgtcgataataaatgtccgcattcttcatatccgcttgccaaaggcacaccattcgatatcgaggatttcggcgtggtactatcagcaggcattacgtgtccaaagcacgggtggtcgtttgacctcttcacgggtcgagctgatcgttcgagttacatgctgcgtatttgggaagtgcaattacgaccttcgacggataaggcagaagaaagtgaagaggtctggataagaaaaaagcaacgcaaaggatag

SEQ ID NO: 8381 - protein, 178 aa, Muscodor strobelii
  misc_feature: SGI Peptide ID NO. 562576
  misc_feature (59)..(159): Pfam Id: PF00355 Pfam Desc: Rieske [2Fe-2S] domain
  misc_feature (81)..(141): Pfam Id: PF00355 Pfam Desc: Rieske [2Fe-2S] domain
  misc_feature (5)..(178): NCBI GI: 156039826 Blast Desc: SS1G_12049 [Sclerotinia sclerotiorum 1980] gi|154696106|gb|EDN95844.1| SS1G_12049 [Sclerotinia sclerotiorum 1980]
  misc_feature (1)..(178): NCBI GI: 154295942 Blast Desc: BC1G_13124 [Botryotinia fuckeliana B05.10] gi|150843776|gb|EDN18969.1| BC1G_13124 [Botryotinia fuckeliana B05.10]
  misc_feature (7)..(178): NCBI GI: 39955568 Blast Desc: MGG_09017 [Magnaporthe grisea 70-15] gi|149209379|ref|XP_001522064.1| MGCH7_ch7g181 [Magnaporthe grisea 70-15] gi|86196136|gb|EAQ70774.1| MGCH7_ch7g181 grisea
  misc_feature (11)..(178): NCBI GI: 169605991 Blast Desc: SNOG_06027 [Phaeosphaeria nodorum SN15] gi|111065971|gb|EAT87091.1| SNOG_06027 [Phaeosphaeria nodorum SN15]
  misc_feature (1)..(178): NCBI GI: 261359046 Blast Desc: rieske domain-containing protein [Verticillium albo-atrum VaMs.102]
  misc_feature (1)..(178): NCBI GI: 256727937 Blast Desc: NECHADRAFT_46298 [Nectria haematococca mpVI 77-13-4]
  misc_feature (7)..(177): NCBI GI: 115399256 Blast Desc: conserved [Aspergillus terreus NIH2624] gi|114192100|gb|EAU33800.1| conserved [Aspergillus terreus NIH2624]
  misc_feature (5)..(178): NCBI GI: 212544418 Blast Desc: conserved [Penicillium marneffei ATCC 18224] gi|210065332|gb|EEA19426.1| conserved [Penicillium marneffei ATCC 18224]
  misc_feature (1)..(178): NCBI GI: 67525677 Blast Desc: AN3296.2 [Aspergillus nidulans FGSC A4] gi|40744084|gb|EAA63264.1| AN3296.2 [Aspergillus nidulans FGSC A4] gi|259485736|tpe|CBF83009.1| TPA: conserved [Aspergillus FGSC
  misc_feature (16)..(170): NCBI GI: 255930703 Blast Desc: Pc12g00020 [Penicillium chrysogenum Wisconsin 54-1255] gi|211581527|emb|CAP79629.1| Pc12g00020 [Penicillium chrysogenum Wisconsin 54-1255]
MTTFAIFAPRQSGDTWFCAGLASTFPDITEPVIEGLCEAQPCGDDRLTPGCKVFTVPSGDGSKASQIECDDMTSHNGDALQDQVLIFKYKGKFHAVDNKCPHSSYPLAKGTPFDIEDFGVVLSAGITCPKHGWSFDLFTGRADRSSYMLRIWEVQLRPSTDKAEESEEVWIRKKQRKG

SEQ ID NO: 8382 - DNA, 2490 bp, Muscodor strobelii
  misc_feature: SGI EST ID NO. CUFF.20377.0
  misc_feature: Variant of the nucleotide sequence at SEQ ID NO 8380
tttccattttcaaatttacaacctactggtattggagagttccacctctcttatcttaggtagtagatcttcacgtagtctcacaacttcacggcctgcgctcctttattctcctcagctactctattgatatcctgactagatgctccttacaaatgcaaccatcacgatactcgtataacagtgccatgcagaaagatgaccacattcgctatctttgcgccgcgtcagtcaggtgacacctggttttgtgcgggccttgcgtcaactttcccagatatcaccgagcctgtcatcgagggtctttgcgaagctcagccttgcggagacgacagacttactcctggttgtaaagtatttacggtgccttcgggagatggatcgaaagcatcgcagattgagtgcgatgacatgacttcacacaatggcgacgcacttcaggaccaggtgctgatcttcaagtataagggcaaattccatgctgtcgataataaatgtccgcattcttcatatccgcttgccaaaggcacaccattcgatatcgaggatttcggcgtggtactatcagcaggcattacgtgtccaaagcacgggtggtcgtttgacctcttcacgggtcgagctgatcgttcgagttacatgctgcgtatttgggaagtgcaattacgaccttcgacggataaggcagaagaaagtgaagaggtctggataagaaaaaagcaacgcaaaggatagagctctgatcgatagcaagaaaagatttgacaccgatatcaggatgctcagagccacaatcataatattgatgtcaatcatggagtccttgaatctgccacaactccaatccttaatcctcaaaacgaagatgtacgcatctcatccgttatcaggcagccaacgtgatcacagtcttccacaaaaaaaaagaacttcgacatgaccagtgccccccacatacgacgaaaaaggagtatacgattgtttgttccctgttcttccagtctcatcgcatgtccgctgtctcaaacgcagtgagaatagacgagattccggcgtctttggtctcacatgtgctgtctgttgggacgaacatgggtcaacgtaagcagtcgagaggaacgaagctccatctgcaggattgcgggatcaacttggcgatttccaaaacttttcatagggcattggcaacaccaatgacgtcgtatgcgtttagctatacctaagattcttagaaaagcgacggtataaagcaaggttggtggattcaaagcaacagtcacgatgcaacacaccactagtcgaccagagaacggtgaagacgatcttacgatactttgacggccggcagttccggctaccggtgcccgttcctgtatcgccaatctcctgattccacgcgtgataggcttcacggcacttcgcctaacggtcagctgtggcttgaagctattgactctttgcagtccatatgtcaggggtcaattagacgtgcgtcgttcgcgcgcttcggtgggaggagatcgtcagcggcgtcgctgttggctctcgcttagcttttttggtacaactcctccatattgctggccgagaaggtgagtcgacgatcctgactcgcgtcgcatcgaccaatgatattgagacagaagctatttcgaggcgttgaaaaagaggaacggacctgattgactcccggttctgttcagctgtgtccccataccttgcagagacctgcagccgggataggtcaggtttaagacccatatgcacggttaattaggaagatgcaacaacgccattctatgccgggtatcaattgtccgcaactgacaacagcacgcggatggccccgttgccgacgacgtcgcgtgtcgtgcgcttcgcttccatcggttcccgcacagatatcatggcatcgaagctatgctaaatacgacgtgcttctccacgaagcgacgtagtatcatcgatgacttgcgtctgataaagaaatttcgatcgttcactggatcttcccaggttactgcgtacgcggcgtacagacagataagtgtaaacgagtatacgaagctgcatagtccttctctcgcttagctctcttccccagaggcgtcaaatcccagagccaaaccgtcggttagaactttctttcttggacattcgtccatatcggagatattttcggtgatagatcaagtgctctgagatcgatcatcgatagcattccctcacttggaagagacagcggtagcttagactccgtcttgtatcgaagaaatatatgaggcttgggagtgtgtaacggccactagcttatcaagaggaactcaacgaaggacaaacttcttcaagctattattaacctgatgttctgttttggtatccagctcgtttagaacccttcgattgactatattctgcaagatcgcttgcaggatcctctattaactagtctcttcagccaggcagtcatctgatagtgctggattttct

SEQ ID NO: 8383 - DNA, 1695 bp, Muscodor strobelii
  misc_feature: SGI cDNA ID NO. 562577
  misc_feature: Encodes the peptide sequence at SEQ ID NO 8384
atgattttgatatcaatacagattactatgcaacaagcccgcgatggtgtcactcgggaatatttctttgaaatatctgaatttgataattggacggggcccgatggccaggtgaaagaagaagtaatgctaataaatggacaattccccggtcctgtcatctatgccgattggggagatacgattgtcgtccacgtaacgaacagtctcacgaccaacggcacttcgattcactggcatggcattcgtcaatatcaaactaatctccaagacggagcgaacggggcaactgagtgtccgcttgcaccaggcgaaagcaaaacttacaccttcaaggccacacaatatgggtcatcatggtttcattcacatttcacggctcagtatggtgacggcgttgtcggatctatgctcatcaacggaccatcgactgcaaattacgacgttgatctgggtgttttcccaattacggactactactatttcaccgaggcacaaggtgtccagatggctatgacgaatgggattccaccatctagcgataatgtcctgttcaacggcaccaacatcaatccctcggacccctccaagggcgagtatgcggttgtgaaattgacttccggtctaaagcaccgacttcgactcatcaacccgtcgctcgagcacaattatcaggtctctctagttggtcatcaatttcaagtcatacagacggatttcgtgcctatagtgccgaagactgtcagctcaatattcttaggtgtcggccagcgatacggtgagccatttatccccctagatgtcatcatcgacgcaacagcagaccccgataactattggtttaatgtgactctatccgcaactggtctttgcggcacatccaacaatccgaaaccagcagcgatattccgttacgatgaagctgatgatagtcttccgacaactcccggcacggcaccagcagacacgttctgtagtgatagcaatgcatgggtgccatacctggcgcaagacgtctcatccagcctcacacctgcagtcgcggtcaaggacaacttacccgtcaatctactaatcccaccactgtcgaataccgtgacttggtatgtaaatacgagtgcgatcaaagtgtcctgggatcatcctgtactggactacgtgttgaatggaaccacgccaccaaggagcaacaatgttgtcgtggtggacgaagctgatgcttggtcatattgggttgtgcaaaacctgtcaccaataccacacccaatgcatctgcatggccatgacttcttcgttttaggtcgttcagatccgttgcatgtcccactgtctcttgccgatctgctgggtctgcttactactaccggcttgggcgcactcactaacgtctttgaccctctaaccgacctaggcacgctcgacttcagcaacccagtccgtcgagacgtgaccatgttacccgcgttaggatacgttgttctcgcgttcaaaacagacaatccaggaaactggctatttcactgtcatatcgcatggcacgtttccggcgggttgggaattgactttgttgagcagcctgatgtacaagcaagcctgctcgccgacggcgacttgcaagcataccacgatgtttgcgatagctggcgggcgtggtaccctactagtccttttaaacaggatgattcgggactttga

SEQ ID NO: 8384 - protein, 564 aa, Muscodor strobelii
  misc_feature: SGI Peptide ID NO. 562577
  misc_feature (150)..(308): Pfam Id: PF00394 Pfam Desc: Multicopper oxidase
  misc_feature (376)..(528): Pfam Id: PF07731 Pfam Desc: Multicopper oxidase
  misc_feature (25)..(144): Pfam Id: PF07732 Pfam Desc: Multicopper oxidase
  misc_feature (34)..(144): Pfam Id: PF07732 Pfam Desc: Multicopper oxidase
  misc_feature (16)..(564): NCBI GI: 74691506 Blast Desc: LAC1_MELAO RecName: Full=Laccase-1; AltName: Full=Benzenediol:oxygen oxidoreductase 1; AltName: Full=Urishiol oxidase 1; AltName: Full=Diphenol oxidase 1; AltName: Flags:
  misc_feature (16)..(564): NCBI GI: 22218673 Blast Desc: LAC1_MELAO RecName: Full=Laccase-1; AltName: Full=Benzenediol:oxygen oxidoreductase 1; AltName: Full=Urishiol oxidase 1; AltName: Full=Diphenol oxidase 1; AltName: Flags:
  misc_feature (16)..(564): NCBI GI: 170784985 Blast Desc: LAC1_MELAO RecName: Full=Laccase-1; AltName: Full=Benzenediol:oxygen oxidoreductase 1; AltName: Full=Urishiol oxidase 1; AltName: Full=Diphenol oxidase 1; AltName: Flags:
  misc_feature (16)..(563): NCBI GI: 251836877 Blast Desc: LAC1_MELAO RecName: Full=Laccase-1; AltName: Full=Benzenediol:oxygen oxidoreductase 1; AltName: Full=Urishiol oxidase 1; AltName: Full=Diphenol oxidase 1; AltName: Flags:
  misc_feature (16)..(564): NCBI GI: 85082547 Blast Desc: laccase precursor [Neurospora crassa OR74A] gi|118572665|sp|P06811.3|LAC1_NEUCR RecName: Full=Laccase; AltName: Full=Benzenediol:oxygen oxidoreductase; AltName: Flags:
  misc_feature (16)..(564): NCBI GI: 116205994 Blast Desc: laccase [Chaetomium globosum CBS 148.51] gi|88182887|gb|EAQ90355.1| laccase [Chaetomium globosum CBS 148.51]
  misc_feature (16)..(564): NCBI GI: 19171198 Blast Desc: laccase [Gaeumannomyces graminis var. tritici]
  misc_feature (16)..(564): NCBI GI: 2833199 Blast Desc: LAC1_CRYPA RecName: Full=Laccase; AltName: Full=Benzenediol:oxygen oxidoreductase; AltName: Full=Urishiol oxidase; AltName: Full=Diphenol oxidase; Flags: Precursor laccase
  misc_feature (16)..(564): NCBI GI: 168828 Blast Desc: laccase [Neurospora crassa]
  misc_feature (16)..(564): NCBI GI: 168826 Blast Desc: laccase [Neurospora crassa]
  misc_feature (16)..(564): SWISSPROT Homolog: EC 1.10.3.2 Laccase
MILISIQITMQQARDGVTREYFFEISEFDNWTGPDGQVKEEVMLINGQFPGPVIYADWGDTIVVHVTNSLTTNGTSIHWHGIRQYQTNLQDGANGATECPLAPGESKTYTFKATQYGSSWFHSHFTAQYGDGVVGSMLINGPSTANYDVDLGVFPITDYYYFTEAQGVQMAMTNGIPPSSDNVLFNGTNINPSDPSKGEYAVVKLTSGLKHRLRLINPSLEHNYQVSLVGHQFQVIQTDFVPIVPKTVSSIFLGVGQRYGEPFIPLDVIIDATADPDNYWFNVTLSATGLCGTSNNPKPAAIFRYDEADDSLPTTPGTAPADTFCSDSNAWVPYLAQDVSSSLTPAVAVKDNLPVNLLIPPLSNTVTWYVNTSAIKVSWDHPVLDYVLNGTTPPRSNNVVVVDEADAWSYWVVQNLSPIPHPMHLHGHDFFVLGRSDPLHVPLSLADLLGLLTTTGLGALTNVFDPLTDLGTLDFSNPVRRDVTMLPALGYVVLAFKTDNPGNWLFHCHIAWHVSGGLGIDFVEQPDVQASLLADGDLQAYHDVCDSWRAWYPTSPFKQDDSGL

SEQ ID NO: 8385 - DNA, 825 bp, Muscodor strobelii
  misc_feature: SGI EST ID NO. CUFF.20384.0
  misc_feature: Variant of the nucleotide sequence at SEQ ID NO 8383
tcacagtatgtcaatgcctcttatcatgaatattcgggagtttagatcatttgcaaccgcataacatgtcacaatgaactgaaacgtgttccttcacagcgatggtgtcactcgggaatatttctttgaaatatctgaatttgataattggacggggcccgatggccaggtgaaagaagaagtaatgctaataaatggacaattccccggtcctgtcatctatgccgattggggagatacgattgtcgtccacgtaacgaacagtctcacgaccaacggcacttcgattcactggcatggcattcgtcaatatcaaactaatctccaagacggagcgaacggggcaactgagtgtccgcttgcaccaggcgaaagcaaaacttacaccttcaaggccacacaatatgggtcatcatggtttcattcacatttcacggctcagtatggtgacggcgttgtcggatctatgctcatcaacggaccatcgactgcaaattacgacgttgatctgggtgttttcccaattacggactactactatttcaccgaggcacaaggtgtccagatggctatgacgaatgggattccaccatctagcgataatgtcctgttcaacggcaccaacatcaatccctcggacccctccaagggcgagtatgcggttgtgaaattgacttccggtctaaagcaccgacttcgactcatcaacccgtcgctcgagcacaattatcaggtctctctagttggtcatcaatttcaagtcatacagacggatttcgtgcctatagtgccgaagactgtcagctcaatattcttaggtgtcgg

SEQ ID NO: 8386 - DNA, 1572 bp, Muscodor strobelii
  misc_feature: SGI cDNA ID NO. 562578
  misc_feature: Encodes the peptide sequence at SEQ ID NO 8387
atgattttgatatcaatacagattactatgcaacaagcccgcgatggtgtcactcgggaatatttctttgaaatatctgaatttgataattggacggggcccgatggccaggtgaaagaagaagtaatgctaataaatggacaattccccggtcctgtcatctatgccgattggggagatacgattgtcgtccacgtaacgaacagtctcacgaccaacggcacttcgattcactggcatggcattcgtcaatatcaaactaatctccaagacggagcgaacggggcaactgagtgtccgcttgcaccaggcgaaagcaaaacttacaccttcaaggccacacaatatgggtcatcatggtttcattcacatttcacggctcagtatggtgacggcgttgtcggatctatgctcatcaacggaccatcgactgcaaattacgacgttgatctgggtgttttcccaattacggactactactatttcaccgaggcacaaggtgtccagatggctatgacgaatgggattccaccatctagcgataatgtcctgttcaacggcaccaacatcaatccctcggacccctccaagggcgagtatgcggttgtgaaattgacttccggtctaaagcaccgacttcgactcatcaacccgtcgctcgagcacaattatcaggatgtcatcatcgacgcaacagcagaccccgataactattggtttaatgtgactctatccgcaactggtctttgcggcacatccaacaatccgaaaccagcagcgatattccgttacgatgaagctgatgatagtcttccgacaactcccggcacggcaccagcagacacgttctgtagtgatagcaatgcatgggtgccatacctggcgcaagacgtctcatccagcctcacacctgcagtcgcggtcaaggacaacttacccgtcaatctactaatcccaccactgtcgaataccgtgacttggtatgtaaatacgagtgcgatcaaagtgtcctgggatcatcctgtactggactacgtgttgaatggaaccacgccaccaaggagcaacaatgttgtcgtggtggacgaagctgatgcttggtcatattgggttgtgcaaaacctgtcaccaataccacacccaatgcatctgcatggccatgacttcttcgttttaggtcgttcagatccgttgcatgtcccactgtctcttgccgatctgctgggtctgcttactactaccggcttgggcgcactcactaacgtctttgaccctctaaccgacctaggcacgctcgacttcagcaacccagtccgtcgagacgtgaccatgttacccgcgttaggatacgttgttctcgcgttcaaaacagacaatccaggaaactggctatttcactgtcatatcgcatggcacgtttccggcgggttgggaattgactttgttgagcagcctgatgtacaagcaagcctgctcgccgacggcgacttgcaagcataccacgatgtttgcgatagctggcgggcgtggtaccctactagtccttttaaacaggatgattcgggactttga

SEQ ID NO: 8387 - protein, 523 aa, Muscodor strobelii
  misc_feature: SGI Peptide ID NO. 562578
  misc_feature (150)..(267): Pfam Id: PF00394 Pfam Desc: Multicopper oxidase
  misc_feature (335)..(487): Pfam Id: PF07731 Pfam Desc: Multicopper oxidase
  misc_feature (25)..(144): Pfam Id: PF07732 Pfam Desc: Multicopper oxidase
  misc_feature (150)..(225): Pfam Id: PF00394 Pfam Desc: Multicopper oxidase
  misc_feature (226)..(267): Pfam Id: PF00394 Pfam Desc: Multicopper oxidase
  misc_feature (34)..(144): Pfam Id: PF07732 Pfam Desc: Multicopper oxidase
  misc_feature (16)..(523): NCBI GI: 74691506 Blast Desc: LAC1_MELAO RecName: Full=Laccase-1; AltName: Full=Benzenediol:oxygen oxidoreductase 1; AltName: Full=Urishiol oxidase 1; AltName: Full=Diphenol oxidase 1; AltName: Flags:
  misc_feature (16)..(523): NCBI GI: 22218673 Blast Desc: LAC1_MELAO RecName: Full=Laccase-1; AltName: Full=Benzenediol:oxygen oxidoreductase 1; AltName: Full=Urishiol oxidase 1; AltName: Full=Diphenol oxidase 1; AltName: Flags:
  misc_feature (16)..(523): NCBI GI: 170784985 Blast Desc: LAC1_MELAO RecName: Full=Laccase-1; AltName: Full=Benzenediol:oxygen oxidoreductase 1; AltName: Full=Urishiol oxidase 1; AltName: Full=Diphenol oxidase 1; AltName: Flags:
  misc_feature (16)..(522): NCBI GI: 251836877 Blast Desc: LAC1_MELAO RecName: Full=Laccase-1; AltName: Full=Benzenediol:oxygen oxidoreductase 1; AltName: Full=Urishiol oxidase 1; AltName: Full=Diphenol oxidase 1; AltName: Flags:
  misc_feature (16)..(523): NCBI GI: 116205994 Blast Desc: laccase [Chaetomium globosum CBS 148.51] gi|88182887|gb|EAQ90355.1| laccase [Chaetomium globosum CBS 148.51]
  misc_feature (16)..(523): NCBI GI: 85082547 Blast Desc: laccase precursor [Neurospora crassa OR74A] gi|118572665|sp|P06811.3|LAC1_NEUCR RecName: Full=Laccase; AltName: Full=Benzenediol:oxygen oxidoreductase; AltName: Flags:
  misc_feature (16)..(523): NCBI GI: 168828 Blast Desc: laccase [Neurospora crassa]
  misc_feature (16)..(523): NCBI GI: 168826 Blast Desc: laccase [Neurospora crassa]
  misc_feature (16)..(523): NCBI GI: 2833199 Blast Desc: LAC1_CRYPA RecName: Full=Laccase; AltName: Full=Benzenediol:oxygen oxidoreductase; AltName: Full=Urishiol oxidase; AltName: Full=Diphenol oxidase; Flags: Precursor laccase
  misc_feature (16)..(523): NCBI GI: 171678535 Blast Desc: protein product [Podospora anserina] gi|2829670|sp|P78722.1|LAC2_PODAN RecName: Full=Laccase-2; AltName: Full=Laccase II; AltName: Full=Benzenediol:oxygen 2; 2;
  misc_feature (16)..(523): SWISSPROT Homolog: EC 1.10.3.2 Laccase
MILISIQITMQQARDGVTREYFFEISEFDNWTGPDGQVKEEVMLINGQFPGPVIYADWGDTIVVHVTNSLTTNGTSIHWHGIRQYQTNLQDGANGATECPLAPGESKTYTFKATQYGSSWFHSHFTAQYGDGVVGSMLINGPSTANYDVDLGVFPITDYYYFTEAQGVQMAMTNGIPPSSDNVLFNGTNINPSDPSKGEYAVVKLTSGLKHRLRLINPSLEHNYQDVIIDATADPDNYWFNVTLSATGLCGTSNNPKPAAIFRYDEADDSLPTTPGTAPADTFCSDSNAWVPYLAQDVSSSLTPAVAVKDNLPVNLLIPPLSNTVTWYVNTSAIKVSWDHPVLDYVLNGTTPPRSNNVVVVDEADAWSYWVVQNLSPIPHPMHLHGHDFFVLGRSDPLHVPLSLADLLGLLTTTGLGALTNVFDPLTDLGTLDFSNPVRRDVTMLPALGYVVLAFKTDNPGNWLFHCHIAWHVSGGLGIDFVEQPDVQASLLADGDLQAYHDVCDSWRAWYPTSPFKQDDSGL

SEQ ID NO: 8388 - DNA, 825 bp, Muscodor strobelii; identical to SEQ ID NO: 8385
  misc_feature: SGI EST ID NO. CUFF.20384.0
  misc_feature: Variant of the nucleotide sequence at SEQ ID NO 8386

SEQ ID NO: 8389 - DNA, 2073 bp, Muscodor strobelii
  misc_feature: SGI cDNA ID NO. 562579
  misc_feature: Elevated expression when VOC is produced
  misc_feature: Encodes the peptide sequence at SEQ ID NO 8390
atggattcactgtgggttccttcttctgatacttcttcatttgctaccagtcttgagggtgatttttatcgagcttcggcgacgctgacctggatgatcgtcagatcgatcacaagcgactgcaatgcactggataacaagatagccgcacttctgcagactctggctggatttgtccgcgatgtgcgagaagctcggtctgatgttgatgcagtatcgcgggaactgtattctttacagacggtcctagatctactgaaagaggatgcatgtttgtttccggctgaactagcggaacacacaccaagcatcatcgagcattgttcctacgtggcagacaagcttaatgcgttgttgtctgttatcaacagtacagagctaactcctcagaaaaagaggacaagatggctacaagcaggcagatccgaggcggcaggcttcagaacatctctggaggcgcacaaagccgttattgggtttgcgctcgaccttgtaggagcgaccactattcgagatctggcgtctagctcggacgcatcaaaaaggaatacattcgagaggcgggaaatcagctctgatatcgtgaccgatatctcaagaatactcattcaaatgggtcaagttcaagtgagactgccgtctgaattcgagataaaagaaggggtttttagcttgcaagagtatatgggccatcttaagtcatacgccgaacgtattattcgaaataaggaggccgaacatgaagccgaaacggagatccaacatgacccatccatcgctggaaaggagagccgcggtacttccgttggggacggccccgatagtgcaattgacgtagaaaccgaccctcattatcaatttacgatggaggaggtgcaaacccaaatgtacgaggaactcccagctactgtcgagatattcgatgaggtcgattttgttccgagccgaccaccaacaccgccaccaagaaacatcgagagactggaagcggcacgaaacagaatggtttcgccgttcgaagaagaaacagatccgccatcgatcccttacggcgtgaccactgaaatctcttcaagtcgcagatttgcgccatcgataagatccgttagaggcgggggatttggacgtttattttctcaccttaggaaccgttccgtctcagatatcagacctccgacacagtcgaccaactcctcagcaggaaatgccgcgggtgaagacaagctgggcccaataatgtcgaaacccccctcaaagccaccgagcatagtgcgacgaagcagtcgacgactctcggcctcgatctcgaagattccgtggcggggtatagagcatgtggaagagctcgaagaagcagggcagaccgtttccgaggccgttttcggtgtttctttgcaagctagtatgcgagtcgccaaaggaacatccaagacacatcacaatggtggcggcggctcatcccgccgggaatttcctctgtgtgtgcagaaatgctgtttctttttgaagaacgaggatgccgctaaagcacctgatatttttgcagcgccgggagatatgtttcgcgttgccaaaatgaaggaggtctttagcacgggtccatcatacggcgagcacattgattgggaacattatacagtctatgattgcgccgacttaataatgctttatctttcgcaattgcctaagccactgatccccgaatcgatcgcccggaaatggatctctctttctcgacaagcaacgctctctggttctcatgcgacgagactggaccagtgtattgacttctgggaagaggccctaggagggttacgcgggccaagtcgtagtcttttcaagctgctccttaatctttgggctgacgtggccgctgccgaagatcacaatgatatgacggcagaacggctcgccggcgtggtgctgaaacccctgatgcatgtgaatggcggaacatatcgaacggattacatgctttcgcttgccttcctcatccgaaaacgcacgcagtacactgaactaatgaacgacaaccggtccgccatcaatcgtatcgacagggcagcatggtga

SEQ ID NO: 8390 - protein, 690 aa, Muscodor strobelii
  misc_feature: SGI Peptide ID NO. 562579
  misc_feature (492)..(656): Pfam Id: PF00620 Pfam Desc: RhoGAP domain
  misc_feature (492)..(575): Pfam Id: PF00620 Pfam Desc: RhoGAP domain
  misc_feature (457)..(680): NCBI GI: 85119227 Blast Desc: NCU02915 [Neurospora crassa OR74A] gi|28927408|gb|EAA36361.1| [Neurospora crassa OR74A]
  misc_feature (425)..(678): NCBI GI: 171694504 Blast Desc: protein product [Podospora anserina] gi|170947494|emb|CAP59655.1| protein product [Podospora anserina]
  misc_feature (423)..(660): NCBI GI: 116182990 Blast Desc: CHGG_02123 [Chaetomium globosum CBS 148.51] gi|88186420|gb|EAQ93888.1| CHGG_02123 [Chaetomium globosum CBS 148.51]
  misc_feature (377)..(671): NCBI GI: 116197212 Blast Desc: CHGG_05204 [Chaetomium globosum CBS 148.51] gi|88181117|gb|EAQ88585.1| CHGG_05204 [Chaetomium globosum CBS 148.51]
  misc_feature (435)..(675): NCBI GI: 171676628 Blast Desc: protein product [Podospora anserina] gi|170936381|emb|CAP61038.1| protein product [Podospora anserina]
  misc_feature (452)..(671): NCBI GI: 85109190 Blast Desc: NCU07622 [Neurospora crassa OR74A] gi|28924432|gb|EAA33561.1| [Neurospora crassa OR74A]
  misc_feature (24)..(257): NCBI GI: 169616047 Blast Desc: SNOG_11195 [Phaeosphaeria nodorum SN15] gi|111060574|gb|EAT81694.1| SNOG_11195 [Phaeosphaeria nodorum SN15]
  misc_feature (36)..(237): NCBI GI: 46117310 Blast Desc: FG04497.1 [Gibberella zeae PH-1]
  misc_feature (37)..(335): NCBI GI: 171694504 Blast Desc: protein product [Podospora anserina] gi|170947494|emb|CAP59655.1| protein product [Podospora anserina]
  misc_feature (36)..(240): NCBI GI: 256724118 Blast Desc: NECHADRAFT_86363 [Nectria haematococca mpVI 77-13-4]
  misc_feature: Useful for introducing or modulating the production of volatile compounds
MDSLWVPSSDTSSFATSLEGDFYRASATLTWMIVRSITSDCNALDNKIAALLQTLAGFVRDVREARSDVDAVSRELYSLQTVLDLLKEDACLFPAELAEHTPSIIEHCSYVADKLNALLSVINSTELTPQKKRTRWLQAGRSEAAGFRTSLEAHKAVIGFALDLVGATTIRDLASSSDASKRNTFERREISSDIVTDISRILIQMGQVQVRLPSEFEIKEGVFSLQEYMGHLKSYAERIIRNKEAEHEAETEIQHDPSIAGKESRGTSVGDGPDSAIDVETDPHYQFTMEEVQTQMYEELPATVEIFDEVDFVPSRPPTPPPRNIERLEAARNRMVSPFEEETDPPSIPYGVTTEISSSRRFAPSIRSVRGGGFGRLFSHLRNRSVSDIRPPTQSTNSSAGNAAGEDKLGPIMSKPPSKPPSIVRRSSRRLSASISKIPWRGIEHVEELEEAGQTVSEAVFGVSLQASMRVAKGTSKTHHNGGGGSSRREFPLCVQKCCFFLKNEDAAKAPDIFAAPGDMFRVAKMKEVFSTGPSYGEHIDWEHYTVYDCADLIMLYLSQLPKPLIPESIARKWISLSRQATLSGSHATRLDQCIDFWEEALGGLRGPSRSLFKLLLNLWADVAAAEDHNDMTAERLAGVVLKPLMHVNGGTYRTDYMLSLAFLIRKRTQYTELMNDNRSAINRIDRAAW

SEQ ID NO: 8391 - DNA, 4102 bp, Muscodor strobelii
  misc_feature: SGI EST ID NO. CUFF.20399.0
  misc_feature: Variant of the nucleotide sequence at SEQ ID NO 8389
aatgaacaagatgaagaccagcacgccgcacagcacctgatgcgcgcttctcgcttgcgttcttgtcgctttccgcatttgggtaaaggcgaaagggattagcgcgaccgagtattgcagaccggcaattgtgagtcgtcagtgatgatgagataacgggattgggccgaattggaggttcagatattggacgctatttactgatcttgcttgacgggtgcaagatcgtctgaccgaggctccgggaagcaggctcgacaggtcaagatgcaaagggctctcgaggctctggaaaggagagcgggatctgcagtcttggtgttgagccacccacccttacctaagaactgaccgggccgttgtgtcctgcttagaatatgtccattggtcgcctacacaggaatgttcgctgcagtgctacacgatcgttcgaaatattgataatcggcatattccagcttgctgtggtcatccaaccaccgtggccgtagttcatctcatgtaagcttctgagtggcatttcgctctcccgtcgcaagactgacccatgtatggcctggtgccgtatgcatgcccatacacacactacatggagttgttgtgcagtccggtcgcgttgagaatgacctggtcctttgaagggactgacttgtctttttgcccagccgcctgtgcatatgcacagacgacgccaacttatctttggggtccaactagcctcacaacgttttcacccttgattttgacttgcaaactacagagaaaaggatcaagaaaacgctggaatgcgcatgaagataatcgtcctccgttcgatggcaacatgggtgcgcaacggaggcgagatagcaggatttatcgaggtgtcgaatgacctgatgcagaacagaacccggccccggaccccataagaaagccggccccctcgtctggacaagatgggaatgtgtggttgtacctcctaaagtagcacgccagggttgcaggccatgcaggagaggtccccgcatccaggtttgtcgatgtattcgccgccattgtaacaagcatttctatctgagcattattcttgctatgtatcctcccagccatgaatggaggaatgtcttattagtgtgtgtccgttcactatatctccccttgtcgctccttgcttcattaccaactttccaaacctgcccttgtaatgtcataggctgtgataagcacccgtattgctagctttcacataatcctgaattggggtcgtttcgtatcgtcctctgccaactcattaagtacaataaggtggccaaggtcccttgatataatttcctacgaagtgggcgacttcggtcagcaccatcaggatggattcactatcgatcacaagcgactgcaatgcactggataacaagatagccgcacttctgcagactctggctggatttgtccgcgatgtgcgagaagctcggtctgatgttgatgcagtatcgcgggaactgtattctttacagacggtcctagatctactgaaagaggatgcatgtttgtttccggctgaactagcggaacacacaccaagcatcatcgagcattgttcctacgtggcagacaagcttaatgcgttgttgtctgttatcaacagtacagagctaactcctcagaaaaagaggacaagatggctacaagcaggcagatccgaggcggcaggcttcagaacatctctggaggcgcacaaagccgttattgggtttgcgctcgaccttgtaggagcgaccactattcgagatctggcgtctagctcggacgcatcaaaaaggaatacattcgagaggcgggaaatcagctctgatatcgtgaccgatatctcaagaatactcattcaaatgggtcaagttcaagtgagactgccgtctgaattcgagataaaagaaggggtttttagcttgcaagagtatatgggccatcttaagtcatacgccgaacgtattattcgaaataaggaggccgaacatgaagccgaaacggagatccaacatgacccatccatcgctggaaaggagagccgcggtacttccgttggggacggccccgatagtgcaattgacgtagaaaccgaccctcattatcaatttacgatggaggaggtgcaaacccaaatgtacgaggaactcccagctactgtcgagatattcgatgaggtcgattttgttccgagccgaccaccaacaccgccaccaagaaacatcgagagactggaagcggcacgaaacagaatggtttcgccgttcgaagaagaaacagatccgccatcgatcccttacggcgtgaccactgaaatctcttcaagtcgcagatttgcgccatcgataagatccgttagaggcgggggatttggacgtttattttctcaccttaggaaccgttccgtctcagatatcagacctccgacacagtcgaccaactcctcagcaggaaatgccgcgggtgaagacaagctgggcccaataatgtcgaaacccccctcaaagccaccgagcatagtgcgacgaagcagtcgacgactctcggcctcgatctcgaagattccgtggcggggtatagagcatgtggaagagctcgaagaagcagggcagaccgtttccgaggccgttttcggtgtttctttgcaagctagtatgcgagtcgccaaaggaacatccaagacacatcacaatggtggcggcggctcatcccgccgggaatttcctctgtgtgtgcagaaatgctgtttctttttgaagaacgaggatgccgctaaagcacctgatatttttgcagcgccgggagatatgtttcgcgttgccaaaatgaaggaggtctttagcacgggtccatcatacggcgagcacattgattgggaacattatacagtctatgattgcgccgacttaataatgctttatctttcgcaattgcctaagccactgatccccgaatcgatcgcccggaaatggatctctctttctcgacaagcaacgctctctggttctcatgcgacgagactggaccagtgtattgacttctgggaagaggccctaggagggttacgcgggccaagtcgtagtcttttcaagctgctccttaatctttgggctgacgtggccgctgccgaagatcacaatgatatgacggcagaacggctcgccggcgtggtgctgaaacccctgatgcatgtgaatggcggaacatatcgaacggattacatgctttcgcttgccttcctcatccgaaaacgcacgcagtacactgaactaatgaacgacaaccggtccgccatcaatcgtatcgacagggcagcatggtgatggttatcagcttgatggtatgaattttgggtttgaaacgacgtaacggccgatgaagaagtgctttcgagcaaggaggcacaaggagcaaaaagatacccctggttttcagtatgaacaaatagttgaatgtttatgtagagtgtcgctcgctataccaagaaattcgctccctcgtttgttgattcaggagcctcggatatgagtttcgttttgggatacgtttcaggcttgtgataatcagatgagtttgctcgcatgtctaactccactagcctctgggggaaagagtcaggaacaccacttctagtattgcgacggagccgaaagagtttgcatatgggccctgcaaggctgtgagttcaatttgtcggagactggtctgggtagaccgcattatattcattggatggtccaagtacaatggagggtgtcgtgagatttacctacgttgaaatacacaatgaacggcctgatatgtacaccgactagtctcaaagggataattgggacgcatattgccaattttctttaatttgtaaatgataccacaatatggtttataagtttgtatacgaacttgagatgtcattccctgtcacctagtgttggggtcacaatggcgattgagaggcctattgctgggaacaacatggagccaaagaattgtggtatcacataaggagatcatgatgtttgtagcagaataacctcttgtaacaggcaggaaacgttacaaacgtaccttagtaaagaaggaattaacataattg

SEQ ID NO: 8392 - DNA, 1188 bp, Muscodor strobelii
  misc_feature: SGI cDNA ID NO. 562580
  misc_feature: Elevated expression when VOC is produced
  misc_feature: Encodes the peptide sequence at SEQ ID NO 8393
atgtacgaggaactcccagctactgtcgagatattcgatgaggtcgattttgttccgagccgaccaccaacaccgccaccaagaaacatcgagagactggaagcggcacgaaacagaatggtttcgccgttcgaagaagaaacagatccgccatcgatcccttacggcgtgaccactgaaatctcttcaagtcgcagatttgcgccatcgataagatccgttagaggcgggggatttggacgtttattttctcaccttaggaaccgttccgtctcagatatcagacctccgacacagtcgaccaactcctcagcaggaaatgccgcgggtgaagacaagctgggcccaataatgtcgaaacccccctcaaagccaccgagcatagtgcgacgaagcagtcgacgactctcggcctcgatctcgaagattccgtggcggggtatagagcatgtggaagagctcgaagaagcagggcagaccgtttccgaggccgttttcggtgtttctttgcaagctagtatgcgagtcgccaaaggaacatccaagacacatcacaatggtggcggcggctcatcccgccgggaatttcctctgtgtgtgcagaaatgctgtttctttttgaagaacgaggatgccgctaaagcacctgatatttttgcagcgccgggagatatgtttcgcgttgccaaaatgaaggaggtctttagcacgggtccatcatacggcgagcacattgattgggaacattatacagtctatgattgcgccgacttaataatgctttatctttcgcaattgcctaagccactgatccccgaatcgatcgcccggaaatggatctctctttctcgacaagcaacgctctctggttctcatgcgacgagactggaccagtgtattgacttctgggaagaggccctaggagggttacgcgggccaagtcgtagtcttttcaagctgctccttaatctttgggctgacgtggccgctgccgaagatcacaatgatatgacggcagaacggctcgccggcgtggtgctgaaacccctgatgcatgtgaatggcggaacatatcgaacggattacatgctttcgcttgccttcctcatccgaaaacgcacgcagtacactgaactaatgaacgacaaccggtccgccatcaatcgtatcgacagggcagcatggtga

SEQ ID NO: 8393 - protein, 395 aa, Muscodor strobelii
  misc_feature: SGI Peptide ID NO. 562580
  misc_feature (197)..(361): Pfam Id: PF00620 Pfam Desc: RhoGAP domain
  misc_feature (197)..(280): Pfam Id: PF00620 Pfam Desc: RhoGAP domain
  misc_feature (130)..(383): NCBI GI: 171694504 Blast Desc: protein product [Podospora anserina] gi|170947494|emb|CAP59655.1| protein product [Podospora anserina]
  misc_feature (128)..(365): NCBI GI: 116182990 Blast Desc: CHGG_02123 [Chaetomium globosum CBS 148.51] gi|88186420|gb|EAQ93888.1| CHGG_02123 [Chaetomium globosum CBS 148.51]
  misc_feature (82)..(376): NCBI GI: 116197212 Blast Desc: CHGG_05204 [Chaetomium globosum CBS 148.51] gi|88181117|gb|EAQ88585.1| CHGG_05204 [Chaetomium globosum CBS 148.51]
  misc_feature (140)..(380): NCBI GI: 171676628 Blast Desc: protein product [Podospora anserina] gi|170936381|emb|CAP61038.1| protein product [Podospora anserina]
  misc_feature (157)..(376): NCBI GI: 85109190 Blast Desc: NCU07622 [Neurospora crassa OR74A] gi|28924432|gb|EAA33561.1| [Neurospora crassa OR74A]
  misc_feature (145)..(381): NCBI GI: 119497819 Blast Desc: Rho GTPase activator (Sac7), [Neosartorya fischeri NRRL 181] gi|119413831|gb|EAW23770.1| Rho GTPase activator (Sac7), [Neosartorya fischeri NRRL 181]
  misc_feature (145)..(381): NCBI GI: 121711094 Blast Desc: Rho GTPase activator (Sac7), [Aspergillus clavatus NRRL 1] gi|119401313|gb|EAW11737.1| Rho GTPase activator (Sac7), [Aspergillus clavatus NRRL 1]
  misc_feature (145)..(381): NCBI GI: 67901326 Blast Desc: AN7650.2 [Aspergillus nidulans FGSC A4] gi|40742646|gb|EAA61836.1| AN7650.2 [Aspergillus nidulans FGSC A4] gi|259483984|tpe|CBF79821.1| TPA: conserved similar to Rho
  misc_feature (163)..(381): NCBI GI: 159128656 Blast Desc: Rho GTPase activator (Sac7), [Aspergillus fumigatus A1163]
  misc_feature (164)..(376): NCBI GI: 258573201 Blast Desc: UREG_00295 [Uncinocarpus reesii 1704] gi|237901048|gb|EEP75449.1| UREG_00295 [Uncinocarpus reesii 1704]
  misc_feature: Useful for introducing or modulating the production of volatile compounds
MYEELPATVEIFDEVDFVPSRPPTPPPRNIERLEAARNRMVSPFEEETDPPSIPYGVTTEISSSRRFAPSIRSVRGGGFGRLFSHLRNRSVSDIRPPTQSTNSSAGNAAGEDKLGPIMSKPPSKPPSIVRRSSRRLSASISKIPWRGIEHVEELEEAGQTVSEAVFGVSLQASMRVAKGTSKTHHNGGGGSSRREFPLCVQKCCFFLKNEDAAKAPDIFAAPGDMFRVAKMKEVFSTGPSYGEHIDWEHYTVYDCADLIMLYLSQLPKPLIPESIARKWISLSRQATLSGSHATRLDQCIDFWEEALGGLRGPSRSLFKLLLNLWADVAAAEDHNDMTAERLAGVVLKPLMHVNGGTYRTDYMLSLAFLIRKRTQYTELMNDNRSAINRIDRAAW

SEQ ID NO: 8394 - DNA, 4102 bp, Muscodor strobelii; identical to SEQ ID NO: 8391
  misc_feature: SGI EST ID NO. CUFF.20399.0
  misc_feature: Variant of the nucleotide sequence at SEQ ID NO 8392

SEQ ID NO: 8395 - DNA, 1584 bp, Muscodor strobelii
  misc_feature: SGI cDNA ID NO. 562581
  misc_feature: Encodes the peptide sequence at SEQ ID NO 8396
atgaactcctcatccaccaaaccgtctgaggagactgccgctggcgagccctccttgccgcctgtctcctcatcctcatcctcgagcgggcttggtgtcaagcgccctgcaccctcgctcctccctgccttcgagctctcctcctccccaggtcttccacggccccttaagcgacaggctcgcgacattgccgctggacctaatgcctctctccgttatcctactcctattcccacctcgagtaccggcattctctcttcctcacctccacgcatccagtcatcgaggccgggtttggtccgcacacagtctctggcatcagaacgggctcctctgtccgacgtgccttctctctatctgaaggagaatggagagatgctcctgatgggtcgatctagcaactcgtctcactaccagctgtctgccaacaaacatatctcgcgtgtccatgccaaagcccgatatataccctcagattcgcctgatgaacctagccaggttgagatcgtatgcaatggttggaatggactgaagctgcactgccaaggaagaacatgggatatgtccaagaacgacactttcacctccgagactgagggtgccgttatcatgatcgatgtgcaggatgcgagggtcatgatccattggcccaagaaggaacgacaggagtctgtttcgacactttcagaatcttcgtgggatgagtcgccacgtgctcgaagacgcccttcgcctgatttcctgcagtctagcccactgcgacgccagacgcgaatccgctcgcccgagtcacccacgcccgctagcaaatcagtgacttccagcatggacgatctgctgggcaaccaagactcggatgaaccggttcagatctacgaggatgcaagtgcagaagaacaagagttgcctgaggttgctcacgatgtggaagcgtccttcgcccagaccgaattgaacaatagtttctccagtgatctgagtgatcccgacgatgtgcttgacccggacgaggaaaacgatcccatcatttactcttttggtccctttggcgccaacctttctgatcgcctcgcagctgtcactgccgagtcgcccaagcagccgtcccttccgttctcaggcgagagcacggccaaggcatccgccgagccagatttgccactgaatgccaacattgatgtggaggctgtcaccaaccacgttgtgaaccagctggcattctcgcgactgtcatccaatcctctgactgctatcctaaacaatcttccctccgaggagaagaaagatttgaccaagtcagatctgcgacgaatcatcgagaagactcaatgcatcggcgtgatcaccagacagggcaaagacgcagcgggcaaggcgttggagagcgaatactactacgttccagaacacgacgcagacgaatctcgccgattagccgttacagacggcttacgcaaacctagcttgcgagcttgtagaaaacagcacaaggtatttaaccccttcatatatgcatggaactggaccgaaaagttgacaaagtggctgcagcaatactattggaaacgccccaagacgccttga

SEQ ID NO: 8396 - protein, 527 aa, Muscodor strobelii
  misc_feature: SGI Peptide ID NO. 562581
  misc_feature (8)..(527): NCBI GI: 116195016 Blast Desc: CHGG_04106 [Chaetomium globosum CBS 148.51] gi|88180019|gb|EAQ87487.1| CHGG_04106 [Chaetomium globosum CBS 148.51]
  misc_feature (6)..(505): NCBI GI: 171679165 Blast Desc: protein product [Podospora anserina] gi|170937654|emb|CAP62312.1| protein product [Podospora anserina]
  misc_feature (1)..(527): NCBI GI: 256728078 Blast Desc: NECHADRAFT_101213 [Nectria haematococca mpVI 77-13-4]
  misc_feature (1)..(527): NCBI GI: 46121145 Blast Desc: FG04951.1 [Gibberella zeae PH-1]
  misc_feature (49)..(527): NCBI GI: 261352575 Blast Desc: conserved [Verticillium albo-atrum VaMs.102]
  misc_feature (15)..(527): NCBI GI: 156049941 Blast Desc: SS1G_07556 [Sclerotinia sclerotiorum 1980] gi|154691958|gb|EDN91696.1| SS1G_07556 [Sclerotinia sclerotiorum 1980]
  misc_feature (1)..(527): NCBI GI: 154318118 Blast Desc: BC1G_03042 [Botryotinia fuckeliana B05.10] gi|150843700|gb|EDN18893.1| BC1G_03042 [Botryotinia fuckeliana B05.10]
  misc_feature (32)..(525): NCBI GI: 115399958 Blast Desc: conserved [Aspergillus terreus NIH2624] gi|114191234|gb|EAU32934.1| conserved [Aspergillus terreus NIH2624]
  misc_feature (21)..(498): NCBI GI: 159123265 Blast Desc: transcription factor Tos4, [Aspergillus fumigatus A1163]
  misc_feature (21)..(498): NCBI GI: 70986959 Blast Desc: transcription factor Tos4 [Aspergillus fumigatus Af293] gi|66846595|gb|EAL86927.1| transcription factor Tos4, [Aspergillus fumigatus Af293]
MNSSSTKPSEETAAGEPSLPPVSSSSSSSGLGVKRPAPSLLPAFELSSSPGLPRPLKRQARDIAAGPNASLRYPTPIPTSSTGILSSSPPRIQSSRPGLVRTQSLASERAPLSDVPSLYLKENGEMLLMGRSSNSSHYQLSANKHISRVHAKARYIPSDSPDEPSQVEIVCNGWNGLKLHCQGRTWDMSKNDTFTSETEGAVIMIDVQDARVMIHWPKKERQESVSTLSESSWDESPRARRRPSPDFLQSSPLRRQTRIRSPESPTPASKSVTSSMDDLLGNQDSDEPVQIYEDASAEEQELPEVAHDVEASFAQTELNNSFSSDLSDPDDVLDPDEENDPIIYSFGPFGANLSDRLAAVTAESPKQPSLPFSGESTAKASAEPDLPLNANIDVEAVTNHVVNQLAFSRLSSNPLTAILNNLPSEEKKDLTKSDLRRIIEKTQCIGVITRQGKDAAGKALESEYYYVPEHDADESRRLAVTDGLRKPSLRACRKQHKVFNPFIYAWNWTEKLTKWLQQYYWKRPKTP

SEQ ID NO: 8397 - DNA, 2639 bp, Muscodor strobelii
  misc_feature: SGI EST ID NO. CUFF.20456.1
  misc_feature: Variant of the nucleotide sequence at SEQ ID NO 8395
aaagaatagatgtccaaaagtgcaaaattgctctcatttcttgagagtcatataaacacttattttggaacatcttagtgctatttttcacgccaatatcggtagaaagagacgtaggctgtcagagaattaagggttcggagccggcgccggtctggtcagcaggtggggagtcgcgaacgcgcccgcgcccaccgcgaatctccaattctgccacttacacgcgactatagtatgctcctgccactctatgcacacactcggcgacctaccttcctcacctgagccactcaacctgccttgccttccttaccttgaattcgacgaacactttgaatttgctggtctacaactcctcgccggccagcctattctcacattccttctctatctcgccgacctacatcccgccgtctcttcatacacaaggggtatacatcttttcaacactgtaattcgccgtcactcctttgctatgcctgacgagtcggcgtaacacacatcatgaactcctcatccaccaaaccgtctgaggagactgccgctggcgagccctccttgccgcctgtctcctcatcctcatcctcgagcgggcttggtgtcaagcgccctgcaccctcgctcctccctgccttcgagctctcctcctccccaggtcttccacggccccttaagcgacaggctcgcgacattgccgctggacctaatgcctctctccgttatcctactcctattcccacctcgagtaccggcattctctcttcctcacctccacgcatccagtcatcgaggccgggtttggtccgcacacagtctctggcatcagaacgggctcctctgtccgacgtgccttctctctatctgaaggagaatggagagatgctcctgatgggtcgatctagcaactcgtctcactaccagctgtctgccaacaaacatatctcgcgtgtccatgccaaagcccgatatataccctcagattcgcctgatgaacctagccaggttgagatcgtatgcaatggttggaatggactgaagctgcactgccaaggaagaacatgggatatgtccaagaacgacactttcacctccgagactgagggtgccgttatcatgatcgatgtgcaggatgcgagggtcatgatccattggcccaagaaggaacgacaggagtctgtttcgacactttcagaatcttcgtgggatgagtcgccacgtgctcgaagacgcccttcgcctgatttcctgcagtctagcccactgcgacgccagacgcgaatccgctcgcccgagtcacccacgcccgctagcaaatcagtgacttccagcatggacgatctgctgggcaaccaagactcggatgaaccggttcagatctacgaggatgcaagtgcagaagaacaagagttgcctgaggttgctcacgatgtggaagcgtccttcgcccagaccgaattgaacaatagtttctccagtgatctgagtgatcccgacgatgtgcttgacccggacgaggaaaacgatcccatcatttactcttttggtccctttggcgccaacctttctgatcgcctcgcagctgtcactgccgagtcgcccaagcagccgtcccttccgttctcaggcgagagcacggccaaggcatccgccgagccagatttgccactgaatgccaacattgatgtggaggctgtcaccaaccacgttgtgaaccagctggcattctcgcgactgtcatccaatcctctgactgctatcctaaacaatcttccctccgaggagaagaaagatttgaccaagtcagatctgcgacgaatcatcgagaagactcaatgcatcggcgtgatcaccagacagggcaaagacgcagcgggcaaggcgttggagagcgaatactactacgttccagaacacgacgcagacgaatctcgccgattagccgttacagacggcttacgcaaacctagcttgcgagcttgtagaaaacagcacaagcaatactattggaaacgccccaagacgccttgatattggcctgcgccagactgttttgatcccttgagagattaatgggatgttttctgtttcagaaaccactgacgaaagaggcggacggaaatcgatgttgtcaccggaggattgggcaatgccctttgttacagatgttcgtgttcggcataggacggcgtctctccgttgttctcgttgtcgttcttgttgacacagcatagcaccaggcgtacttggttgaatggcttctctggactggcttctcttttcaagcttgctcatgatttgagctgggcaagctacaattgcatctctgttattcccaagtttggtgaacaagccgaaagtgagcaagttggcatgctcgcaaacctgatcgcaggatgaacggtcaaaatgtacaaaaggctagatttgctaaggcgaggagtcaaaaagatgcatggtaagggagaaagatagtgccaaaatacaaaaggagctgcactgtagctatttgttaatagtttgatgatgactatgaggcaaatgaatcaatgttaaaggcaatgctgttgattcatacagaagtggaactgactgacgtcgtcaagtagagctcttatctaggggccaataaagctaccccg

SEQ ID NO: 8398 - DNA, 276 bp, Muscodor strobelii
  misc_feature: SGI cDNA ID NO. 562582
  misc_feature: Encodes the peptide sequence at SEQ ID NO 8399
atgtcatcaaacacatcctccaccaaccctcccacacacatcgatctcccgactctgaaccagtccgagatcccgcagtcccaacccggcccgactagtccgcagctggagaaggacgccgcgagagctatgtcgagcactgcagggtggcagccgaaactcggggatcgcaagaagagctatcagaaagaggaccagaaacatgctctgatgatgagctctgtgggtgagaatacggctgggaatacggggtttagtgaggggaggaatgcttag

SEQ ID NO: 8399 - protein, 91 aa, Muscodor strobelii
  misc_feature: SGI Peptide ID NO. 562582
  misc_feature (6)..(91): NCBI GI: 256728077 Blast Desc: NECHADRAFT_102760 [Nectria haematococca mpVI 77-13-4]
MSSNTSSTNPPTHIDLPTLNQSEIPQSQPGPTSPQLEKDAARAMSSTAGWQPKLGDRKKSYQKEDQKHALMMSSVGENTAGNTGFSEGRNA

SEQ ID NO: 8400 - DNA, 859 bp, Muscodor strobelii
  misc_feature: SGI EST ID NO. CUFF.20402.0
  misc_feature: Variant of the nucleotide sequence at SEQ ID NO 8398
ggggtagacaggcgctagggggtgctagaccttcgaatagatccccatatctgatccaaaagattcatccaaacacacctcaacaacttgagttcgtcctaagtctctagttgatcacctcgagtcaacaatatacaattatctcctatccgattgaaaccaaataaaccaagcccatcacgcacaacctcaagatgtcatcaaacacatcctccaccaaccctcccacacacatcgatctcccgactctgaaccagtccgagatcccgcagtcccaacccggcccgactagtccgcagctggagaaggacgccgcgagagctatgtcgagcactgcagggtggcagccgaaactcggggatcgcaagaagagctatcagaaagaggaccagaaacatgctctgatgatgagctctgtgggtgagaatacggctgggaatacggggtttagtgaggggaggaatgcttagttgtttatttgggctgcaagtgagcttttgaaggttggcgaagtttaggataggatgctggtgaggtccgcattaggaagagatctcggttgagggtttgtgagattgctgcttgattgagtgtggaaaattggtacatgaaaagttgatggactgggacacaagcacgtatggatcgagtatgaattatgttcttgttctaggtcgttcgagaaaagagcgagggtcaacagtgaggacaaaaggtaatacacacgcagaatgaaagcctatacatgtatccaagtaattcgaccctttcatagtagtcgtgacatttcattatggaaaactcttcacgcttaaatccatgtatcaagtccattcatgatagtagccttacgcctgag

SEQ ID NO: 8401 - DNA, 4977 bp, Muscodor strobelii
  misc_feature: SGI cDNA ID NO. 562583
  misc_feature: Encodes the peptide sequence at SEQ ID NO 8402
atgagccggaaactgagcaagggccgggccgccagcagcaaagccacgccgagctttggcgggacctcgttcggcggcttctcgactgcagccagtggcaccaacctttcctacctcgcggagccctccgacttctctgccatacccgacgcccttgttgtcgtctcattcaagaacctgcagaagaaagatgctaccacgaaagggagagctctcgaggagctgctggtctatgcacaggaccaccctttcgaaaaggatggaggtgtgggcgatcctgtattagaggcttgggtccaatcgtatccccgaatctctatagacaactcccgacgcgtgcgcgaactatcccatatcctccaactcgagctcatgaaatctgcccggaagcgcatggagaagaatgtcccaagggttgtgggctcttggcttgcgggtacctttgataaggacagagcggtctcgagagctgctaccgaagggctctcttcttttctcacaactcccgaaaaagtcgtccagttttggaaaaggtgccagcagcagatcctcgattatgcatctgacgccatcaaagagactacagatactctcagtgaccagagatcaactaatgccgacgatgcggaagcgaaatactctcgagtgatcgccggaagtcttgcacttgtcctgaacctcctgcaacgcctcgagccggtcgatattgagaaatgcttggatacttatgatcagttctttgaaaatgataaagtctgggcgagcgccgttgctaatgaccccaatgtccgacgattgtcttctcagctgttgttaatatgcatcgagagaaggccggatcgcattgaagctgatctgacacgtctgagcaaggtattcatctccgagggcctcaaatctgaccagacaggctctgtagtcgactttctcaacgctgtgaaggcattgacggcgaagttcccaacagcatggacttctgattataagggtaaaaagtcgccattgtcgcgattgaaactcttcatggaatctggatcgtatggagggccagcaaagtactggacaactctgtctgaattgaccagtcttctacctactggcatactcccaacagatttcgatggcgctttggacactatgaaggccatgaggaaaggtgtcactggtcgcgacgagcttcggggcaatgccgtagacggttggaccgcctatttaagcttggccagacactttctacgagaagcccaatcaagcgatacacgtgtcagtcttgctcaagagaccatatttccattgatcgagcactatctgttcccatcgcctgacacgtcgatttggtcttcaggcagtcaagtgcagatattaatcaaggcttacacgtcgacaacgaccttagcatttgaagatttagttgacgcaacactatcggactggatccgcttgaaaaacaaaatggtagatcaccttcgtaattctctacctgaagcatcgaaagaacaccaaaaatctcaaggagctgttgccgacgaaggctggcgatggttctcactcacaggtactatcttggatgcgcatgagaaaacagcaacaggcgatcgcccaattccagatattccggccgaaccgtctgtagaaattcttcgagaagctgttcagctgctagagaagagagactggaaaccatttggggctgcctcggttgtagagtccgcaattagacaagcgcctttacttttcagaacgatttcaaggactaaatcaatctttacacatctggagaccgctcttgttcaaggccagattgatttcttgaaatcgtctagtgctccctacatcgtttcgagtataacacttcttggtcagatcccagagcaagtcagcactttcgagcagatgtggaagtcgagcatttcggctgtcatgcaaggcctggaaggtgcagaagtcataaagatcctaggcaagctgatttcaagctcacaaacagctgctttggcacaggagatgaatccactacagaccgagcttattcgcaggtgtcttatatgtgctgttggcactcctggtccaaattgggactttttcacaaatgtcataacatttggggctctaaatgaggtcagctctaagaggctggtgaaagaacttaccagtcgtgtcgcgagttcaactggtgtaccaaatcaaggcatagtcaaaggattgcaggtgatcgcacaaacaagacctgattggttatcaaaagacgaagggctctacatgagcttaatgacaagcctgctgagtctttcggagaagccaggagttggaccagaagtggccatgttgcagttgtacctggagaatgcaacccataaaggttctagtgtacaagcattgattcaacaaaacatcaacagtcttggcccgcagtcactttccgttgagacactcgcgcaacaagcgatccagatccaatcatctgttgttcagcctcagcaagatagcgcgatcagttcaaatcttgcatccttgctcccagattcaacgatatggagacaacagctgtctggtctgctagaagcaataccaaatccctctttggctcttacaaatagtcttggaggctcttgttttctcctttcaaatacgtcaatgccttcgagtacagaactagaccgagattatcgaggttgttccgtacctggtcgcatggctatgtatatgtcgaagcttattttatctggatttccattcgctctagtggatttaccactcagaatcaaaatactcatcaacttaagtttgacagctgagctggctagcgaccaactgactgtaatgaatgaaaaccaggtgtggagttctttatcatcaagagagaatctatcagactgcgaagacctggttgcatccgtacgtaagctcgttattgacctaacaggatccgctcctaaatggcaagacgggtcaggaatagacaattcgcagctagtttccatcattatcaacgaactcgttcaagaagcacaatctctatcgcccctcggcttttattgcggtcgcgtcctgaacgtatttatccaggctttgactgagaaacatgggtttccgtcaagcggagaaaagtggctgacggatttgaatgtattgaaagcaagcccaactgcagtattccctgctgttgcgattctagtagggctcggcgagactatctcgacatcaagagtcgtcagcaccttttgcaaccgactggtgagcgaaattccggacgccaaacttggccaggagaagagccttgcaacacttgtgctgcttaatgcatgcatgcaactgtacgacaccggcgagctccccgttgccaataatcggcttgtgtttgctgtccggcagattacctcttggcttgagactccggaggaagttgactttcgatttgcaacagaagcatgcaaggctctgcatcgtctgttcccttgcgtaaagcatgtatacggatcttactgggaaactgcaatagctttttgcatatacacctggactaaggtgacagacgactctcttgactcgcgtctgcccttgattcactcttcattacggctagtgtcgacgctgcaatcgttggatgaacctaacgatgatcttattgacgccatagaaacatctactgaaggcaggtctgctgctttgataaatctcttgcagctgccaagagaaagacacactcaaccactcgacattgtcgattctatcatttgtcgccaagttgaaaaattatcattgcatcacgttcatgacctatcagacctgtaccatcttattgctagcgacttccgacccattcagactgcggcgttcaatattttgcacaaagccattccagctgaagtggagaaaatctctgttgacgttctcctagagaagcggagtgcgcagcttccagacgaacttttatcattacttcttgatgcacccactctcgaactgtacccagatgagatcttgctgaaatttccgactccagtccgtgcgtacctcctctcgtggcatttgatctttgatgcatttcgggcagcatcattcaaagtacgtggcgactatacggaaattttgaaagcagagaactatatgggtcctctactagatttcatgttcgatgttcttggccattctgcagctcatggactcagcttagacaggtcaaactttgacactgagcatattcgaaattacgacttgaagcttgccgaatcggagtccgaggagaggaatatgcaatggctttttattcatctattctatctcatcttgaaatacgtacccggtctattcaaaacatggtacattgggtgccgatcgaaacagacaaagattgccgtagaggcatggacagctcgctacttctctccaatcatcatctcggaggccttggatgacgttgaaaattggaataacagccaggaagcccccgcagacgatgaaaaggaattaatagtgaaggtcagccgaacagccaaggaagttgttgccggttacgaagtcgacgaactcaacgcctcgatcgcgattcgaatcccaccagagtttccacttgagacagtgactgtcgttggcattaatcgtgttgcagtcaatgagaagaaatggcagagctggatcatgacaacgcagggcgttattacgttctccgtgcgtaacttcatttgctatcccttcaatcatataactaacgtgaaacagggcggtaatattatcgatggactcactactttccgacgtaacgtcgtcggagctcttaaaggccagtctgagtgcgctatctgctatagcatcatcagcacggacaagaagatgcccgacaaacggtgtcagacttgcaagaacttattccatcgtacttgcctgtacaagtggttccagagcagtagtcagaacacatgccctctctgtagaaaccccattgattatttgggagcagatacgaaggcgaggagataa

SEQ ID NO: 8402 - protein, 1658 aa, Muscodor strobelii
  misc_feature: SGI Peptide ID NO. 562583
  misc_feature (1598)..(1643): Pfam Id: PF00097 Pfam Desc: Zinc finger, C3HC4 type (RING finger)
  misc_feature (4)..(1658): NCBI GI: 46120908 Blast Desc: FG04948.1 [Gibberella zeae PH-1]
  misc_feature (32)..(1658): NCBI GI: 256728076 Blast Desc: [Nectria haematococca mpVI 77-13-4]
  misc_feature (1)..(1658): NCBI GI: 39969833 Blast Desc: MGG_10526 [Magnaporthe grisea 70-15] gi|145010123|gb|EDJ94779.1| MGG_10526 [Magnaporthe grisea 70-15]
  misc_feature (35)..(1650): NCBI GI: 85104410 Blast Desc: NCU06534 [Neurospora crassa OR74A] gi|28923290|gb|EAA32495.1| NCU06534 [Neurospora crassa OR74A]
  misc_feature (3)..(1618): NCBI GI: 156049961 Blast Desc: SS1G_07566 [Sclerotinia sclerotiorum 1980] gi|154691968|gb|EDN91706.1| SS1G_07566 [Sclerotinia sclerotiorum 1980]
  misc_feature (30)..(1658): NCBI GI: 171691620 Blast Desc: protein product [Podospora anserina] gi|170945758|emb|CAP71871.1| protein product [Podospora anserina]
  misc_feature (994)..(1658): NCBI GI: 261352573 Blast Desc: Zfp294 protein [Verticillium albo-atrum VaMs.102]
  misc_feature (18)..(1649): NCBI GI: 169612702 Blast Desc: SNOG_09476 [Phaeosphaeria nodorum SN15] gi|160702564|gb|EAT82741.2| SNOG_09476 [Phaeosphaeria nodorum SN15]
  misc_feature (1)..(1649): NCBI GI: 189188694 Blast Desc: conserved [Pyrenophora tritici-repentis Pt-1C-BFP] gi|187972292|gb|EDU39791.1| conserved [Pyrenophora tritici-repentis Pt-1C-BFP]
  misc_feature (1)..(1320): NCBI GI: 154290064 Blast Desc: BC1G_15860 [Botryotinia fuckeliana B05.10] gi|150848478|gb|EDN23671.1| BC1G_15860 [Botryotinia fuckeliana B05.10]
MSRKLSKGRAASSKATPSFGGTSFGGFSTAASGTNLSYLAEPSDFSAIPDALVVVSFKNLQKKDATTKGRALEELLVYAQDHPFEKDGGVGDPVLEAWVQSYPRISIDNSRRVRELSHILQLELMKSARKRMEKNVPRVVGSWLAGTFDKDRAVSRAATEGLSSFLTTPEKVVQFWKRCQQQILDYASDAIKETTDTLSDQRSTNADDAEAKYSRVIAGSLALVLNLLQRLEPVDIEKCLDTYDQFFENDKVWASAVANDPNVRRLSSQLLLICIERRPDRIEADLTRLSKVFISEGLKSDQTGSVVDFLNAVKALTAKFPTAWTSDYKGKKSPLSRLKLFMESGSYGGPAKYWTTLSELTSLLPTGILPTDFDGALDTMKAMRKGVTGRDELRGNAVDGWTAYLSLARHFLREAQSSDTRVSLAQETIFPLIEHYLFPSPDTSIWSSGSQVQILIKAYTSTTTLAFEDLVDATLSDWIRLKNKMVDHLRNSLPEASKEHQKSQGAVADEGWRWFSLTGTILDAHEKTATGDRPIPDIPAEPSVEILREAVQLLEKRDWKPFGAASVVESAIRQAPLLFRTISRTKSIFTHLETALVQGQIDFLKSSSAPYIVSSITLLGQIPEQVSTFEQMWKSSISAVMQGLEGAEVIKILGKLISSSQTAALAQEMNPLQTELIRRCLICAVGTPGPNWDFFTNVITFGALNEVSSKRLVKELTSRVASSTGVPNQGIVKGLQVIAQTRPDWLSKDEGLYMSLMTSLLSLSEKPGVGPEVAMLQLYLENATHKGSSVQALIQQNINSLGPQSLSVETLAQQAIQIQSSVVQPQQDSAISSNLASLLPDSTIWRQQLSGLLEAIPNPSLALTNSLGGSCFLLSNTSMPSSTELDRDYRGCSVPGRMAMYMSKLILSGFPFALVDLPLRIKILINLSLTAELASDQLTVMNENQVWSSLSSRENLSDCEDLVASVRKLVIDLTGSAPKWQDGSGIDNSQLVSIIINELVQEAQSLSPLGFYCGRVLNVFIQALTEKHGFPSSGEKWLTDLNVLKASPTAVFPAVAILVGLGETISTSRVVSTFCNRLVSEIPDAKLGQEKSLATLVLLNACMQLYDTGELPVANNRLVFAVRQITSWLETPEEVDFRFATEACKALHRLFPCVKHVYGSYWETAIAFCIYTWTKVTDDSLDSRLPLIHSSLRLVSTLQSLDEPNDDLIDAIETSTEGRSAALINLLQLPRERHTQPLDIVDSIICRQVEKLSLHHVHDLSDLYHLIASDFRPIQTAAFNILHKAIPAEVEKISVDVLLEKRSAQLPDELLSLLLDAPTLELYPDEILLKFPTPVRAYLLSWHLIFDAFRAASFKVRGDYTEILKAENYMGPLLDFMFDVLGHSAAHGLSLDRSNFDTEHIRNYDLKLAESESEERNMQWLFIHLFYLILKYVPGLFKTWYIGCRSKQTKIAVEAWTARYFSPIIISEALDDVENWNNSQEAPADDEKELIVKVSRTAKEVVAGYEVDELNASIAIRIPPEFPLETVTVVGINRVAVNEKKWQSWIMTTQGVITFSVRNFICYPFNHITNVKQGGNIIDGLTTFRRNVVGALKGQSECAICYSIISTDKKMPDKRCQTCKNLFHRTCLYKWFQSSSQNTCPLCRNPIDYLGADTKARR

SEQ ID NO: 8403 - DNA, 5568 bp, Muscodor strobelii
  misc_feature: SGI EST ID NO. CUFF.20408.0
  misc_feature: Variant of the nucleotide sequence at SEQ ID NO 8401
gacctagtccgagcttctacgcattgaacctcaaaatcaagcagaatagccgggtgcttataataggggctcaaaggtacttggaagccatatatgccatgttgacctgtatataagtccgtcacttgagcatggaaatgaaaggcgattgaaagttcagagtacatctggcaggcaaaattcccagttgggcccctgagccttagtgaatgtgttgaacgatttcatcatctacagtttccaagatacaaggcgattatcctaggaaggactttagacttggcatctaattctgatagaactagcatctcttccattttctatttctatttttctatcagacacatttagagactgggaacctaaagtgcgattttgtgcattcgaccgcgacgacgacgtcactcggcccgcgtacgtcgttcatcaaccccaccgtggggtcaaaatattctaccatcgtaacttcagtgtcgtcgcatcacttggtcgcattctcgctcgactacttctctccggcttcgctgcctctcaacccgtcccaggcacttgactgaggcttctttgaggttgtggacatgagccggaaactgagcaagggccgggccgccagcagcaaagccacgccgagctttggcgggacctcgttcggcggcttctcgactgcagccagtggcaccaacctttcctacctcgcggagccctccgacttctctgccatacccgacgcccttgttgtcgtctcattcaagaacctgcagaagaaagatgctaccacgaaagggagagctctcgaggagctgctggtctatgcacaggaccaccctttcgaaaaggatggaggtgtgggcgatcctgtattagaggcttgggtccaatcgtatccccgaatctctatagacaactcccgacgcgtgcgcgaactatcccatatcctccaactcgagctcatgaaatctgcccggaagcgcatggagaagaatgtcccaagggttgtgggctcttggcttgcgggtacctttgataaggacagagcggtctcgagagctgctaccgaagggctctcttcttttctcacaactcccgaaaaagtcgtccagttttggaaaaggtgccagcagcagatcctcgattatgcatctgacgccatcaaagagactacagatactctcagtgaccagagatcaactaatgccgacgatgcggaagcgaaatactctcgagtgatcgccggaagtcttgcacttgtcctgaacctcctgcaacgcctcgagccggtcgatattgagaaatgcttggatacttatgatcagttctttgaaaatgataaagtctgggcgagcgccgttgctaatgaccccaatgtccgacgattgtcttctcagctgttgttaatatgcatcgagagaaggccggatcgcattgaagctgatctgacacgtctgagcaaggtattcatctccgagggcctcaaatctgaccagacaggctctgtagtcgactttctcaacgctgtgaaggcattgacggcgaagttcccaacagcatggacttctgattataagggtaaaaagtcgccattgtcgcgattgaaactcttcatggaatctggatcgtatggagggccagcaaagtactggacaactctgtctgaattgaccagtcttctacctactggcatactcccaacagatttcgatggcgctttggacactatgaaggccatgaggaaaggtgtcactggtcgcgacgagcttcggggcaatgccgtagacggttggaccgcctatttaagcttggccagacactttctacgagaagcccaatcaagcgatacacgtgtcagtcttgctcaagagaccatatttccattgatcgagcactatctgttcccatcgcctgacacgtcgatttggtcttcaggcagtcaagtgcagatattaatcaaggcttacacgtcgacaacgaccttagcatttgaagatttagttgacgcaacactatcggactggatccgcttgaaaaacaaaatggtagatcaccttcgtaattctctacctgaagcatcgaaagaacaccaaaaatctcaaggagctgttgccgacgaaggctggcgatggttctcactcacaggtactatcttggatgcgcatgagaaaacagcaacaggcgatcgcccaattccagatattccggccgaaccgtctgtagaaattcttcgagaagctgttcagctgctagagaagagagactggaaaccatttggggctgcctcggttgtagagtccgcaattagacaagcgcctttacttttcagaacgatttcaaggactaaatcaatctttacacatctggagaccgctcttgttcaaggccagattgatttcttgaaatcgtctagtgctccctacatcgtttcgagtataacacttcttggtcagatcccagagcaagtcagcactttcgagcagatgtggaagtcgagcatttcggctgtcatgcaaggcctggaaggtgcagaagtcataaagatcctaggcaagctgatttcaagctcacaaacagctgctttggcacaggagatgaatccactacagaccgagcttattcgcaggtgtcttatatgtgctgttggcactcctggtccaaattgggactttttcacaaatgtcataacatttggggctctaaatgaggtcagctctaagaggctggtgaaagaacttaccagtcgtgtcgcgagttcaactggtgtaccaaatcaaggcatagtcaaaggattgcaggtgatcgcacaaacaagacctgattggttatcaaaagacgaagggctctacatgagcttaatgacaagcctgctgagtctttcggagaagccaggagttggaccagaagtggccatgttgcagttgtacctggagaatgcaacccataaaggttctagtgtacaagcattgattcaacaaaacatcaacagtcttggcccgcagtcactttccgttgagacactcgcgcaacaagcgatccagatccaatcatctgttgttcagcctcagcaagatagcgcgatcagttcaaatcttgcatccttgctcccagattcaacgatatggagacaacagctgtctggtctgctagaagcaataccaaatccctctttggctcttacaaatagtcttggaggctcttgttttctcctttcaaatacgtcaatgccttcgagtacagaactagaccgagattatcgaggttgttccgtacctggtcgcatggctatgtatatgtcgaagcttattttatctggatttccattcgctctagtggatttaccactcagaatcaaaatactcatcaacttaagtttgacagctgagctggctagcgaccaactgactgtaatgaatgaaaaccaggtgtggagttctttatcatcaagagagaatctatcagactgcgaagacctggttgcatccgtacgtaagctcgttattgacctaacaggatccgctcctaaatggcaagacgggtcaggaatagacaattcgcagctagtttccatcattatcaacgaactcgttcaagaagcacaatctctatcgcccctcggcttttattgcggtcgcgtcctgaacgtatttatccaggctttgactgagaaacatgggtttccgtcaagcggagaaaagtggctgacggatttgaatgtattgaaagcaagcccaactgcagtattccctgctgttgcgattctagtagggctcggcgagactatctcgacatcaagagtcgtcagcaccttttgcaaccgactggtgagcgaaattccggacgccaaacttggccaggagaagagccttgcaacacttgtgctgcttaatgcatgcatgcaactgtacgacaccggcgagctccccgttgccaataatcggcttgtgtttgctgtccggcagattacctcttggcttgagactccggaggaagttgactttcgatttgcaacagaagcatgcaaggctctgcatcgtctgttcccttgcgtaaagcatgtatacggatcttactgggaaactgcaatagctttttgcatatacacctggactaaggtgacagacgactctcttgactcgcgtctgcccttgattcactcttcattacggctagtgtcgacgctgcaatcgttggatgaacctaacgatgatcttattgacgccatagaaacatctactgaaggcaggtctgctgctttgataaatctcttgcagctgccaagagaaagacacactcaaccactcgacattgtcgattctatcatttgtcgccaagttgaaaaattatcattgcatcacgttcatgacctatcagacctgtaccatcttattgctagcgacttccgacccattcagactgcggcgttcaatattttgcacaaagccattccagctgaagtggagaaaatctctgttgacgttctcctagagaagcggagtgcgcagcttccagacgaacttttatcattacttcttgatgcacccactctcgaactgtacccagatgagatcttgctgaaatttccgactccagtccgtgcgtacctcctctcgtggcatttgatctttgatgcatttcgggcagcatcattcaaagtacgtggcgactatacggaaattttgaaagcagagaactatatgggtcctctactagatttcatgttcgatgttcttggccattctgcagctcatggactcagcttagacaggtcaaactttgacactgagcatattcgaaattacgacttgaagcttgccgaatcggagtccgaggagaggaatatgcaatggctttttattcatctattctatctcatcttgaaatacgtacccggtctattcaaaacatggtacattgggtgccgatcgaaacagacaaagattgccgtagaggcatggacagctcgctacttctctccaatcatcatctcggaggccttggatgacgttgaaaattggaataacagccaggaagcccccgcagacgatgaaaaggaattaatagtgaaggtcagccgaacagccaaggaagttgttgccggttacgaagtcgacgaactcaacgcctcgatcgcgattcgaatcccaccagagtttccacttgagacagtgactgtcgttggcattaatcgtgttgcagtcaatgagaagaaatggcagagctggatcatgacaacgcagggcgttattacgttctccggcggtaatattatcgatggactcactactttccgacgtaacgtcgtcggagctcttaaaggccagtctgagtgcgctatctgctatagcatcatcagcacggacaagaagatgcccgacaaacggtgtcagacttgcaagaacttattccatcgtacttgcctgtacaagtggttccagagcagtagtcagaacacatgccctctctgtagaaaccccattgattatttgggagcagatacgaaggcgaggagataagggttgtacgtagaaggggggaaagagttatatatagacttcgaacctacatctggaaatttac

SEQ ID NO: 8404 - DNA, 4926 bp, Muscodor strobelii
  misc_feature: SGI cDNA ID NO. 562584
  misc_feature: Encodes the peptide sequence at SEQ ID NO 8405
atgagccggaaactgagcaagggccgggccgccagcagcaaagccacgccgagctttggcgggacctcgttcggcggcttctcgactgcagccagtggcaccaacctttcctacctcgcggagccctccgacttctctgccatacccgacgcccttgttgtcgtctcattcaagaacctgcagaagaaagatgctaccacgaaagggagagctctcgaggagctgctggtctatgcacaggaccaccctttcgaaaaggatggaggtgtgggcgatcctgtattagaggcttgggtccaatcgtatccccgaatctctatagacaactcccgacgcgtgcgcgaactatcccatatcctccaactcgagctcatgaaatctgcccggaagcgcatggagaagaatgtcccaagggttgtgggctcttggcttgcgggtacctttgataaggacagagcggtctcgagagctgctaccgaagggctctcttcttttctcacaactcccgaaaaagtcgtccagttttggaaaaggtgccagcagcagatcctcgattatgcatctgacgccatcaaagagactacagatactctcagtgaccagagatcaactaatgccgacgatgcggaagcgaaatactctcgagtgatcgccggaagtcttgcacttgtcctgaacctcctgcaacgcctcgagccggtcgatattgagaaatgcttggatacttatgatcagttctttgaaaatgataaagtctgggcgagcgccgttgctaatgaccccaatgtccgacgattgtcttctcagctgttgttaatatgcatcgagagaaggccggatcgcattgaagctgatctgacacgtctgagcaaggtattcatctccgagggcctcaaatctgaccagacaggctctgtagtcgactttctcaacgctgtgaaggcattgacggcgaagttcccaacagcatggacttctgattataagggtaaaaagtcgccattgtcgcgattgaaactcttcatggaatctggatcgtatggagggccagcaaagtactggacaactctgtctgaattgaccagtcttctacctactggcatactcccaacagatttcgatggcgctttggacactatgaaggccatgaggaaaggtgtcactggtcgcgacgagcttcggggcaatgccgtagacggttggaccgcctatttaagcttggccagacactttctacgagaagcccaatcaagcgatacacgtgtcagtcttgctcaagagaccatatttccattgatcgagcactatctgttcccatcgcctgacacgtcgatttggtcttcaggcagtcaagtgcagatattaatcaaggcttacacgtcgacaacgaccttagcatttgaagatttagttgacgcaacactatcggactggatccgcttgaaaaacaaaatggtagatcaccttcgtaattctctacctgaagcatcgaaagaacaccaaaaatctcaaggagctgttgccgacgaaggctggcgatggttctcactcacaggtactatcttggatgcgcatgagaaaacagcaacaggcgatcgcccaattccagatattccggccgaaccgtctgtagaaattcttcgagaagctgttcagctgctagagaagagagactggaaaccatttggggctgcctcggttgtagagtccgcaattagacaagcgcctttacttttcagaacgatttcaaggactaaatcaatctttacacatctggagaccgctcttgttcaaggccagattgatttcttgaaatcgtctagtgctccctacatcgtttcgagtataacacttcttggtcagatcccagagcaagtcagcactttcgagcagatgtggaagtcgagcatttcggctgtcatgcaaggcctggaaggtgcagaagtcataaagatcctaggcaagctgatttcaagctcacaaacagctgctttggcacaggagatgaatccactacagaccgagcttattcgcaggtgtcttatatgtgctgttggcactcctggtccaaattgggactttttcacaaatgtcataacatttggggctctaaatgaggtcagctctaagaggctggtgaaagaacttaccagtcgtgtcgcgagttcaactggtgtaccaaatcaaggcatagtcaaaggattgcaggtgatcgcacaaacaagacctgattggttatcaaaagacgaagggctctacatgagcttaatgacaagcctgctgagtctttcggagaagccaggagttggaccagaagtggccatgttgcagttgtacctggagaatgcaacccataaaggttctagtgtacaagcattgattcaacaaaacatcaacagtcttggcccgcagtcactttccgttgagacactcgcgcaacaagcgatccagatccaatcatctgttgttcagcctcagcaagatagcgcgatcagttcaaatcttgcatccttgctcccagattcaacgatatggagacaacagctgtctggtctgctagaagcaataccaaatccctctttggctcttacaaatagtcttggaggctcttgttttctcctttcaaatacgtcaatgccttcgagtacagaactagaccgagattatcgaggttgttccgtacctggtcgcatggctatgtatatgtcgaagcttattttatctggatttccattcgctctagtggatttaccactcagaatcaaaatactcatcaacttaagtttgacagctgagctggctagcgaccaactgactgtaatgaatgaaaaccaggtgtggagttctttatcatcaagagagaatctatcagactgcgaagacctggttgcatccgtacgtaagctcgttattgacctaacaggatccgctcctaaatggcaagacgggtcaggaatagacaattcgcagctagtttccatcattatcaacgaactcgttcaagaagcacaatctctatcgcccctcggcttttattgcggtcgcgtcctgaacgtatttatccaggctttgactgagaaacatgggtttccgtcaagcggagaaaagtggctgacggatttgaatgtattgaaagcaagcccaactgcagtattccctgctgttgcgattctagtagggctcggcgagactatctcgacatcaagagtcgtcagcaccttttgcaaccgactggtgagcgaaattccggacgccaaacttggccaggagaagagccttgcaacacttgtgctgcttaatgcatgcatgcaactgtacgacaccggcgagctccccgttgccaataatcggcttgtgtttgctgtccggcagattacctcttggcttgagactccggaggaagttgactttcgatttgcaacagaagcatgcaaggctctgcatcgtctgttcccttgcgtaaagcatgtatacggatcttactgggaaactgcaatagctttttgcatatacacctggactaaggtgacagacgactctcttgactcgcgtctgcccttgattcactcttcattacggctagtgtcgacgctgcaatcgttggatgaacctaacgatgatcttattgacgccatagaaacatctactgaaggcaggtctgctgctttgataaatctcttgcagctgccaagagaaagacacactcaaccactcgacattgtcgattctatcatttgtcgccaagttgaaaaattatcattgcatcacgttcatgacctatcagacctgtaccatcttattgctagcgacttccgacccattcagactgcggcgttcaatattttgcacaaagccattccagctgaagtggagaaaatctctgttgacgttctcctagagaagcggagtgcgcagcttccagacgaacttttatcattacttcttgatgcacccactctcgaactgtacccagatgagatcttgctgaaatttccgactccagtccgtgcgtacctcctctcgtggcatttgatctttgatgcatttcgggcagcatcattcaaagtacgtggcgactatacggaaattttgaaagcagagaactatatgggtcctctactagatttcatgttcgatgttcttggccattctgcagctcatggactcagcttagacaggtcaaactttgacactgagcatattcgaaattacgacttgaagcttgccgaatcggagtccgaggagaggaatatgcaatggctttttattcatctattctatctcatcttgaaatacgtacccggtctattcaaaacatggtacattgggtgccgatcgaaacagacaaagattgccgtagaggcatggacagctcgctacttctctccaatcatcatctcggaggccttggatgacgttgaaaattggaataacagccaggaagcccccgcagacgatgaaaaggaattaatagtgaaggtcagccgaacagccaaggaagttgttgccggttacgaagtcgacgaactcaacgcctcgatcgcgattcgaatcccaccagagtttccacttgagacagtgactgtcgttggcattaatcgtgttgcagtcaatgagaagaaatggcagagctggatcatgacaacgcagggcgttattacgttctccggcggtaatattatcgatggactcactactttccgacgtaacgtcgtcggagctcttaaaggccagtctgagtgcgctatctgctatagcatcatcagcacggacaagaagatgcccgacaaacggtgtcagacttgcaagaacttattccatcgtacttgcctgtacaagtggttccagagcagtagtcagaacacatgccctctctgtagaaaccccattgattatttgggagcagatacgaaggcgaggagataa

SEQ ID NO: 8405 - protein, 1641 aa, Muscodor strobelii
  misc_feature: SGI Peptide ID NO. 562584
  misc_feature (1581)..(1626): Pfam Id: PF00097 Pfam Desc: Zinc finger, C3HC4 type (RING finger)
  misc_feature (4)..(1641): NCBI GI: 46120908 Blast Desc: FG04948.1 [Gibberella zeae PH-1]
  misc_feature (32)..(1641): NCBI GI: 256728076 Blast Desc: [Nectria haematococca mpVI 77-13-4]
  misc_feature (1)..(1641): NCBI GI: 39969833 Blast Desc: MGG_10526 [Magnaporthe grisea 70-15] gi|145010123|gb|EDJ94779.1| MGG_10526 [Magnaporthe grisea 70-15]
  misc_feature (35)..(1633): NCBI GI: 85104410 Blast Desc: NCU06534 [Neurospora crassa OR74A] gi|28923290|gb|EAA32495.1| NCU06534 [Neurospora crassa OR74A]
  misc_feature (3)..(1601): NCBI GI: 156049961 Blast Desc: SS1G_07566 [Sclerotinia sclerotiorum 1980] gi|154691968|gb|EDN91706.1| SS1G_07566 [Sclerotinia sclerotiorum 1980]
  misc_feature (30)..(1641): NCBI GI: 171691620 Blast Desc: protein product [Podospora anserina] gi|170945758|emb|CAP71871.1| protein product [Podospora anserina]
  misc_feature (994)..(1641): NCBI GI: 261352573 Blast Desc: Zfp294 protein [Verticillium albo-atrum VaMs.102]
  misc_feature (18)..(1632): NCBI GI: 169612702 Blast Desc: SNOG_09476 [Phaeosphaeria nodorum SN15] gi|160702564|gb|EAT82741.2| SNOG_09476 [Phaeosphaeria nodorum SN15]
  misc_feature (1)..(1632): NCBI GI: 189188694 Blast Desc: conserved [Pyrenophora tritici-repentis Pt-1C-BFP] gi|187972292|gb|EDU39791.1| conserved [Pyrenophora tritici-repentis Pt-1C-BFP]
  misc_feature (1)..(1320): NCBI GI: 154290064 Blast Desc: BC1G_15860 [Botryotinia fuckeliana B05.10] gi|150848478|gb|EDN23671.1| BC1G_15860 [Botryotinia fuckeliana B05.10]
MSRKLSKGRAASSKATPSFGGTSFGGFSTAASGTNLSYLAEPSDFSAIPDALVVVSFKNLQKKDATTKGRALEELLVYAQDHPFEKDGGVGDPVLEAWVQSYPRISIDNSRRVRELSHILQLELMKSARKRMEKNVPRVVGSWLAGTFDKDRAVSRAATEGLSSFLTTPEKVVQFWKRCQQQILDYASDAIKETTDTLSDQRSTNADDAEAKYSRVIAGSLALVLNLLQRLEPVDIEKCLDTYDQFFENDKVWASAVANDPNVRRLSSQLLLICIERRPDRIEADLTRLSKVFISEGLKSDQTGSVVDFLNAVKALTAKFPTAWTSDYKGKKSPLSRLKLFMESGSYGGPAKYWTTLSELTSLLPTGILPTDFDGALDTMKAMRKGVTGRDELRGNAVDGWTAYLSLARHFLREAQSSDTRVSLAQETIFPLIEHYLFPSPDTSIWSSGSQVQILIKAYTSTTTLAFEDLVDATLSDWIRLKNKMVDHLRNSLPEASKEHQKSQGAVADEGWRWFSLTGTILDAHEKTATGDRPIPDIPAEPSVEILREAVQLLEKRDWKPFGAASVVESAIRQAPLLFRTISRTKSIFTHLETALVQGQIDFLKSSSAPYIVSSITLLGQIPEQVSTFEQMWKSSISAVMQGLEGAEVIKILGKLISSSQTAALAQEMNPLQTELIRRCLICAVGTPGPNWDFFTNVITFGALNEVSSKRLVKELTSRVASSTGVPNQGIVKGLQVIAQTRPDWLSKDEGLYMSLMTSLLSLSEKPGVGPEVAMLQLYLENATHKGSSVQALIQQNINSLGPQSLSVETLAQQAIQIQSSVVQPQQDSAISSNLASLLPDSTIWRQQLSGLLEAIPNPSLALTNSLGGSCFLLSNTSMPSSTELDRDYRGCSVPGRMAMYMSKLILSGFPFALVDLPLRIKILINLSLTAELASDQLTVMNENQVWSSLSSRENLSDCEDLVASVRKLVIDLTGSAPKWQDGSGIDNSQLVSIIINELVQEAQSLSPLGFYCGRVLNVFIQALTEKHGFPSSGEKWLTDLNVLKASPTAVFPAVAILVGLGETISTSRVVSTFCNRLVSEIPDAKLGQEKSLATLVLLNACMQLYDTGELPVANNRLVFAVRQITSWLETPEEVDFRFATEACKALHRLFPCVKHVYGSYWETAIAFCIYTWTKVTDDSLDSRLPLIHSSLRLVSTLQSLDEPNDDLIDAIETSTEGRSAALINLLQLPRERHTQPLDIVDSIICRQVEKLSLHHVHDLSDLYHLIASDFRPIQTAAFNILHKAIPAEVEKISVDVLLEKRSAQLPDELLSLLLDAPTLELYPDEILLKFPTPVRAYLLSWHLIFDAFRAASFKVRGDYTEILKAENYMGPLLDFMFDVLGHSAAHGLSLDRSNFDTEHIRNYDLKLAESESEERNMQWLFIHLFYLILKYVPGLFKTWYIGCRSKQTKIAVEAWTARYFSPIIISEALDDVENWNNSQEAPADDEKELIVKVSRTAKEVVAGYEVDELNASIAIRIPPEFPLETVTVVGINRVAVNEKKWQSWIMTTQGVITFSGGNIIDGLTTFRRNVVGALKGQSECAICYSIISTDKKMPDKRCQTCKNLFHRTCLYKWFQSSSQNTCPLCRNPIDYLGADTKARR

SEQ ID NO: 8406 - DNA, 5568 bp, Muscodor strobelii; identical to SEQ ID NO: 8403
  misc_feature: SGI EST ID NO. CUFF.20408.0
  misc_feature: Variant of the nucleotide sequence at SEQ ID NO 8404

SEQ ID NO: 8407 - DNA, 702 bp, Muscodor strobelii
  misc_feature: SGI cDNA ID NO. 562585
  misc_feature: Encodes the peptide sequence at SEQ ID NO 8408
atgcaactgtattcgctctccgagaacttaagagatcaagatgaacgagcgttgcgaaagtactgtgctgtttccaacaagaacatcaacgagctaaatattatcagagcagaacatcccccagccgagataccgacaccaccggtttacagcaacgaagccagtgaagacagcgaggagttctgggcaggctacggggtatttcgaggtccacgaccaccatatttcccacaaagtgacgatagtaccgttatgccccagcatgttctcaaaattcccgaaatactgcgcaaatcacgtcgcctaccatatttaccgcctacgatcttagcctcgacatttggtgccattctccgtaactacaatgaagtcctaaagctcatagctcgctacgagaggtggcacggccgggatgttttcggtttctggaccaaagaagagatagctctcgtcaaaagccaccaagcaccaccagcgcttgctgacgcagacgggctatgtccatccattccacctcgcgttcttgattatgcatttagtgatgtgttgcgcgcaacgcctctcttgagcaatttgattgatcgatatcacaaagaccgtggtcttgagttcttcggatttttgggccctgattttgttgatccatggccgagagaaccagaggataggcctcctggacatgatgtacgatggctatggtaa

SEQ ID NO: 8408 - protein, 233 aa, Muscodor strobelii
  misc_feature: SGI Peptide ID NO. 562585
MQLYSLSENLRDQDERALRKYCAVSNKNINELNIIRAEHPPAEIPTPPVYSNEASEDSEEFWAGYGVFRGPRPPYFPQSDDSTVMPQHVLKIPEILRKSRRLPYLPPTILASTFGAILRNYNEVLKLIARYERWHGRDVFGFWTKEEIALVKSHQAPPALADADGLCPSIPPRVLDYAFSDVLRATPLLSNLIDRYHKDRGLEFFGFLGPDFVDPWPREPEDRPPGHDVRWLW

SEQ ID NO: 8409 - DNA, 1023 bp, Muscodor strobelii
  misc_feature: SGI cDNA ID NO. 562586
  misc_feature: Elevated expression when VOC is produced
  misc_feature: Encodes the peptide sequence at SEQ ID NO 8410
atgcagcagcgacattacgaggaagaaatgagacatatgaacgatccacacgggtactgggagggtgatgagatgggcttagacctctgtactccctcagctgaggacttcgacgaggacatctctgagctgggcggtcatggtgcatgcttttgcgtgccaagtgatccgcagtgctactgcggagtcttcgagtacggctacgacgacgacgatgacagggacgaggacgagtgcatgtgcgacacacgggaaaatccactcgacatcgaagaagatctcgacgaattcggccgtgatcttttagagtattaccaaacgtggactaagcttcgcgatattcgcaaggtgcaactcgaaggcgatgcaggggtgaaccgtcgccgcatgcgatggaagactgactgggatgcggtggtggggaggagaacacaggagccagactccttcgatgataccagcaatatagggcggccgcctctcacgatggcttcggggcgtggaggctatctcatacctcttgtaccaatacaaaacggcattttcgatctcttcacagaaaaagagtatctcatgatttgcaaagatcagccgctggccaatctcagaacgagcgagaagttcatcgagatcttaggaactgaccaaagctcgagaggtggaggagagacacacgccgttctcacgctgcctcctggcttgaaaaccactgtgccaccccttaaaatcacttatcatcccgagaacatatccaacaaacgtgttttacgcctcgatgctggtaaggtaggtacgattgaatttgtccgccataattatatcaaggtggaactatcttaccagaacgggcgcttcaataatctcatgggcgttcgaagagtcacagtgtccagggatttgaggcctgagatgccgaacacgaaagacgaagctgagttcggcgtgggagaagatgacacagacgacgatcctgacgacgatactgaagatgataccgaagacgatcctgacgacggatactga

SEQ ID NO: 8410 - protein, 340 aa, Muscodor strobelii
  misc_feature: SGI Peptide ID NO. 562586
  misc_feature: Useful for introducing or modulating the production of volatile compounds
MQQRHYEEEMRHMNDPHGYWEGDEMGLDLCTPSAEDFDEDISELGGHGACFCVPSDPQCYCGVFEYGYDDDDDRDEDECMCDTRENPLDIEEDLDEFGRDLLEYYQTWTKLRDIRKVQLEGDAGVNRRRMRWKTDWDAVVGRRTQEPDSFDDTSNIGRPPLTMASGRGGYLIPLVPIQNGIFDLFTEKEYLMICKDQPLANLRTSEKFIEILGTDQSSRGGGETHAVLTLPPGLKTTVPPLKITYHPENISNKRVLRLDAGKVGTIEFVRHNYIKVELSYQNGRFNNLMGVRRVTVSRDLRPEMPNTKDEAEFGVGEDDTDDDPDDDTEDDTEDDPDDGY

SEQ ID NO: 8411 - DNA, 3562 bp, Muscodor strobelii
  misc_feature: SGI EST ID NO. CUFF.20481.1
  misc_feature: Variant of the nucleotide sequence at SEQ ID NO 8409
tgctgtacttgcagtccaaataccgctagaaagacttcatatacagatgagtttgcaatattcagagtttctaaacagctgactgttttgcatcaaggacgactggacgcagccgaaaccagatcgttgcagatggcttgaagatagacagcttcggtcagcaatactacctggtttgctactcgcgtgctttccccggaaacccatttgccctataaggctgcagatgcagactgcagatgtaatcagccttgtcaaacaacggctgccagggtaagccgacggtgcccgaaggtaggaggataagtgacgagatgatctagcatggggcccgctccaggctacgcgcctgccttttaatttagacgttggatgcaaaacgatacggctgattatttcagagctctacacgtttagaagatcgatgagagcgatcacggcagaatggcgtgggtatcgacaccttctttctgatccttcaacatgctttgccttagctaactacccgtttttgaagatgtaagaatacttgcccagcagacgcagcccccggtccactttcacacatcactccgttacgaagtagttgacactatcagtctcacgacactccgctgctgtgcgagacgcttgtccagattctagctgcatgcgttatcctaggcgctcacattcctgcgccgatcatctgttgaggttggactcggttgcaaagcattcgaccccgtcatacgattaacacaggtcctgtatgatgcctttttggattgatcatggcatactatcaaactgcctgtcgtgtgtatagggttggatggcgatatcgactacatttcagcgtaaagacaaggcggtaatacccaatgtatacaatcgttctaacgtcttactgactacatgtttccgaaaaaggggcaataaatttctaggtacggacaacgacagcaacaacacattgggcatctctttttttttccagaaaaataggaaaagacaataattgagggatgacaaaaactaaacagccacccctgtcctgagattgagctcaggccattaggtgaaagggaaggcacggatgcctccctcgaccatcatgccagatccgactacgtaggcagccacggtggcaagcgtcatcgactgggtgtctgcatacagacttgtcacacactagaataaaagttcttacagggccccttcatctcccaagacttagctcggatactgtgatgttcctagaagacacaggattgcaatgacgatagtctatgtggcctcggaagccacggggaaacataccatctcgacggattaaattaaggcatctcgaacagtctatatggcatgagcttatataacctggagcgattaagcctgatttttactcagccagaaatgaatattcaggcgataagacgttggtacatgactccgaattatcctacgaagcagcgtaccgggacgaggcgtcctacatcccgtgttagcctacatcctgctccgaggatcccgtgttcgttcccccttattcccggatcctgtctcgcccacggaggcttcattaaggcattccctcccatctcttgccttgattgatacattctagtgctagagcaactattgaatacatttgaggggttaaaatgcactgcttctaggacgacggtctccgatactgagtctgagcgagatggttctgtgcttcaatatccgagtcctagccttagtagaggttgaggccctagactagatttcaaacaaggcatttaaatccgcatgccctcttaggttgtaccggtactttcctctcccgttccacgtttttttcttttttgaatcctgaaccaagccgacaagctggaataccccttgcaccgcacggtctgtcagatggtatagagtcataacccatgcaatcgataacatctgaagatcaagcggtcagcaggttgacgtacttcttaattcttggttttctccattattttcatattacatggcacgcagctcattttggttgacggttaaagctcgtgttgagaatcatatgtagcgccattttcgcctagttgcaggttcgtccgttactagaaatgtctcaacgatggagaagagagtttccggagtggttctcgcggcttcacgacgacatgcagcagcgacattacgaggaagaaatgagacatatgaacgatccacacgggtactgggagggtgatgagatgggcttagacctctgtactccctcagctgaggacttcgacgaggacatctctgagctgggcggtcatgcaagtattttttgtttcagttcacaattctcggcacgggcttggaaactctagaatataattatttacttccagactacgatgaacaagaaaagggactgatatgttttcatcaactaggcatgcttttgcgtgccaagtgatccgcagtgctactgcggagtcttcgagtacggctacgacgacgacgatgacagggacgaggacgagtgcatgtgcgacacacgggaaaatccactcgacatcgaagaagatctcgacgaattcggccgtgatcttttagagtattaccaaacgtggactaagcttcgcgatattcgcaaggtgcaactcgaaggcgatgcaggggtgaaccgtcgccgcatgcgatggaagactgactgggatgcggtggtggggaggagaacacaggagccagactccttcgatgataccagcaatatagggcggccgcctctcacgatggcttcggggcgtggaggctatctcatacctcttgtaccaatacaaaacggcattttcgatctcttcacagaaaaagagtatctcatgatttgcaaagatcagccgctggccaatctcagaacgagcgagaagttcatcgagatcttaggaactgaccaaagctcgagaggtggaggagagacacacgccgttctcacgctgcctcctggcttgaaaaccactgtgccaccccttaaaatcacttatcatcccgagaacatatccaacaaacgtgttttacgcctcgatgctggtaaggtaggtacgattgaatttgtccgccataattatatcaaggtggaactatcttaccagaacgggcgcttcaataatctcatgggcgttcgaagagtcacagtgtccagggatttgaggcctgagatgccgaacacgaaagacgaagctgagttcggcgtgggagaagatgacacagacgacgatcctgacgacgatactgaagatgataccgaagacgatcctgacgacggatactgacatgggcgacggctacctgctccctttgtttggttatgtatgagtttgagtgcttctgattgctttgatatcggaggaattgagaattgcggagtgtaacgcaaagcgttcaaagcaaactggtctttcgtatacggcacggtcgtctgttttctacatagtgatctggttggtttggaagtatggctctcaatcaagtagttgaagagcaccgatgcatatgtaataagagagtagcatacgaatatcagttcaatacgtcagattgg

SEQ ID NO: 8412 - DNA, 687 bp, Muscodor strobelii
  misc_feature: SGI cDNA ID NO. 562587
  misc_feature: Elevated expression when VOC is produced
  misc_feature: Encodes the peptide sequence at SEQ ID NO 8413
atgccacgctacatagatactctgccaacacctcaagttgtcaaacccaagaaactgattgttctaagcgctcctcgaaccggtacacatggcttatatcttgcgctgaaacagctcggataccggccataccacatggtcgaggttttagcgggtggtgttccttcagtcaaactcttgctcgatggcataaaggccgaggtattccacgaaggcaaagcatacactcgcgaggacttcgaaaagtggttcgcggactacgactcgaaggtcttaatcgagatgccgtacttcatgaaccgggatttcatcaattaccactttgataattgggccactcattttggttatttcgccgacggcttggagaaatacgccacaaaaggctatggtatgacggacgaaggccgcgaacagcttatcgaacactataagaactacatcgaggaggtgaagcgaattgtgccgcctgatcaattgaagtggaaagatatctgcccgtacatcgatgaaccaataccggatacgccgtggccttcattgaacgcacctgaagaatttcgcaagatcgtcgagcctcatttcctaaaggctgttaagagaggcgcggctggtgtcggatccatcgtggccgtcgcaggtgttgctgcttggtattttctcaagtactggaatatccaagcatga

SEQ ID NO: 8413 - protein, 228 aa, Muscodor strobelii
  misc_feature: SGI Peptide ID NO. 562587
  misc_feature (1)..(225): NCBI GI: 159123570 Blast Desc: conserved [Aspergillus fumigatus A1163]
  misc_feature (1)..(225): NCBI GI: 119485288 Blast Desc: NFIA_099130 [Neosartorya fischeri NRRL 181] gi|119410332|gb|EAW20279.1| conserved [Neosartorya fischeri NRRL 181]
  misc_feature (1)..(104): NCBI GI: 115395360 Blast Desc: [Aspergillus terreus NIH2624] gi|114193074|gb|EAU34774.1| [Aspergillus terreus NIH2624]
  misc_feature (1)..(218): NCBI GI: 145230489 Blast Desc: An01g11410 [Aspergillus niger] gi|134055671|emb|CAK44045.1| protein product [Aspergillus niger]
  misc_feature (1)..(210): NCBI GI: 225683104 Blast Desc: conserved [Paracoccidioides brasiliensis Pb03]
  misc_feature (36)..(217): NCBI GI: 255951236 Blast Desc: Pc22g24970 [Penicillium chrysogenum Wisconsin 54-1255] gi|211593402|emb|CAP99785.1| Pc22g24970 [Penicillium chrysogenum Wisconsin 54-1255]
  misc_feature (1)..(210): NCBI GI: 226288430 Blast Desc: conserved [Paracoccidioides brasiliensis Pb18]
  misc_feature (1)..(221): NCBI GI: 226283519 Blast Desc: conserved [Paracoccidioides brasiliensis Pb01]
  misc_feature (3)..(187): NCBI GI: 256723179 Blast Desc: NECHADRAFT_94150 [Nectria haematococca mpVI 77-13-4]
  misc_feature (1)..(221): NCBI GI: 261188911 Blast Desc: conserved [Ajellomyces dermatitidis SLH14081] gi|239591872|gb|EEQ74453.1| conserved [Ajellomyces dermatitidis SLH14081] gi|239609147|gb|EEQ86134.1| conserved [Ajellomyces
  misc_feature: Useful for introducing or modulating the production of volatile compounds
MPRYIDTLPTPQVVKPKKLIVLSAPRTGTHGLYLALKQLGYRPYHMVEVLAGGVPSVKLLLDGIKAEVFHEGKAYTREDFEKWFADYDSKVLIEMPYFMNRDFINYHFDNWATHFGYFADGLEKYATKGYGMTDEGREQLIEHYKNYIEEVKRIVPPDQLKWKDICPYIDEPIPDTPWPSLNAPEEFRKIVEPHFLKAVKRGAAGVGSIVAVAGVAAWYFLKYWNIQA

SEQ ID NO: 8414 - DNA, 5495 bp, Muscodor strobelii
  misc_feature: SGI EST ID NO. CUFF.20582.1
  misc_feature: Variant of the nucleotide sequence at SEQ ID NO 8412
tgaaaagtaactaacgcgacacctttctggctaccagactttgataattgggccactcattttggttatttcgccgacggcttggagaaatacgccacaaaaggctatggtatgacggacgaaggccgcgaacagcttatcgaacactataagaactacatcgaggaggtgaagcgaattgtgccgcctgatcaattgaaggtaagtccgcattctgtttgagttacttgtattgactcgcgactgtgctctttattagggtttgcagactagaagagggattcggatggaaagatatctgcccgtacatcgatgaaccaataccggatacgccgtggccttcattgaacgcacctgaagaatttcgcaagatcgtcgagcctcatttcctaaaggctgttaagagaggcgcggctggtgtcggatccatcgtggccgtcgcaggtgttgctgcttggtattttctcaagtactggaatatccaagcatgaccatcacacaacgtcttgcgtctgagttattgagttggagaaacaggcgctttgaagtatctggagagatgattaggtggtggaagatacggatttggtattaaagcttacctgcgacgcgctcggtctcagtgtgctactatactgtatcaaggacacaatgatatcacgaaagccgttgtcaacaccaggtagtatatcatcccatgaattcgtctcaaagaatcgatacatttcaaagggcggcgtcttgaagtgagcagcctctggccatgaatcgcgtgtaggacttccaagggttttgaaaatactcagaatcaacccgagctgatttccatcttcgtgagctgcccgtgactcgaataacggcttgtttggagtgcgacaacattctgcaagcatggcgccagcggcccacatatcaacggctggaccgtatgacttgtctccgaagagagcttccggtgcacggtaaggaccggttccgatatctagtatcttctggtctgccggttctgtataaacggacatctcaggatgccatgccgtaccgaaatctgacagatatgccggcccatctgctgacttcagcaatactgctgaaggtttgacgtctcgatgaatgatcccacgactgtgtaaaaagtccaaggcggtgaagaggtctttgaaatgactcgtagtccgagtatgagagatagagccttgacaaatgagggtatcaagactcaggggcatatatggaaaggcaagaacaaatcgttgttcttggtctcgaaaagtctctagaagaggaatacatggcgatttcaatgactggaggatcttggcttctctagtggggttatgaggctcgatgttacgagtctctacgatgaccttcagtgccattgttttagatctgtacacttcagcagtcacgcctgatgcgacataatgacagtcttgatactgccctattctgatcgctggcgagtctagtatagtctccggagagtggggtttcaattccgtggggtcactatgtgagcgttttaaaggcaagttttggcaggctgcatcgtattgactctatatactgtgaatattgcgcacatatatatctagtgggagataggtggcagaatttgatcggagtacaaagacaacataagtaccagaaagccatgagcatgatacagggagtagggctgcctaccctagatgatgatgtcttgtaagcgtcggtctcgaatgcgaatgcgtccttttgcgcatcagcagctgataaatttgtgccctgaagaagagctttcctacaacaatatcgtgagcaacgcgaaaggtgaatgcctatattttgcagagcttacagggcttggatattgttatatcggtcgagtgaggtcaactcagcccgccagtcggactgcgacgccatggataaagcagtaagctctagtaagatgaaggcagttccgaaaataatctaaatctcgccaagccgatggaagacttaggtacatgatataatgtaaacttcaatactctcccctgatagtatggcatacctaggtaagtaacggaccgtcgagaatgggacacagctggctgtcgagacatgtggtcatcggcgactgtttcatccccactgacggcccgacgatggtggcgttgatcgggcaattagttagtcgagtttggcagttcaggctagctgaaagatttccaaattgaaaggctgggctctgacctcataagtagctcagctactgctaactagtttgacttggagttaccctagaagacatagagtaaccttattacgagaggtttccactttgtgaacccatctgaacccgtcgcagcccccaagtggaagctcgttcggaagtcatccggtgactcttggttgctgtcttcgagtcccaatgtcttgaacctccatgtcttgactcttgaccacccacaaccccaacccccaacccccaaccctcaattgtatctatacagaccagacatccaatgcatatctgacgtacatactgctgttttgtcgagcgccctccatcgttttgcattgtcatcgtccgttgtctttcgttccgagcagctcctcatgtacaaatagcctcttgcataatccttccaaacacatcgtcgcatacgccgcccactccttctacggccccgagagcttcattgctcccctcctccatgtctgcatgatcctcgtcagctttgttcgccatggaagacctctcgagagctgaatatcctgccatgctggccagcctccagcccaaccaggccgtccaagtcctcaccgaacgtgtcaagcgcatatctagactcaacaccgagattgccgactggctccaagagcgtcggagagtcgaagaacagtatgcccagggcctgcggaggctcgcccagttccgagtgcccaatgcgcaatccgagctgggcactttccaagtccagtgggacaagatcctctcctccgccgagtccatcgccacgtcccaccatacctttgcctcccacatcgagaaggaagtcgagaccccgttgcgcatgttcgaggcccgaaaagagatgcagagcatgcagaccgtgtcggcgaacttgcagaaagtagcccgcgaacttgaggaggcccaggaaaagtcggacaagctcagcaagaagggcggcaaggctagcgcccagaaggtcgaccaggccgcggcaaagctcgaggccgccacgggtcaatgggagtcgcaagctccctttgtcttcgaaagcctccaggccctggacgagacacgcttgaaccaactgcgcgactgtctgacacagtatggcactttcgaaggcgaacaggcgcagcgaaggcagaccgactccgaggccgtactgaacaacttgctggactacagcaccagcgccgagatccaattctttgcttccaaagtcaccgccgggaagcccaagatcgagaggcggccgacggcaccggcgccagcgacgcgacagtcctcgagcgccggcgctccgagctcgaccaccccagccccgcccagcatcaatttgcccgtcgaggacgatcgcagtgactattcgggaccaaaagaggctccgacaccagcgcccgcgcccgagaacaaactgcgcagccgtattggtactatgctgggacgtcggcgacagagcattcacggcggcttcggccaattgtctccgaataaaggtcctttcggtaaaaccactagaggtggccacggcttgtcgcctagagcatcttcgagcaacttaggcgactctacgaatagactgggcgcattagctgaggatcccgcggggacatcacccgaggcttctgagcccaaggagaaatcgagttacgatggccctaacgggatcggaaggggtagctctgccgaggcagcacggcccacgactagtacaaccgttgtttctcaggtaaatggaggacctgcttcgatagacgtcctggatgtgccgccgccaccgggacctcctccgtcgcaaaaagagcccgagaaagatgccgaaggttttagtgtgccagcaccagcaaacgatcctatctcgcaggcgcaaagagaagcagcagcccaagacactgagcaggccttcaagctcaacattcagaaggagccggtggctgaagaagacgaggatgccaagaaagcagcactttcgaatgttgccaacagtctatcagctctgggtgcgcctgcacggcgaacgggcactatccgtggtcgcagagatgtgcgcaacaccatatatgttcccaatccggtatccgaaaactcaactgccagctcatccttcactccctctctgcctactactttctccaaatcagcgaccataaacactttagcttccgagtcaagtgtggcaggaacctctgacactcagtccattcgctcggcgaactcgttgaatagcgttgtgccagcgaagcatccggaaatgcatcagccaggtctcaattcgtctcttatggaaacaatatcggctaccttcgagggtggtgccgtaaagtcagtgaaagtcaatggcgagattgccttctcgttcaaccctggcgaagaccctaatccaccttcacaactgtctgtccgtattaataacttctcggttctcgagtcaatcggaccaaatagaatatttgtcaccaacagcacagaccatccggatcaattcacattagatacacaccatgttcaaaaaaccaacattgcattctcctacaagttccacgttgatgagacttcattaccaactgaacacgttcctatcctcattaaccctgcttggaaaccccagggcgataaactagggctactattacagtacaagctgaacccagatttcatgttcgcgaatatcggatcatccccagtacagattcacaatctagttctcttcgctacgtacgaaggcagggcgtctggcgcccagaccaaaccgtcaggcacgcatttgaaagatcggcatcttgtatattggcgtcttggagatgtatcactgtcgcccaatgcggattggcagaagattgtttgccgtattgtgggagaacagggcgcagagccgaaaccggcaaatatcgaagcaaggtgggaattcagtccgccgccagatgtcgaaaacagtcgcaccgtctcggtctcaaaattggaggaagctaagggcaaggaagtagaaggaggttatgaggatccgttcgcagacgctgcctcatcggggccggaaggaagatgggtggaagtgcctgcggtccgaaagttcttgagtgggaagtatgaagctaaataaatattttaggggcataggcgaaatgcatctttcttgttgatatttgctcatggtcaaggcattgtgatagtcgatataaaagaatggtttcttcttgttatcatccttacataccaaaatttgaggaccttgctctatacattacttacttgggtgccgaccatcacaatgagggtacctgcctacatt

SEQ ID NO: 8415 - DNA, 1182 bp, Muscodor strobelii
  misc_feature: SGI cDNA ID NO. 562588
  misc_feature: Encodes the peptide sequence at SEQ ID NO 8416
atggcgtcgcagtccgactggcgggctgagttgacctcactcgaccgatataacaatatccaagccctgaaagctcttcttcagggcacaaatttatcagctgctgatgcgcaaaaggacgcattcgcattcgagaccgacgcttacaagacatcatcatctaggagtcaatacgatgcagcctgccaaaacttgcctttaaaacgctcacatagtgaccccacggaattgaaaccccactctccggagactatactagactcgccagcgatcagaatagggcagtatcaagactgtcattatgtcgcatcaggcgtgactgctgaagtgtacagatctaaaacaatggcactgaaggtcatcgtagagactcgtaacatcgagcctcataaccccactagagaagccaagatcctccagtcattgaaatcgccatgtattcctcttctagagacttttcgagaccaagaacaacgatttgttcttgcctttccatatatgcccctgagtcttgataccctcatttgtcaaggctctatctctcatactcggactacgagtcatttcaaagacctcttcaccgccttggactttttacacagtcgtgggatcattcatcgagacgtcaaaccttcagcagtattgctgaagtcagcagatgggccggcatatctgtcagatttcggtacggcatggcatcctgagatgtccgtttatacagaaccggcagaccagaagatactagatatcggaaccggtccttaccgtgcaccggaagctctcttcggagacaagtcatacggtccagccgttgatatgtgggccgctggcgccatgcttgcagaatgttgtcgcactccaaacaagccgttattcgagtcacgggcagctcacgaagatggaaatcagctcgggttgattctgagtattttcaaaacccttggaagtcctacacgcgattcatggccagaggctgctcacttcaagacgccgccctttgaaatgtatcgattctttgagacgaattcatgggatgatatactacctggtgttgacaacggctttcgtgatatcattgtgtccttgatacagtatagtagcacactgagaccgagcgcgtcgcagatacttcaaagcgcctgtttctccaactcaataactcagacgcaagacgttgtgtga

SEQ ID NO: 8416 - protein, 393 aa, Muscodor strobelii
  misc_feature: SGI Peptide ID NO. 562588
  misc_feature (96)..(382): Pfam Id: PF00069 Pfam Desc: Protein kinase domain
  misc_feature (134)..(382): Pfam Id: PF00069 Pfam Desc: Protein kinase domain
  misc_feature (2)..(388): NCBI GI: 261352571 Blast Desc: serine/threonine-protein kinase csk1 [Verticillium albo-atrum VaMs.102]
  misc_feature (7)..(375): NCBI GI: 40882194 Blast Desc: related to cyclin-supressing protein kinase [Neurospora crassa]
  misc_feature (10)..(385): NCBI GI: 164429427 Blast Desc: NCU04426 [Neurospora crassa OR74A] gi|157073474|gb|EAA28267.2| conserved [Neurospora crassa OR74A]
  misc_feature (6)..(376): NCBI GI: 256727909 Blast Desc: NECHADRAFT_46260 [Nectria haematococca mpVI 77-13-4]
  misc_feature (40)..(349): NCBI GI: 46120906 Blast Desc: FG04947.1 [Gibberella zeae PH-1]
  misc_feature (1)..(378): NCBI GI: 171691114 Blast Desc: protein product [Podospora anserina] gi|170945505|emb|CAP71617.1| protein product [Podospora anserina]
  misc_feature (6)..(283): NCBI GI: 145602436 Blast Desc: MGG_04905 [Magnaporthe grisea 70-15] gi|145010862|gb|EDJ95518.1| MGG_04905 [Magnaporthe grisea 70-15]
  misc_feature (15)..(382): NCBI GI: 156049967 Blast Desc: SS1G_07569 [Sclerotinia sclerotiorum 1980] gi|154691971|gb|EDN91709.1| SS1G_07569 [Sclerotinia sclerotiorum 1980]
  misc_feature (7)..(385): NCBI GI: 255937307 Blast Desc: Pc13g12640 [Penicillium chrysogenum Wisconsin 54-1255] gi|211584300|emb|CAP92333.1| Pc13g12640 [Penicillium chrysogenum Wisconsin 54-1255]
  misc_feature (6)..(392): NCBI GI: 67516835 Blast Desc: AN0699.2 [Aspergillus nidulans FGSC A4] gi|40746319|gb|EAA65475.1| AN0699.2 [Aspergillus nidulans FGSC A4] gi|259489028|tpe|CBF88962.1| TPA: cell division protein FGSC
  misc_feature (98)..(372): SWISSPROT Homolog: EC 2.7.11.22 Cyclin-dependent kinase
MASQSDWRAELTSLDRYNNIQALKALLQGTNLSAADAQKDAFAFETDAYKTSSSRSQYDAACQNLPLKRSHSDPTELKPHSPETILDSPAIRIGQYQDCHYVASGVTAEVYRSKTMALKVIVETRNIEPHNPTREAKILQSLKSPCIPLLETFRDQEQRFVLAFPYMPLSLDTLICQGSISHTRTTSHFKDLFTALDFLHSRGIIHRDVKPSAVLLKSADGPAYLSDFGTAWHPEMSVYTEPADQKILDIGTGPYRAPEALFGDKSYGPAVDMWAAGAMLAECCRTPNKPLFESRAAHEDGNQLGLILSIFKTLGSPTRDSWPEAAHFKTPPFEMYRFFETNSWDDILPGVDNGFRDIIVSLIQYSSTLRPSASQILQSACFSNSITQTQDVV

SEQ ID NO: 8417 - DNA, 4428 bp, Muscodor strobelii
  misc_feature: SGI EST ID NO. CUFF.20583.3
  misc_feature: Variant of the nucleotide sequence at SEQ ID NO 8415
ggtggattagggtcttcgccagggttgaacgagaaggcaatctcgccattgactttcactgactttacggcaccaccctcgaaggtagccgatattgtttccataagagacgaattgagacctggctgatgcatttccggatgcttcgctggcacaacgctattcaacgagttcgccgagcgaatggactgagtgtcagaggttcctgccacacttgactcggaagctaaagtgtttatggtcgctgatttggagaaagtagtaggcagagagggagtgaaggatgagctggcagttgagttttcggataccggattgggaacatatatggtgttgcgcacatctctgcgaccacggatagtgcccgttcgccgtgcaggcgcacccagagctgatagactgttggcaacattcgaaagtgctgctttcttggcatcctcgtcttcttcagccaccggctccttctgaatgttgagcttgaaggcctgctcagtgtcttgggctgctgcttctctttgcgcctgcgagataggatcgtttgctggtgctggcacactaaaaccttcggcatctttctcgggctctttttgcgacggaggaggtcccggtggcggcggcacatccaggacgtctatcgaagcaggtcctccatttacctgagaaacaacggttgtactagtcgtgggccgtgctgcctcggcagagctaccccttccgatcccgttagggccatcgtaactcgatttctccttgggctcagaagcctcgggtgatgtccccgcgggatcctcagctaatgcgcccagtctattcgtagagtcgcctaagttgctcgaagatgctctaggcgacaagccgtggccacctctagtggttttaccgaaaggacctttattcggagacaattggccgaagccgccgtgaatgctctgtcgccgacgtcccagcatagtaccaatacggctgcgcagtttgttctcgggcgcgggcgctggtgtcggagcctcttttggtcccgaatagtcactgcgatcgtcctcgacgggcaaattgatgctgggcggggctggggtggtcgagctcggagcgccggcgctcgaggactgtcgcgtcgctggcgccggtgccgtcggccgcctctcgatcttgggcttcccggcggtgactttggaagcaaagaattggatctcggcgctggtgctgtagtccagcaagttgttcagtacggcctcggagtcggtctgccttcgctgcgcctgttcgccttcgaaagtgccatactgtgtcagacagtcgcgcagttggttcaagcgtgtctcgtccagggcctggaggctttcgaagacaaagggagcttgcgactcccattgacccgtggcggcctcgagctttgccgcggcctggtcgaccttctgggcgctagccttgccgcccttcttgctgagcttgtccgacttttcctgggcctcctcaagttcgcgggctactttctgcaagttcgccgacacggtctgcatgctctgcatctcttttcgggcctcgaacatgcgcaacggggtctcgacttccttctcgatgtgggaggcaaaggtatggtgggacgtggcgatggactcggcggaggagaggatcttgtcccactggacttggaaagtgcccagctcggattgcgcattgggcactcggaactgggcgagcctccgcaggccctgggcatactgttcttcgactctccgacgctcctgaacaagaatcagttagtggcggcgatgagaagcaggcgaggatgaagccgtacttggagccagtcggcaatctcggtgttgagtctagatatgcgcttgacacgttcggtgaggacttggacggcctggttgggctggaggctggcctgcagacgatggcgaggttagcgatgggcagaggattagcatggtgatgcgagatggatgcgcgcaccagcatggcaggatattcagctctcgagaggtcttccatggcgaacaaagctgacgaggatcatgcagacatggaggaggggagcaatgaagctctcggggccgtagaaggagtgggcggcgtatgcgacgatgtgtttggaaggattatgcaagaggctatttgtacatgaggagctgctcggaacgaaagacaacggacgatgacaatgcaaaacgatggagggcgctcgacaaaacagcagtatgtacgtcagatatgcattggatgtctggtctgtatagatacaattgagggttgggggttgggggttggggttgtgggtggtcaagagtcaagacatggaggttcaagacattgggactcgaagacagcaaccaagagtcaccggatgacttccgaacgagcttccacttgggggctgcgacgggttcagatgggttcacaaagtggaaacctctcgtaataaggttactctatgtcttctagggtaactccaagtcaaactagttagcagtagctgagctacttatgaggtcagagcccagcctttcaatttggaaatctttcagctagcctgaactgccaaactcgactaactaattgcccgatcaacgccaccatcgtcgggccgtcagtggggatgaaacagtcgccgatgaccacatgtctcgacagccagctgtgtcccattctcgacggtccgttacttacctaggtatgccatactatcaggggagagtattgaagtttacattatatcatgtacctaagtcttccatcggcttggcgagatttagattattttcggaactgccttcatcttactagagcttactgctttatccatggcgtcgcagtccgactggcgggctgagttgacctcactcgaccgatataacaatatccaagccctgaaagctcttcttcagggcacaaatttatcagctgctgatgcgcaaaaggacgcattcgcattcgagaccgacgcttacaagacatcatcatctaggagtcaatacgatgcagcctgccaaaacttgcctttaaaacgctcacatagtgaccccacggaattgaaaccccactctccggagactatactagactcgccagcgatcagaatagggcagtatcaagactgtcattatgtcgcatcaggcgtgactgctgaagtgtacagatctaaaacaatggcactgaaggtcatcgtagagactcgtaacatcgagcctcataaccccactagagaagccaagatcctccagtcattgaaatcgccatgtattcctcttctagagacttttcgagaccaagaacaacgatttgttcttgcctttccatatatgcccctgagtcttgataccctcatttgtcaaggctctatctctcatactcggactacgagtcatttcaaagacctcttcaccgccttggactttttacacagtcgtgggatcattcatcgagacgtcaaaccttcagcagtattgctgaagtcagcagatgggccggcatatctgtcagatttcggtacggcatggcatcctgagatgtccgtttatacagaaccggcagaccagaagatactagatatcggaaccggtccttaccgtgcaccggaagctctcttcggagacaagtcatacggtccagccgttgatatgtgggccgctggcgccatgcttgcagaatgttgtcgcactccaaacaagccgttattcgagtcacgggcagctcacgaagatggaaatcagctcgggttgattctgagtattttcaaaacccttggaagtcctacacgcgattcatggccagaggctgctcacttcaagacgccgccctttgaaatgtatcgattctttgagacgaattcatgggatgatatactacctggtgttgacaacggctttcgtgatatcattgtgtccttgatacagtatagtagcacactgagaccgagcgcgtcgcaggtaagctttaataccaaatccgtatcttccaccacctaatcatctctccagatacttcaaagcgcctgtttctccaactcaataactcagacgcaagacgttgtgtgatggtcatgcttggatattccagtacttgagaaaataccaagcagcaacacctgcgacggccacgatggatccgacaccagccgcgcctctcttaacagcctttaggaaatgaggctcgacgatcttgcgaaattcttcaggtgcgttcaatgaaggccacggcgtatccggtattggttcatcgatgtacgggcagatatctttccactgcagcgacgtaaatatcattagatgatatttatgagaacagagttgcggggtatagtggtcacagatggaagaaatggtcaagagatttactcactccgaatccctcttctagtctgcaaaccctaataaagagcacagtcgcgagtcaatacattaagcttctattggaagctcatgc

SEQ ID NO: 8418 - DNA, 2586 bp, Muscodor strobelii
  misc_feature: SGI cDNA ID NO. 562589
  misc_feature: Reduced expression when VOC is produced
  misc_feature: Encodes the peptide sequence at SEQ ID NO 8419
atggaagacctctcgagagctgaatatcctgccatgctggccagcctccagcccaaccaggccgtccaagtcctcaccgaacgtgtcaagcgcatatctagactcaacaccgagattgccgactggctccaagagcgtcggagagtcgaagaacagtatgcccagggcctgcggaggctcgcccagttccgagtgcccaatgcgcaatccgagctgggcactttccaagtccagtgggacaagatcctctcctccgccgagtccatcgccacgtcccaccatacctttgcctcccacatcgagaaggaagtcgagaccccgttgcgcatgttcgaggcccgaaaagagatgcagagcatgcagaccgtgtcggcgaacttgcagaaagtagcccgcgaacttgaggaggcccaggaaaagtcggacaagctcagcaagaagggcggcaaggctagcgcccagaaggtcgaccaggccgcggcaaagctcgaggccgccacgggtcaatgggagtcgcaagctccctttgtcttcgaaagcctccaggccctggacgagacacgcttgaaccaactgcgcgactgtctgacacagtatggcactttcgaaggcgaacaggcgcagcgaaggcagaccgactccgaggccgtactgaacaacttgctggactacagcaccagcgccgagatccaattctttgcttccaaagtcaccgccgggaagcccaagatcgagaggcggccgacggcaccggcgccagcgacgcgacagtcctcgagcgccggcgctccgagctcgaccaccccagccccgcccagcatcaatttgcccgtcgaggacgatcgcagtgactattcgggaccaaaagaggctccgacaccagcgcccgcgcccgagaacaaactgcgcagccgtattggtactatgctgggacgtcggcgacagagcattcacggcggcttcggccaattgtctccgaataaaggtcctttcggtaaaaccactagaggtggccacggcttgtcgcctagagcatcttcgagcaacttaggcgactctacgaatagactgggcgcattagctgaggatcccgcggggacatcacccgaggcttctgagcccaaggagaaatcgagttacgatggccctaacgggatcggaaggggtagctctgccgaggcagcacggcccacgactagtacaaccgttgtttctcaggtaaatggaggacctgcttcgatagacgtcctggatgtgccgccgccaccgggacctcctccgtcgcaaaaagagcccgagaaagatgccgaaggttttagtgtgccagcaccagcaaacgatcctatctcgcaggcgcaaagagaagcagcagcccaagacactgagcaggccttcaagctcaacattcagaaggagccggtggctgaagaagacgaggatgccaagaaagcagcactttcgaatgttgccaacagtctatcagctctgggtgcgcctgcacggcgaacgggcactatccgtggtcgcagagatgtgcgcaacaccatatatgttcccaatccggtatccgaaaactcaactgccagctcatccttcactccctctctgcctactactttctccaaatcagcgaccataaacactttagcttccgagtcaagtgtggcaggaacctctgacactcagtccattcgctcggcgaactcgttgaatagcgttgtgccagcgaagcatccggaaatgcatcagccaggtctcaattcgtctcttatggaaacaatatcggctaccttcgagggtggtgccgtaaagtcagtgaaagtcaatggcgagattgccttctcgttcaaccctggcgaagaccctaatccaccttcacaactgtctgtccgtattaataacttctcggttctcgagtcaatcggaccaaatagaatatttgtcaccaacagcacagaccatccggatcaattcacattagatacacaccatgttcaaaaaaccaacattgcattctcctacaagttccacgttgatgagacttcattaccaactgaacacgttcctatcctcattaaccctgcttggaaaccccagggcgataaactagggctactattacagtacaagctgaacccagatttcatgttcgcgaatatcggatcatccccagtacagattcacaatctagttctcttcgctacgtacgaaggcagggcgtctggcgcccagaccaaaccgtcaggcacgcatttgaaagatcggcatcttgtatattggcgtcttggagatgtatcactgtcgcccaatgcggattggcagaagattgtttgccgtattgtgggagaacagggcgcagagccgaaaccggcaaatatcgaagcaaggtgggaattcagtccgccgccagatgtcgaaaacagtcgcaccgtctcggtctcaaaattggaggaagctaagggcaaggaagtagaaggaggttatgaggatccgttcgcagacgctgcctcatcggggccggaaggaagatgggtggaagtgcctgcggtccgaaagttcttgagtgggaagtatgaagctaaataa

SEQ ID NO: 8419 - protein, 861 aa, Muscodor strobelii
  misc_feature: SGI Peptide ID NO. 562589
  misc_feature (10)..(100): Pfam Id: PF00611 Pfam Desc: Fes/CIP4 homology domain
  misc_feature (2)..(861): NCBI GI: 116195186 Blast Desc: CHGG_04191 [Chaetomium globosum CBS 148.51] gi|88180104|gb|EAQ87572.1| CHGG_04191 [Chaetomium globosum CBS 148.51]
  misc_feature (1)..(861): NCBI GI: 256728075 Blast Desc: NECHADRAFT_62621 [Nectria haematococca mpVI 77-13-4]
  misc_feature (2)..(861): NCBI GI: 171691116 Blast Desc: protein product [Podospora anserina] gi|170945506|emb|CAP71618.1| protein product [Podospora anserina]
  misc_feature (1)..(861): NCBI GI: 46120904 Blast Desc: FG04946.1 [Gibberella zeae PH-1]
  misc_feature (1)..(861): NCBI GI: 85085416 Blast Desc: NCU04427 [Neurospora crassa OR74A] gi|28918596|gb|EAA28268.1| conserved [Neurospora crassa OR74A] gi|40882193|emb|CAF06019.1| conserved [Neurospora crassa]
  misc_feature (1)..(861): NCBI GI: 261352694 Blast Desc: conserved [Verticillium albo-atrum VaMs.102]
  misc_feature (1)..(861): NCBI GI: 145602434 Blast Desc: MGG_04906 [Magnaporthe grisea 70-15] gi|145010861|gb|EDJ95517.1| MGG_04906 [Magnaporthe grisea 70-15]
  misc_feature (1)..(861): NCBI GI: 156049969 Blast Desc: SS1G_07570 [Sclerotinia sclerotiorum 1980] gi|154691972|gb|EDN91710.1| SS1G_07570 [Sclerotinia sclerotiorum 1980]
  misc_feature (1)..(861): NCBI GI: 154290050 Blast Desc: BC1G_15853 [Botryotinia fuckeliana B05.10] gi|150848471|gb|EDN23664.1| BC1G_15853 [Botryotinia fuckeliana B05.10]
  misc_feature (3)..(858): NCBI GI: 189191786 Blast Desc: conserved [Pyrenophora tritici-repentis Pt-1C-BFP] gi|187973838|gb|EDU41337.1| conserved [Pyrenophora tritici-repentis Pt-1C-BFP]
  misc_feature: Useful for introducing or modulating the production of volatile compounds
MEDLSRAEYPAMLASLQPNQAVQVLTERVKRISRLNTEIADWLQERRRVEEQYAQGLRRLAQFRVPNAQSELGTFQVQWDKILSSAESIATSHHTFASHIEKEVETPLRMFEARKEMQSMQTVSANLQKVARELEEAQEKSDKLSKKGGKASAQKVDQAAAKLEAATGQWESQAPFVFESLQALDETRLNQLRDCLTQYGTFEGEQAQRRQTDSEAVLNNLLDYSTSAEIQFFASKVTAGKPKIERRPTAPAPATRQSSSAGAPSSTTPAPPSINLPVEDDRSDYSGPKEAPTPAPAPENKLRSRIGTMLGRRRQSIHGGFGQLSPNKGPFGKTTRGGHGLSPRASSSNLGDSTNRLGALAEDPAGTSPEASEPKEKSSYDGPNGIGRGSSAEAARPTTSTTVVSQVNGGPASIDVLDVPPPPGPPPSQKEPEKDAEGFSVPAPANDPISQAQREAAAQDTEQAFKLNIQKEPVAEEDEDAKKAALSNVANSLSALGAPARRTGTIRGRRDVRNTIYVPNPVSENSTASSSFTPSLPTTFSKSATINTLASESSVAGTSDTQSIRSANSLNSVVPAKHPEMHQPGLNSSLMETISATFEGGAVKSVKVNGEIAFSFNPGEDPNPPSQLSVRINNFSVLESIGPNRIFVTNSTDHPDQFTLDTHHVQKTNIAFSYKFHVDETSLPTEHVPILINPAWKPQGDKLGLLLQYKLNPDFMFANIGSSPVQIHNLVLFATYEGRASGAQTKPSGTHLKDRHLVYWRLGDVSLSPNADWQKIVCRIVGEQGAEPKPANIEARWEFSPPPDVENSRTVSVSKLEEAKGKEVEGGYEDPFADAASSGPEGRWVEVPAVRKFLSGKYEAK

SEQ ID NO: 8420 - DNA, 5495 bp, Muscodor strobelii; identical to SEQ ID NO: 8414
  misc_feature: SGI EST ID NO. CUFF.20582.1
  misc_feature: Variant of the nucleotide sequence at SEQ ID NO 8418

SEQ ID NO: 8421 - DNA, 1965 bp, Muscodor strobelii
  misc_feature: SGI cDNA ID NO. 562590
  misc_feature: Encodes the peptide sequence at SEQ ID NO 8422
atgccttctattcgcgctgagacgccgtcatcggtaccggatcaagagacgatcgagtctctactcggtgagcgtaatgaattcaatagaaggacgaagtatatcaagcccttatgcgaactgacgccggaggagagacaacagacagaactcataaaactcggcaaaacgaagcataacatcatgggtgatccgtgcggcgtctgtttttatttcgctggcaatattgcgcactttcatgatcgacggatgcatgacgtactatcaccgatgtttggcaagctcaaagatctcgaagtccgtagatgcaacgagatcacaggcattcagagattgctgaaagcggttccctctttcgatcctgaaggtcttgccgggtttgtttcggatataggggcccagagtgaaatcctaaactacgaagtagtacggagtaatgagcatgagatcgagatctgttttgacgtagaacatcgtcgtgtcagaatcttgcagatactggaccttgacaagaacgacaaaaactcatacaccaacttcgagcgatctagagctgcagatggtcgtatgcaagctgtcttcgacgaaccacctttctctactgatctacaacaacatgtgatggcaacattgttgggagatagacaaattgagatgcctgacgagccgtccaaagcccggcgctatttgactcccttgagagcccaagctcaagaacagttttggctccacatgtctaaggccgaaagacaagaacttcgcgagacattttcatctacgggaaacgagacttatatgggcgacttacaagccatcaaggagaagtggcctaagagatgggacatgggaccttttgacccagaccaattccgtcaatatctggccgaccaaacagctaccgatcaagcctggacactcatcgaagatgaaatcttcattgttaccgatcgcaataaccggatcatcttcgcgaatattgagagcctcgcacgcatactctatggcgacgaagttcttgatttgatgttccgggctattgacatgtggtctcactacactccccttccagctcccggatcgaggcccaatgtcctttctgactacatccgcaagattcacccagagctagatatgtctaaggccactatcgagaatttacccaatgccaagatggcagttgcccattatggctgcatggctagctctgttgatccaaagggcggacatctccatctgaccgaagatacagagttgtcgcgatgtagatggcttactgactgtcgaaatctattccccgaatttgccacgtctgtcctcggcgcaacatccaacatcatacgcttcctcttcaaacccctcgatccagatcactacaccgattgtcgcaaaatcttcaccaatctcccaaacgaccgacgtctctcaacaggcgaagaagacttcttgagtttcttcacactcggcgtaaacgcccacacacaacgctatccatccgcagacgacatcgagggcggactagccggtctcctagcccgaggaaaatacaacggcggcgccctctgcattccccaactcggcctgaaagtgccatataaaccaggaacatgcgcactcatccggagctccatcctagaacactatgtctccgacttcactggcccgcgtttcaacattgtaggcacgaatcatgagtctgtcaagcggcatgcatacactaagatgggtcgccctctaccaccgctctctggtaaggaccaggaggactatgaattggacagcgaggatgatatgaatgagaaccccgatcctagagcgacctccattaacacagggagtgagtctttagatccggatcttgagatcactagtcgatggttgcatggcgttgaggcgttgggtgaggagactgattcagagggtgagaaggagtatggcgagttcgagctggagcatccttatcattga

SEQ ID NO: 8422 - protein, 654 aa, Muscodor strobelii
  misc_feature: SGI Peptide ID NO. 562590
MPSIRAETPSSVPDQETIESLLGERNEFNRRTKYIKPLCELTPEERQQTELIKLGKTKHNIMGDPCGVCFYFAGNIAHFHDRRMHDVLSPMFGKLKDLEVRRCNEITGIQRLLKAVPSFDPEGLAGFVSDIGAQSEILNYEVVRSNEHEIEICFDVEHRRVRILQILDLDKNDKNSYTNFERSRAADGRMQAVFDEPPFSTDLQQHVMATLLGDRQIEMPDEPSKARRYLTPLRAQAQEQFWLHMSKAERQELRETFSSTGNETYMGDLQAIKEKWPKRWDMGPFDPDQFRQYLADQTATDQAWTLIEDEIFIVTDRNNRIIFANIESLARILYGDEVLDLMFRAIDMWSHYTPLPAPGSRPNVLSDYIRKIHPELDMSKATIENLPNAKMAVAHYGCMASSVDPKGGHLHLTEDTELSRCRWLTDCRNLFPEFATSVLGATSNIIRFLFKPLDPDHYTDCRKIFTNLPNDRRLSTGEEDFLSFFTLGVNAHTQRYPSADDIEGGLAGLLARGKYNGGALCIPQLGLKVPYKPGTCALIRSSILEHYVSDFTGPRFNIVGTNHESVKRHAYTKMGRPLPPLSGKDQEDYELDSEDDMNENPDPRATSINTGSESLDPDLEITSRWLHGVEALGEETDSEGEKEYGEFELEHPYH

SEQ ID NO: 8423 - DNA, 1311 bp, Muscodor strobelii
  misc_feature: SGI cDNA ID NO. 562591
  misc_feature: Encodes the peptide sequence at SEQ ID NO 8424
atgcctgacgagccgtccaaagcccggcgctatttgactcccttgagagcccaagctcaagaacagttttggctccacatgtctaaggccgaaagacaagaacttcgcgagacattttcatctacgggaaacgagacttatatgggcgacttacaagccatcaaggagaagtggcctaagagatgggacatgggaccttttgacccagaccaattccgtcaatatctggccgaccaaacagctaccgatcaagcctggacactcatcgaagatgaaatcttcattgttaccgatcgcaataaccggatcatcttcgcgaatattgagagcctcgcacgcatactctatggcgacgaagttcttgatttgatgttccgggctattgacatgtggtctcactacactccccttccagctcccggatcgaggcccaatgtcctttctgactacatccgcaagattcacccagagctagatatgtctaaggccactatcgagaatttacccaatgccaagatggcagttgcccattatggctgcatggctagctctgttgatccaaagggcggacatctccatctgaccgaagatacagagttgtcgcgatgtagatggcttactgactgtcgaaatctattccccgaatttgccacgtctgtcctcggcgcaacatccaacatcatacgcttcctcttcaaacccctcgatccagatcactacaccgattgtcgcaaaatcttcaccaatctcccaaacgaccgacgtctctcaacaggcgaagaagacttcttgagtttcttcacactcggcgtaaacgcccacacacaacgctatccatccgcagacgacatcgagggcggactagccggtctcctagcccgaggaaaatacaacggcggcgccctctgcattccccaactcggcctgaaagtgccatataaaccaggaacatgcgcactcatccggagctccatcctagaacactatgtctccgacttcactggcccgcgtttcaacattgtaggcacgaatcatgagtctgtcaagcggcatgcatacactaagatgggtcgccctctaccaccgctctctggtaaggaccaggaggactatgaattggacagcgaggatgatatgaatgagaaccccgatcctagagcgacctccattaacacagggagtgagtctttagatccggatcttgagatcactagtcgatggttgcatggcgttgaggcgttgggtgaggagactgattcagagggtgagaaggagtatggcgagttcgagctggagcatccttatcattga

SEQ ID NO: 8424 - protein, 436 aa, Muscodor strobelii
  misc_feature: SGI Peptide ID NO. 562591
MPDEPSKARRYLTPLRAQAQEQFWLHMSKAERQELRETFSSTGNETYMGDLQAIKEKWPKRWDMGPFDPDQFRQYLADQTATDQAWTLIEDEIFIVTDRNNRIIFANIESLARILYGDEVLDLMFRAIDMWSHYTPLPAPGSRPNVLSDYIRKIHPELDMSKATIENLPNAKMAVAHYGCMASSVDPKGGHLHLTEDTELSRCRWLTDCRNLFPEFATSVLGATSNIIRFLFKPLDPDHYTDCRKIFTNLPNDRRLSTGEEDFLSFFTLGVNAHTQRYPSADDIEGGLAGLLARGKYNGGALCIPQLGLKVPYKPGTCALIRSSILEHYVSDFTGPRFNIVGTNHESVKRHAYTKMGRPLPPLSGKDQEDYELDSEDDMNENPDPRATSINTGSESLDPDLEITSRWLHGVEALGEETDSEGEKEYGEFELEHPYH

SEQ ID NO: 8425 - DNA, 2244 bp, Muscodor strobelii
  misc_feature: SGI cDNA ID NO. 562592
  misc_feature: Encodes the peptide sequence at SEQ ID NO 8426
atggcgggtcgcttccgccagagcggagggcctcagcccttcacccagtcccgggtgtcctccttccgcgcctccaaccacgccaatgccacctacgatctactcaccggtgccgactatgcatcgccagctcgccatggcccgccctccgagaaccaggactccctgcgcgcgacgtctcgagagagctccaaggagaaccttgcaccagcagatgccgaggcttatgaggctcagcgtagatgcatcgaggatctcaaagccgagatcgcgactatgcgctaccgcatggagacatccgagcaagagaaggagatggtacttctccagcaccagaacgagatccgcgacatccagcgcaaggccgaggacgacttcaaacagaaacaagccgcagaaggcgagaacaacaagacccagcgccaacacgaggctttacaagaagaactcaacaccctgaaagagtcatcagccaatgctaccatcgaagccgaaaggaaggtacgggaggccgaagacgaggcgcgcctgctcagagagcaattggaagatttagcgaccgctaaagaggaaggagagcggatgaaccagaagcatagtctcgatctagaggctcagctatccgatttgcgccaaactatacaagaactagagcaagagagcgaagcgcgagaatcatcattgagcacggcgcagcaacaacttgccgacaaggatagcttcataggaaatctggaagctgatatcttaagactcaaagcccagactggcgacgccgagacaatcgctataatacgtcgcgagctgagtgatcaggttcagcatatacgcactttagagtcgaagaacgcaaagcagcacgcagagctcagccaccttcgccaggtccacaaatccgtcgagattgtccaggaagagaagcgctcacttcagcgcaaactagactcggcacatgctttggaagcagagttagccgaagctcgcatccagagacagcgactggaagacgaacgattggcctggaccgcttttctgcaacacgccagcgcagacggcagcgtcatggaatttgactctcctgaagatgtcgctcgcgcccttgttgaggagcgctataactctgcatcgctcgtcgagaagttgggcagtgttcaacctgagattgcagagcgagacgaaattatcaggtcattagagtccgagaaaatggatcttacagctcaggtcgagaaggctagaacaagcgcggcacccatcaccgctgccaaggcccatgctcgtctcgagaggcagcgtatacttgcgacaaaggaaatcgaatatctacgtgcccagctcaagacctttgatatggaggacgagacatttgacactggcaacttcgatcaacagaaggttgatcgcgtcgctgaactggagaaactcgttgatacttacaaggaagaggtccaaaacttacacaaggagctctctgctgccgattcatctatagactccacacagcccactatcgggtccaaacgcagccgtggggacgaagcagatagtgaacagatcggcgagcttaatcgaaagcgacgtaagctcgaagatgcgctttccaaatcacagacagcgtaccaggttctggagaaggagcgcgatgtgctccagtctagactttcagcggccgaaacaacgaacaggacccgaatcttatccctacgatcgaatcctacctcagattatgaggctatcaaaactgcaacgcttgcagcgttgaagctcgagaatcaagagttactagctcagcttaagaatcaagccaggcgcaacccggaattcgacgtgataccgtcctctcaactcaatgcagcacatcgcgaggttgtcgaagcacatgccgaagtaaaatccgcccaaaagaggatacagcgcatgaaggaagtatgggcgtccaaatcacaagagttcaaagaagccgtccacagcacactaggctggtcagtcacgttcataccgaacggtaagatgcgcgtggagagcaattactaccccagcacgaccgacgagcacgagaatagcatcgtgtttgatggggagaagggcacgatgaaggtcagtggcggaccgcagagtgcgtttgccagaaggattagcgaccagattcagttctgggttagggagaagggatcgatccctggctttttggctgcgcttacgcttgagtttattgatgaacagacgcatgctgccgcccgttag

SEQ ID NO: 8426 - protein, 747 aa, Muscodor strobelii
  misc_feature: SGI Peptide ID NO. 562592
  misc_feature (25)..(742): Pfam Id: PF05557 Pfam Desc: Mitotic checkpoint protein
  misc_feature (543)..(742): Pfam Id: PF05557 Pfam Desc: Mitotic checkpoint protein
  misc_feature (3)..(745): NCBI GI: 46120900 Blast Desc: FG04944.1 [Gibberella zeae PH-1]
  misc_feature (8)..(747): NCBI GI: 116195184 Blast Desc: CHGG_04190 [Chaetomium globosum CBS 148.51] gi|88180103|gb|EAQ87571.1| CHGG_04190 [Chaetomium globosum CBS 148.51]
  misc_feature (2)..(745): NCBI GI: 256728074 Blast Desc: [Nectria haematococca mpVI 77-13-4]
  misc_feature (5)..(745): NCBI GI: 164429425 Blast Desc: NCU04428 [Neurospora crassa OR74A] gi|157073473|gb|EAA28269.2| conserved [Neurospora crassa OR74A]
  misc_feature (5)..(745): NCBI GI: 40882192 Blast Desc: related to spindle assembly checkpoint protein [Neurospora crassa]
  misc_feature (21)..(741): NCBI GI: 261352760 Blast Desc: spindle assembly checkpoint component MAD1 [Verticillium albo-atrum VaMs.102]
  misc_feature (5)..(740): NCBI GI: 39940664 Blast Desc: MGG_04908 [Magnaporthe grisea 70-15] gi|145010859|gb|EDJ95515.1| MGG_04908 [Magnaporthe grisea 70-15]
  misc_feature (60)..(741): NCBI GI: 171691118 Blast Desc: protein product [Podospora anserina] gi|170945507|emb|CAP71619.1| protein product [Podospora anserina]
  misc_feature (2)..(741): NCBI GI: 156050019 Blast Desc: SS1G_07595 [Sclerotinia sclerotiorum 1980] gi|154691997|gb|EDN91735.1| SS1G_07595 [Sclerotinia sclerotiorum 1980]
  misc_feature (84)..(745): NCBI GI: 159131483 Blast Desc: conserved [Aspergillus fumigatus A1163]
MAGRFRQSGGPQPFTQSRVSSFRASNHANATYDLLTGADYASPARHGPPSENQDSLRATSRESSKENLAPADAEAYEAQRRCIEDLKAEIATMRYRMETSEQEKEMVLLQHQNEIRDIQRKAEDDFKQKQAAEGENNKTQRQHEALQEELNTLKESSANATIEAERKVREAEDEARLLREQLEDLATAKEEGERMNQKHSLDLEAQLSDLRQTIQELEQESEARESSLSTAQQQLADKDSFIGNLEADILRLKAQTGDAETIAIIRRELSDQVQHIRTLESKNAKQHAELSHLRQVHKSVEIVQEEKRSLQRKLDSAHALEAELAEARIQRQRLEDERLAWTAFLQHASADGSVMEFDSPEDVARALVEERYNSASLVEKLGSVQPEIAERDEIIRSLESEKMDLTAQVEKARTSAAPITAAKAHARLERQRILATKEIEYLRAQLKTFDMEDETFDTGNFDQQKVDRVAELEKLVDTYKEEVQNLHKELSAADSSIDSTQPTIGSKRSRGDEADSEQIGELNRKRRKLEDALSKSQTAYQVLEKERDVLQSRLSAAETTNRTRILSLRSNPTSDYEAIKTATLAALKLENQELLAQLKNQARRNPEFDVIPSSQLNAAHREVVEAHAEVKSAQKRIQRMKEVWASKSQEFKEAVHSTLGWSVTFIPNGKMRVESNYYPSTTDEHENSIVFDGEKGTMKVSGGPQSAFARRISDQIQFWVREKGSIPGFLAALTLEFIDEQTHAAAR

SEQ ID NO: 8427 - DNA, 2551 bp, Muscodor strobelii
  misc_feature: SGI EST ID NO. CUFF.20433.0
  misc_feature: Variant of the nucleotide sequence at SEQ ID NO 8425
accaaaggcagcttctgccccggtcgcgcagtcgcttccttcatcgccggcgataccttcgcctgacttcaaaagcgcaacgtcgtcgtcttatgggcaaactataaaccacgagtagcactttccccatggcgggtcgcttccgccagagcggagggcctcagcccttcacccagtcccgggtgtcctccttccgcgcctccaaccacgccaatgccacctacgatctactcaccggtgccgactatgcatcgccagctcgccatggcccgccctccgagaaccaggactccctgcgcgcgacgtctcgagagagctccaaggagaaccttgcaccagcagatgccgaggcttatgaggctcagcgtagatgcatcgaggatctcaaagccgagatcgcgactatgcgctaccgcatggagacatccgagcaagagaaggagatggtacttctccagcaccagaacgagatccgcgacatccagcgcaaggccgaggacgacttcaaacagaaacaagccgcagaaggcgagaacaacaagacccagcgccaacacgaggctttacaagaagaactcaacaccctgaaagagtcatcagccaatgctaccatcgaagccgaaaggaaggtacgggaggccgaagacgaggcgcgcctgctcagagagcaattggaagatttagcgaccgctaaagaggaaggagagcggatgaaccagaagcatagtctcgatctagaggctcagctatccgatttgcgccaaactatacaagaactagagcaagagagcgaagcgcgagaatcatcattgagcacggcgcagcaacaacttgccgacaaggatagcttcataggaaatctggaagctgatatcttaagactcaaagcccagactggcgacgccgagacaatcgctataatacgtcgcgagctgagtgatcaggttcagcatatacgcactttagagtcgaagaacgcaaagcagcacgcagagctcagccaccttcgccaggtccacaaatccgtcgagattgtccaggaagagaagcgctcacttcagcgcaaactagactcggcacatgctttggaagcagagttagccgaagctcgcatccagagacagcgactggaagacgaacgattggcctggaccgcttttctgcaacacgccagcgcagacggcagcgtcatggaatttgactctcctgaagatgtcgctcgcgcccttgttgaggagcgctataactctgcatcgctcgtcgagaagttgggcagtgttcaacctgagattgcagagcgagacgaaattatcaggtcattagagtccgagaaaatggatcttacagctcaggtcgagaaggctagaacaagcgcggcacccatcaccgctgccaaggcccatgctcgtctcgagaggcagcgtatacttgcgacaaaggaaatcgaatatctacgtgcccagctcaagacctttgatatggaggacgagacatttgacactggcaacttcgatcaacagaaggttgatcgcgtcgctgaactggagaaactcgttgatacttacaaggaagaggtccaaaacttacacaaggagctctctgctgccgattcatctatagactccacacagcccactatcgggtccaaacgcagccgtggggacgaagcagatagtgaacagatcggcgagcttaatcgaaagcgacgtaagctcgaagatgcgctttccaaatcacagacagcgtaccaggttctggagaaggagcgcgatgtgctccagtctagactttcagcggccgaaacaacgaacaggacccgaatcttatccctacgatcgaatcctacctcagattatgaggctatcaaaactgcaacgcttgcagcgttgaagctcgagaatcaagagttactagctcagcttaagaatcaagccaggcgcaacccggaattcgacgtgataccgtcctctcaactcaatgcagcacatcgcgaggttgtcgaagcacatgccgaagtaaaatccgcccaaaagaggatacagcgcatgaaggaagtatgggcgtccaaatcacaagagttcaaagaagccgtccacagcacactaggctggtcagtcacgttcataccgaacggtaagatgcgcgtggagagcaattactaccccagcacgaccgacgagcacgagaatagcatcgtgtttgatggggagaagggcacgatgaaggtcagtggcggaccgcagagtgcgtttgccagaaggattagcgaccagattcagttctgggttagggagaagggatcgatccctggctttttggctgcgcttacgcttgagtttattgatgaacagacgcatgctgccgcccgttaggtgatgatacggattgcatttatacccggctgtgagattacttgtattgagatttgaggatgaggcgttgaggataaataaggctgcggcatttggctgtctgttggctttaaagtgtacaaactgccaagtagttatgctagcttgaattgtacagagatcgataattcacatctttg

SEQ ID NO: 8428 - DNA, 1617 bp, Muscodor strobelii
  misc_feature: SGI cDNA ID NO. 562593
  misc_feature: Reduced expression when VOC is produced
  misc_feature: Encodes the peptide sequence at SEQ ID NO 8429
atggctctgcctcccatatctccgaacctcgtcaacccgcgtgtcatcgccagttgtcgtgcctggccgcgcatacactcctaccgcccaatcgctgccacgaggtcgtatcgtctctcttcccgctctctgccgatcccagcacgacgatgtcgtccgctagcccagactgctgcttatgcgccgccttcgatccgggtccgaaccttcgcgaccgagccccctacggacccgaccgttgcaaggaagaaagaagccgagactgattctgctgcgcgaaccgccggttccccggacgaggcccaatcacaaaagcccgactccagttcttcctccgtgacagagggctccgggcagaactgggaagacgagcccaacttcgacattgaaaagttcacacaactaccgtatgagaatttcggggtcaaccagcacatgatcattgatcgcgagttcaaagaggtgcttcgtcaactcctgtggaaattccgcgcccccattcgctatgcttttgcctatggctccggtgtcttcccgcaatctcaaggtggctcggctaccgaggccgagatcaaagctgtccaccctagggcgcccgctgctgtccagaaagcccagaacggttctcccaagatgattgacttcatctttggcgtgtcgtacacccagcactggcattcgctcaatctcacacagcatcgcgatcactactccatgctcggagccctcgggtctggcgcagtgtctcatgttcaggataaatggggcgccggtgtatatttcaatccctacgtcactgtcgagggcatacagatcaagtacggagtcgtgaatctagatactttgtgccgggatctcagcgagtgggatacgttgtatctcgcgggccgtttgcataagccggtcaagatcttacgagacgacccgcgcgttcgtctctcgaaccagatcaacctcctctccgcattacggaccgctctcctgctgctgccccctaccttcacggagcaggagttatatgcgaccattgctggtataagttacctaggcgatcctcgcatgtccctaccaacagaaaatccaaagaaggtcgcaaacatagtcacccataatatgatgaacttccgccgactatatgccccgttggttgaatctctccccaacgtcatattcaatgatccggcgtgtaaaaatacggattggattaacaagaccgatgccgtattgaaactcgaacaggacatggatcccataaagcgaggtaatatggttcggcgtttacctaaagccttccgctcaaaactatatttcgaataccagaaaaagttccaaattctccagctcgagtttaacaagatgatggaggagaaccaaaacgaaagcacagaatcattcagacgacaacagggtggtcgcttcgagcagcgaatagcacaacaagctgccgatgatctcacgcagaccgttcgccatgtaatcaagaaaacgatttcctggccgagtacctctcagagcatcaagagtttcgtcacggcaggtttctctcggggatttcgatacctgggagagaagctcgccaaatatcgtcaagggagcaaagagaagaaacaggaatga

SEQ ID NO: 8429 - protein, 538 aa, Muscodor strobelii
  misc_feature: SGI Peptide ID NO. 562593
  misc_feature (155)..(527): Pfam Id: PF09139 Pfam Desc: Mitochondrial matrix Mmp37
  misc_feature (120)..(538): NCBI GI: 156050017 Blast Desc: SS1G_07594 [Sclerotinia sclerotiorum 1980] gi|154691996|gb|EDN91734.1| SS1G_07594 [Sclerotinia sclerotiorum 1980]
  misc_feature (120)..(536): NCBI GI: 85085424 Blast Desc: NCU04429 [Neurospora crassa OR74A] gi|28918598|gb|EAA28270.1| conserved [Neurospora crassa OR74A] gi|40882191|emb|CAF06017.1| conserved [Neurospora crassa]
  misc_feature (120)..(528): NCBI GI: 154298678 Blast Desc: BC1G_11594 [Botryotinia fuckeliana B05.10] gi|150857766|gb|EDN32958.1| BC1G_11594 [Botryotinia fuckeliana B05.10]
  misc_feature (119)..(529): NCBI GI: 171691120 Blast Desc: protein product [Podospora anserina] gi|170945508|emb|CAP71620.1| protein product [Podospora anserina]
  misc_feature (119)..(538): NCBI GI: 116195182 Blast Desc: CHGG_04189 [Chaetomium globosum CBS 148.51] gi|88180102|gb|EAQ87570.1| CHGG_04189 [Chaetomium globosum CBS 148.51]
  misc_feature (68)..(524): NCBI GI: 240108501 Blast Desc: CPC735_008480 [Coccidioides posadasii C735 delta SOWgp]
  misc_feature (90)..(537): NCBI GI: 225560293 Blast Desc: MMP37-like protein [Ajellomyces capsulatus G186AR]
  misc_feature (43)..(538): NCBI GI: 261200907 Blast Desc: MMP37-like protein [Ajellomyces dermatitidis SLH14081] gi|239593926|gb|EEQ76507.1| MMP37-like protein [Ajellomyces dermatitidis SLH14081] gi|239607199|gb|EEQ84186.1| MMP37-like
  misc_feature (120)..(536): NCBI GI: 70996050 Blast Desc: conserved [Aspergillus fumigatus Af293] gi|44890005|emb|CAF32123.1| [Aspergillus fumigatus] gi|66850415|gb|EAL90742.1| conserved [Aspergillus fumigatus
  misc_feature (120)..(538): NCBI GI: 226284426 Blast Desc: mitochondrial import protein mmp37 [Paracoccidioides brasiliensis Pb01]
  misc_feature: Useful for introducing or modulating the production of volatile compounds
MALPPISPNLVNPRVIASCRAWPRIHSYRPIAATRSYRLSSRSLPIPARRCRPLAQTAAYAPPSIRVRTFATEPPTDPTVARKKEAETDSAARTAGSPDEAQSQKPDSSSSSVTEGSGQNWEDEPNFDIEKFTQLPYENFGVNQHMIIDREFKEVLRQLLWKFRAPIRYAFAYGSGVFPQSQGGSATEAEIKAVHPRAPAAVQKAQNGSPKMIDFIFGVSYTQHWHSLNLTQHRDHYSMLGALGSGAVSHVQDKWGAGVYFNPYVTVEGIQIKYGVVNLDTLCRDLSEWDTLYLAGRLHKPVKILRDDPRVRLSNQINLLSALRTALLLLPPTFTEQELYATIAGISYLGDPRMSLPTENPKKVANIVTHNMMNFRRLYAPLVESLPNVIFNDPACKNTDWINKTDAVLKLEQDMDPIKRGNMVRRLPKAFRSKLYFEYQKKFQILQLEFNKMMEENQNESTESFRRQQGGRFEQRIAQQAADDLTQTVRHVIKKTISWPSTSQSIKSFVTAGFSRGFRYLGEKLAKYRQGSKEKKQE

SEQ ID NO: 8430 - DNA, 1530 bp, Muscodor strobelii
  misc_feature: SGI cDNA ID NO. 562594
  misc_feature: Elevated expression when VOC is produced
  misc_feature: Encodes the peptide sequence at SEQ ID NO 8431
atgctgtctgacttgagtgttacacacttctatgttttgattgcgttattgccggtgctctcagtggcatactacgcaattcagaaagcgcgacatgatcttcgaatccgaaatactggcggggtccgggctccaagcgttggaaccaaccccttcagtggggcacgtacagttatcaaatgcgctcaagcacagttgagaaccgatcttctccgttacttcgatgaactgtttgcgagagcatctcctgagtctcccaactgtattgaattacaaatcaaaccaacgcaacgatatataatcactcgagagcccgaacacatcaaggcaattctcgctacaaaatttggagattttggtaaaggaccactgttcaactatctatggaggccattcttgggcgatagtatctttactacagacaagaacctatggcatgacagccgtagtttgattcgacccatgttcatcaaagaccgagtcagtgatcttgctactttcgacaaatgggcatcggcgctcatcgcaaagctgccaccgccgggcgagacagttgatatcatgagcttgttatatcgcatgactcttgatgttacgacggacttcctcctcggagcgagtgtcaatagtctagagaaccctcagagtgaatttgccaaagcctttggggaggttcaacgcgaccagatgttgatcaccactgttggacctttgcatgtcttcattcctcgtgggagatacaaccgtggaatcgccaaaatcgaccaattcgtaatgccctacattcagcaagcactagcccttcccccagactctctagagaaactctccaactccgacaaagacttcacgttcctgcacagtatcgctcgctacacacgcgatcctaaagttctgcgggatcaaattgtggcggttctcctcgcagggcgcgatacaaccgctgcaacgctatcgtggactttctacgaactctgtaactacccggacaaatatcaaaaactacgcgatgaaatcattcaaaccgtcggcaccgacgggacaccgacctatgacgatctgaagaacatgacatatctccgccacacgctggaagaaatccttagactctacccagctgtaccatacaacctgcggtccgcactcgaagatacgaccatccccggtgcacctggccaaccaccgattggtgtcgcgcagggtgatgttgtagtatatagcacgcttgctatgcagcggcggcgggatatgtatcccgatgttgacgagaaattcgaggacccggcgctattttcacccgagaggtgggaaaattggacgcctaagccatggcagtacgtaccttttaatggcgggccacgtatctgcgtaggacagaatttcgccttgacggagatggcttatactctggtaaaagtcctccagaaatatagccgtcttgagtatcgaggggactggaacgctcagcaacatgacgcggagattgttggaaaaccaagccagggagtgcctgttgctttgtacgagtaa

SEQ ID NO: 8431 - protein, 509 aa, Muscodor strobelii
  misc_feature: SGI Peptide ID NO. 562594
  misc_feature (66)..(507): Pfam Id: PF00067 Pfam Desc: Cytochrome P450
  misc_feature (105)..(478): Pfam Id: PF00067 Pfam Desc: Cytochrome P450
  misc_feature (13)..(508): NCBI GI: 39978177 Blast Desc: MGG_06973 [Magnaporthe grisea 70-15] gi|145013452|gb|EDJ98093.1| MGG_06973 [Magnaporthe grisea 70-15]
  misc_feature (27)..(509): NCBI GI: 239612275 Blast Desc: cytochrome P450 alkane hydroxylase [Ajellomyces dermatitidis ER-3]
  misc_feature (27)..(509): NCBI GI: 261202474 Blast Desc: cytochrome P450 alkane hydroxylase [Ajellomyces dermatitidis SLH14081] gi|239590548|gb|EEQ73129.1| cytochrome P450 alkane hydroxylase [Ajellomyces dermatitidis SLH14081]
  misc_feature (11)..(509): NCBI GI: 259482279 Blast Desc: TPA: cytochrome P450, (Eurofung) [Aspergillus nidulans FGSC A4]
  misc_feature (32)..(509): NCBI GI: 67537376 Blast Desc: AN4858.2 [Aspergillus nidulans FGSC A4] gi|40741746|gb|EAA60936.1| AN4858.2 [Aspergillus nidulans FGSC A4]
  misc_feature (11)..(480): NCBI GI: 261357033 Blast Desc: cytochrome P450 52A11 [Verticillium albo-atrum VaMs.102]
  misc_feature (27)..(509): NCBI GI: 171687345 Blast Desc: protein product [Podospora anserina] gi|170943634|emb|CAP69286.1| protein product [Podospora anserina]
  misc_feature (2)..(509): NCBI GI: 39965179 Blast Desc: MGG_09920 [Magnaporthe grisea 70-15] gi|145013177|gb|EDJ97818.1| MGG_09920 [Magnaporthe grisea 70-15]
  misc_feature (1)..(509): NCBI GI: 156045685 Blast Desc: SS1G_10037 [Sclerotinia sclerotiorum 1980] gi|154694426|gb|EDN94164.1| SS1G_10037 [Sclerotinia sclerotiorum 1980]
  misc_feature (12)..(509): NCBI GI: 116181964 Blast Desc: CHGG_01610 [Chaetomium globosum CBS 148.51] gi|88185907|gb|EAQ93375.1| CHGG_01610 [Chaetomium globosum CBS 148.51]
  misc_feature (95)..(507): SWISSPROT Homolog: EC 1.14.14.1 Unspecific monooxygenase
  misc_feature: Useful for introducing or modulating the production of volatile compounds
MLSDLSVTHFYVLIALLPVLSVAYYAIQKARHDLRIRNTGGVRAPSVGTNPFSGARTVIKCAQAQLRTDLLRYFDELFARASPESPNCIELQIKPTQRYIITREPEHIKAILATKFGDFGKGPLFNYLWRPFLGDSIFTTDKNLWHDSRSLIRPMFIKDRVSDLATFDKWASALIAKLPPPGETVDIMSLLYRMTLDVTTDFLLGASVNSLENPQSEFAKAFGEVQRDQMLITTVGPLHVFIPRGRYNRGIAKIDQFVMPYIQQALALPPDSLEKLSNSDKDFTFLHSIARYTRDPKVLRDQIVAVLLAGRDTTAATLSWTFYELCNYPDKYQKLRDEIIQTVGTDGTPTYDDLKNMTYLRHTLEEILRLYPAVPYNLRSALEDTTIPGAPGQPPIGVAQGDVVVYSTLAMQRRRDMYPDVDEKFEDPALFSPERWENWTPKPWQYVPFNGGPRICVGQNFALTEMAYTLVKVLQKYSRLEYRGDWNAQQHDAEIVGKPSQGVPVALYE

SEQ ID NO: 8432 - DNA, 3849 bp, Muscodor strobelii
  misc_feature: SGI EST ID NO. CUFF.20448.0
  misc_feature: Variant of the nucleotide sequence at SEQ ID NO 8430
caaatgcgctcaagcacagttgagaaccgatcttctccgttacttcgatgaactgtttgcgagagcatctcctgagtctcccaactgtattgaattacaaatcaaaccaacgcaacgatatataatcactcgagagcccgaacacatcaaggcaattctcgctacaaaatttggagattttggtaaaggaccactgttcaactatctatggaggccattcttgggcgatagtatctttactacagacaagaacctatggcatgacagccgtagtttgattcgacccatgttcatcaaagaccgagtcagtgatcttgctactttcgacaaatgggcatcggcgctcatcgcaaagctgccaccgccgggcgagacagttgatatcatgagcttgttatatcgcatgactcttgatgttacgacggacttcctcctcggagcgagtgtcaatagtctagagaaccctcagagtgaatttgccaaagcctttggggaggttcaacgcgaccagatgttgatcaccactgttggacctttgcatgtcttcattcctcgtgggagatacaaccgtggaatcgccaaaatcgaccaattcgtaatgccctacattcagcaagcactagcccttcccccagactctctagagaaactctccaactccgacaaagacttcacgttcctgcacagtatcgctcgctacacacgcgatcctaaagttctgcgggatcaaattgtggcggttctcctcgcagggcgcgatacaaccgctgcaacgctatcgtggactttctacgaactctgtaactacccggacaaatatcaaaaactacgcgatgaaatcattcaaaccgtcggcaccgacgggacaccgacctatgacgatctgaagaacatgacatatctccgccacacgctggaagaaatccttagactctacccagctgtaccatacaacctgcggtccgcactcgaagatacgaccatccccggtgcacctggccaaccaccgattggtgtcgcgcagggtgatgttgtagtatatagcacgcttgctatgcagcggcggcgggatatgtatcccgatgttgacgagaaattcgaggacccggcgctattttcacccgagaggtgggaaaattggacgcctaagccatggcagtacgtaccttttaatggcgggccacgtatctgcgtaggacagaatttcgccttgacggagatggcttatactctggtaaaagtcctccagaaatatagccgtcttgagtatcgaggggactggaacgctcagcaacatgacgcggagattgttggaaaaccaagccagggagtgcctgttgctttgtacgagtaaggaggtttagagtgtaccggcttttggttgcatagcgaggttgtgctagtctgttcatgcaaacgattgagaaatcattccaagttatcccatgatgtgcttcaatgctgagggccactgttcgtacgggcagcatatgattctagacgattgcaaacccacggtaaccttgatattccttgtttttgcacattgttgtgatgatttgtgtagtacaattatggacaatattcattgattctgaccttcaggtcattttctcattcgtatttacgactcggaagctcgcgcaaccttccaaatacacaagcccgaggcacccaaccgaggtcaataaattccacaagcgcattttcctagtcgtctgaatacgacagttgacaaaatctctatcccaaccccggaaccgcccgaggctgatgcaatgctattttcgcccttatccacgtgcttaagaccgagacagaagaaatctctaatgttgtgccgagtttccctcggccgtcatgttgtatgacttgtgtgacttcgccgctgagtcagcgaactcgtatcgcgatagtgtacatgccgtgagtatgcggtagaataaatgaagctatgtccgaatgcagcaagtattgtggcaatgattttgtagatcgatgaaagacatcattcctgtttcttctctttgctcccttgacgatatttggcgagcttctctcccaggtatcgaaatccccgagagaaacctgccgtgacgaaactcttgatgctctgagaggtactcggccaggaaatcgttttcttgattacatggcgaacggtctgcgtgagatcatcggcagcttgttgtgctattcgctgctcgaagcgaccaccctgttgtcgtctgaatgattctgtgctttcgttttggttctcctccatcatcttgttaaactcgagctggagaatttggaactttttctggtattcgaaatatagttttgagcggaaggctttaggtaaacgccgaaccatattacctcgctttatgggatccatgtcctgttcgagtttcaatacggcatcggtcttgttaatccaatccgtatttttacacgccggatcattgaatatgacgttggggagagattcaaccaacggggcatatagtcggcggaagttcatcatattatgggtgactatgtttgcgaccttctttggattttctgttggtagggacatgcgaggatcgcctaggtaacttataccagcaatggtcgcatataactcctgctccgtgaaggtagggggcagcagcaggagagcggtccgtaatgcggagaggaggttgatctggttcgagagacgaacgcgcgggtcgtctcgtaagatcttgaccggcttatgcaaacggcccgcgagatacaacgtatcccactcgctgagatcccggcacaaagtatctagattcacgactccgtacttgatctgtatgccctcgacagtgacgtagggattgaaatatacaccggcgccccatttatcctgaacatgagacactgcgccagacccgagggctccgagcatggagtagtgatcgcgatgctgtgtgagattgagcgaatgccagtgctgggtgtacgacacgccaaagatgaagtcaatcatcttgggagaaccgttctgggctttctggacagcagcgggcgccctagggtggacagctttgatctcggcctcggtagccgagccaccttgagattgcgggaagacaccggagccataggcaaaagcatagcgaatgggggcgcggaatttccacaggagttgacgaagcacctctttgaactcgcgatcaatgatcatgtgctggttgaccccgaaattctcatacggtagttgtgtgaacttttcaatgtcgaagttgggctcgtcttcccagttctgcccggagccctctgtcacggaggaagaactggagtcgggcttttgtgattgggcctcgtccggggaaccggcggttcgcgcagcagaatcagtctcggcttctttcttccttgcaacggtcgggtccgtagggggctcggtcgcgaaggttcggacccggatcgaaggcggcgcataagcagcagtctgggctagcggacgacatcgtcgtgctgggatcggcagagagcgggaagagagacgatacgacctcgtggcagcgattgggcggtaggagtgtatgcgcggccaggcacgacaactggcgatgacacgcgggttgacgaggttcggagatatgggaggcagagccatggttgagggatcgacaacggccaacagtcaagaggatgcgggatggtcagagttcgaagtgaaatcgagcgagggcagcaaaagccgcggattggttacgggagtcggaaagccatgtgcgcgcacaggctgagaccgaggaacggagacacacggtactagaagtgctatcgtagctatgctggaagatgaggttgaacagctcccggggaagttgacgcaat

SEQ ID NO: 8433 - DNA, 1026 bp, Muscodor strobelii
  misc_feature: SGI cDNA ID NO. 562595
  misc_feature: Encodes the peptide sequence at SEQ ID NO 8434
atgtccgagggacaccaggcgccacggatatatggtggaacgacctggacggttatgaacgcagaccaaaacaggagacttactccggtggaacagagggtggctgctcatgctgatccattcgtcgacaatgctcccctgcgacctcaagctatgggtgatattcaacgaaccgtacctgccaggcatggtatacttggcaactttggccaacaagctcacgtcaatgctacgggcgtccctgttggaggagctcatgtcgccgaacaacccgccacgttcggaggcaataacattgctgctcaaaacggtctccgctggccccaagatcctcgacttgtacccgccctcctccgagcatggaatttccctggcccgaccagaaacaacaaccctcccccgaagcaggatgtagcttgcgtgatatgtgaggacgaattcgatcttgtaaaggaccacacacagctttttaagcccatggactgtcagcactaccactgcaaaccctgtctgcgggagaatgctcagtctgcgctcagttccgtgcccttccgacccgccaaatgttgcaaagtcattccgacaacagaactctctcggctcggggctctgaaccaagacgaagagaaggaatatgctcgcaagatcgaggaactcacgaacccccagcgcagactgtactgttggtccgacggttgtggcacctacattcctattagcgatcgcaagacaagaatcggtgtttgccccaaatgtcaactcaggacatgcaagtcatgcagtagcaagtcacacttcggaccatgtaacaaggaaaagctcgaggagatcagacagagtgatgagcagatctatgccttggccggctcaaagggctggaagcgctgcccaaactgctgcaatctagtgcagaagaacggcggatgtgacaatatggtctgtcactgcggccagaacttctgttatcgctgtggaacggctatttcaccctatgcacaccagtgcagagaaaaccaggctccttaa

SEQ ID NO: 8434 - protein, 341 aa, Muscodor strobelii
  misc_feature: SGI Peptide ID NO. 562595
  misc_feature (140)..(325): NCBI GI: 242814001 Blast Desc: IBR finger domain protein [Talaromyces stipitatus ATCC 10500] gi|218714621|gb|EED14044.1| IBR finger domain protein [Talaromyces stipitatus ATCC 10500]
  misc_feature (122)..(325): NCBI GI: 46134125 Blast Desc: FG09202.1 [Gibberella zeae PH-1]
  misc_feature (140)..(325): NCBI GI: 70989836 Blast Desc: IBR finger domain protein [Aspergillus fumigatus Af293] gi|66847399|gb|EAL87729.1| IBR finger domain protein [Aspergillus fumigatus Af293]
  misc_feature (140)..(325): NCBI GI: 159125691 Blast Desc: RING finger protein [Aspergillus fumigatus A1163]
  misc_feature (140)..(324): NCBI GI: 70991957 Blast Desc: RING finger protein [Aspergillus fumigatus Af293] gi|66848460|gb|EAL88789.1| RING finger protein [Aspergillus fumigatus Af293]
  misc_feature (140)..(324): NCBI GI: 159123432 Blast Desc: RING finger protein [Aspergillus fumigatus A1163]
  misc_feature (128)..(325): NCBI GI: 240110362 Blast Desc: IBR domain containing protein [Coccidioides posadasii C735 delta SOWgp]
  misc_feature (140)..(325): NCBI GI: 238500023 Blast Desc: IBR finger domain protein [Aspergillus flavus NRRL3357] gi|220692999|gb|EED49345.1| IBR finger domain protein [Aspergillus flavus NRRL3357]
  misc_feature (138)..(327): NCBI GI: 212547185 Blast Desc: IBR finger domain protein [Penicillium marneffei ATCC 18224] gi|210064401|gb|EEA18498.1| IBR finger domain protein [Penicillium marneffei ATCC 18224]
  misc_feature (127)..(327): NCBI GI: 212547187 Blast Desc: IBR finger domain protein [Penicillium marneffei ATCC 18224] gi|210064402|gb|EEA18499.1| IBR finger domain protein [Penicillium marneffei ATCC 18224]
MSEGHQAPRIYGGTTWTVMNADQNRRLTPVEQRVAAHADPFVDNAPLRPQAMGDIQRTVPARHGILGNFGQQAHVNATGVPVGGAHVAEQPATFGGNNIAAQNGLRWPQDPRLVPALLRAWNFPGPTRNNNPPPKQDVACVICEDEFDLVKDHTQLFKPMDCQHYHCKPCLRENAQSALSSVPFRPAKCCKVIPTTELSRLGALNQDEEKEYARKIEELTNPQRRLYCWSDGCGTYIPISDRKTRIGVCPKCQLRTCKSCSSKSHFGPCNKEKLEEIRQSDEQIYALAGSKGWKRCPNCCNLVQKNGGCDNMVCHCGQNFCYRCGTAISPYAHQCRENQAP

SEQ ID NO: 8435 - DNA, 765 bp, Muscodor strobelii
  misc_feature: SGI cDNA ID NO. 562596
  misc_feature: Reduced expression when VOC is produced
  misc_feature: Encodes the peptide sequence at SEQ ID NO 8436
atgacagaccaaacttcaaacgcgtcatctacgcttgacgcgccagagcatgtcaaagccctgctccgccgcctccatgcgcaatcacttacccaagagcaagagctgaataagcccggtggcaaagcagaatcattgaaagccttgaagcaaaaaggcgaagccggcgatacggacgcgatgacgagttaccagcgtcaattcgacgatttgatgcgcgaccacttgattgcattggatgaagacaaggcgctcttcgtctatcatcttatccgtgctctcaaagctacacgcgttgtcgaagctggcacttctttcgggatgagcacgatctatctctccttggccgtgggacaaaatgcagcgaatttgaatgatgagcagcgaaaagatgctagggtcatcgccaccgagatggagccgaccaaaattgctcgagctcgcggacattggaaagaggccggccatgaggtggagcgatggatcgaacttcgcgaaggggatctccgtcagacacttgcttcgaatctacctactgacattgattttgtgcttttcgacatctggacacctatggtgctgccgacgctgcaggtgctagaaccttctctcaagaaaggcgcagttcttgtcttagacaatgtcgtttcatctgcagatggatatcaagcttttcatgagtacattgagacacatcgtgatgtatatcggacattggttctgccacattctggaggtctggagtttaccatttatgatccgtag

SEQ ID NO: 8436 - protein, 254 aa, Muscodor strobelii
  misc_feature: SGI Peptide ID NO. 562596
  misc_feature (15)..(254): NCBI GI: 70984775 Blast Desc: O-methyltransferase [Aspergillus fumigatus Af293] gi|66845521|gb|EAL85856.1| O-methyltransferase, [Aspergillus fumigatus Af293]
  misc_feature (15)..(254): NCBI GI: 159122678 Blast Desc: O-methyltransferase, [Aspergillus fumigatus A1163]
  misc_feature (15)..(254): NCBI GI: 121704190 Blast Desc: O-methyltransferase, [Aspergillus clavatus NRRL 1] gi|119398503|gb|EAW08933.1| O-methyltransferase, [Aspergillus clavatus NRRL 1]
  misc_feature (15)..(254): NCBI GI: 119467113 Blast Desc: O-methyltransferase, [Neosartorya fischeri NRRL 181] gi|119405515|gb|EAW15466.1| O-methyltransferase, [Neosartorya fischeri NRRL 181]
  misc_feature (7)..(254): NCBI GI: 145254173 Blast Desc: An18g00820 [Aspergillus niger] gi|134084126|emb|CAK43154.1| protein product [Aspergillus niger]
  misc_feature (7)..(254): NCBI GI: 212527118 Blast Desc: O-methyltransferase, [Penicillium marneffei ATCC 18224] gi|210073114|gb|EEA27201.1| O-methyltransferase, [Penicillium marneffei ATCC 18224]
  misc_feature (10)..(252): NCBI GI: 255933093 Blast Desc: Pc12g12010 [Penicillium chrysogenum Wisconsin 54-1255] gi|211582636|emb|CAP80828.1| Pc12g12010 [Penicillium chrysogenum Wisconsin 54-1255]
  misc_feature (6)..(254): NCBI GI: 259485799 Blast Desc: TPA: O-methyltransferase, (AFU_orthologue; AFUA_6G01830) [Aspergillus nidulans FGSC A4]
  misc_feature (13)..(254): NCBI GI: 115397139 Blast Desc: conserved [Aspergillus terreus NIH2624] gi|114192352|gb|EAU34052.1| conserved [Aspergillus terreus NIH2624]
  misc_feature (12)..(254): NCBI GI: 261355526 Blast Desc: O-methyltransferase [Verticillium albo-atrum VaMs.102]
  misc_feature: Useful for introducing or modulating the production of volatile compounds
MTDQTSNASSTLDAPEHVKALLRRLHAQSLTQEQELNKPGGKAESLKALKQKGEAGDTDAMTSYQRQFDDLMRDHLIALDEDKALFVYHLIRALKATRVVEAGTSFGMSTIYLSLAVGQNAANLNDEQRKDARVIATEMEPTKIARARGHWKEAGHEVERWIELREGDLRQTLASNLPTDIDFVLFDIWTPMVLPTLQVLEPSLKKGAVLVLDNVVSSADGYQAFHEYIETHRDVYRTLVLPHSGGLEFTIYDP

SEQ ID NO: 8437 - DNA, 969 bp, Muscodor strobelii
  misc_feature: SGI EST ID NO. CUFF.20486.1
  misc_feature: Variant of the nucleotide sequence at SEQ ID NO 8435
gctctcatttcagtcgcatctttaactcggacttatacttggacacagagacaacatgacagaccaaacttcaaacgcgtcatctacgcttgacgcgccagagcatgtcaaagccctgctccgccgcctccatgcgcaatcacttacccaagagcaagagctgaataagcccggtggcaaagcagaatcattgaaagccttgaagcaaaaaggcgaagccggcgatacggacgcgatgacgagttaccagcgtcaattcgacgatttgatgcgcgaccacttgattgcattggatgaagacaaggcgctcttcgtctatcatcttatccgtgctctcaaagctacacgcgttgtcgaagctggcacttctttcgggatgagcacgatctatctctccttggccgtgggacaaaatgcagcgaatttgaatgatgagcagcgaaaagatgctagggtcatcgccaccgagatggagccgaccaaaattgctcgagctcgcggacattggaaagaggccggccatgaggtggagcgatggatcgaacttcgcgaaggggatctccgtcagacacttgcttcgaatctacctactgacattgattttgtgcttttcgacatctggacacctatggtgctgccgacgctgcaggtgctagaaccttctctcaagaaaggcgcagttcttgtcttagacaatgtcgtttcatctgcagatggatatcaagcttttcatgagtacattgagacacatcgtgatgtatatcggacattggttctgccacattctggaggtctggagtttaccatttatgatccgtagataggaaagactaaaatcaagtcgctatgaaaccaaacccctaatcgctatgctgtgctattcatctgtccgtcatcgcctgaacattagatcacccaccagatgatcgattcaactcaaactccacagatcgatgagctttatcgcac

SEQ ID NO: 8438 - DNA, 882 bp, Muscodor strobelii
  misc_feature: SGI cDNA ID NO. 562597
  misc_feature: Encodes the peptide sequence at SEQ ID NO 8439
atggcaggcggagaatccgatgatcttgccaccatgatggctgagcagctggttgacgctttccatgcacgaatatcccgcaatcaccattcatcagtcctcagtgatgacgagatcctcaagctctatctattcatgccccttactcgcgttctggtctccaaggccacatacgccttgttctcccatcctcgcttgcagtatccaacagtcaacaaatcgaatgatctccataccgcgatcgctgatgttgttgcgggaatcgttgatgttgtctgtgcaagagctatcagcattcaggaatcagctgcagagctcaagaagcctctgagaggcatactcaagaagccagaccctgagaaggagcatgaagtaggacaggaggtcaaacgaaaggtccgcttcgccgaaatcgcgctcgatgtggacggtaaccccgtcccccgtatcggtaaagcaaactatcgaaagcaaaccgctgtcaaacacggagaattcatcagacaggcttaccagatgatcaatgatggatttctcataagcaacaacggccaagtccaagtctccaagcagctcctattcgacgccgagagggattcggaagccgccgagatcctcgaggaggccaagaaagggtccttgtccaagctcggacttgaacggtcgtttggcgacgacgatgaggcgagggaggctatgacgaagaaggtgaaagaagcagcggaagagaagaggaaagcgaaggaagaagcggctaaattgagagtcgcaatgacgcagaagaaggaagacccgacgccgaagaataagggagggaatcgccgacgggagcggaccctcgaggaggtagagaaagaagacgatgaggaagtggagaagtaa

SEQ ID NO: 8439 - protein, 293 aa, Muscodor strobelii
  misc_feature: SGI Peptide ID NO. 562597
MAGGESDDLATMMAEQLVDAFHARISRNHHSSVLSDDEILKLYLFMPLTRVLVSKATYALFSHPRLQYPTVNKSNDLHTAIADVVAGIVDVVCARAISIQESAAELKKPLRGILKKPDPEKEHEVGQEVKRKVRFAEIALDVDGNPVPRIGKANYRKQTAVKHGEFIRQAYQMINDGFLISNNGQVQVSKQLLFDAERDSEAAEILEEAKKGSLSKLGLERSFGDDDEAREAMTKKVKEAAEEKRKAKEEAAKLRVAMTQKKEDPTPKNKGGNRRRERTLEEVEKEDDEEVEK

SEQ ID NO: 8440 - DNA, 972 bp, Muscodor strobelii
  misc_feature: SGI cDNA ID NO. 562598
  misc_feature: Elevated expression when VOC is produced
  misc_feature: Encodes the peptide sequence at SEQ ID NO 8441
atgcggacacaacttggcttctacacctaccgtatcccgaaggcgtcacacgtccacaaggacgtagtcatggggactcaatctgatgtcgcaagctggttttcgacgcaagagcatatcattccgtctagcgtcaagactattgaaaagttgaacgctgtgcttggtgagttggagcaaaacatcgctattgggataagtgacaacggcggaccggaaacgacagcagaagacaagatcaaggtggaatcgtacatagatgttgtagcgatctctcatgaattcgtgaccgatcactgccatgagaaaacgttgcgtgaactgccaaagagcacaccggtcattgcgcctgataaggcatttaaattgataaactcatggaatcatttcgatacggtcatcgagaccccagcgtttttgggcgcggaggctggagactggcgcgatgctcttaaatgcgagctgttgccgtcctggattggcatcggacgtgttgtgacaccaggtaatcaactgtattaccactctgctataatcgtggctttcatgaacagaattacaagcgacacagagggacaaaaagatggagagaatggcgaggccatcatctactcgccccacggaattgatgctggcgatctagcgggcgtcagagcatccggcattcgcactctcgctctattacatggtctgcacgacgtccgtatttggatgacaaaacaattgaatcttggtggcttgaacggtgccgccgcagctcgcgaatgtcgtgctaaatactggatcacaacacacgacgaggtcaaaaaggggagtggcttcattacgccgcttctcagaaggacgaaatggtcgcttgctgaggtcattaggaaggaagtacggaaagcagacagcacaggcaatacgggtcctgggtttgaatttgtcgaattaggatctggtgatggtttgattctgaacagatcttga

SEQ ID NO: 8441 - protein, 323 aa, Muscodor strobelii
  misc_feature: SGI Peptide ID NO. 562598
  misc_feature (23)..(320): NCBI GI: 39965686 Blast Desc: MGG_09969 [Magnaporthe grisea 70-15] gi|145015412|gb|EDJ99948.1| MGG_09969 [Magnaporthe grisea 70-15]
  misc_feature (25)..(279): NCBI GI: 261354140 Blast Desc: conserved [Verticillium albo-atrum VaMs.102]
  misc_feature (24)..(320): NCBI GI: 189197137 Blast Desc: conserved [Pyrenophora tritici-repentis Pt-1C-BFP] gi|187980854|gb|EDU47480.1| conserved [Pyrenophora tritici-repentis Pt-1C-BFP]
  misc_feature (24)..(320): NCBI GI: 169616420 Blast Desc: SNOG_11382 [Phaeosphaeria nodorum SN15] gi|160703176|gb|EAT81090.2| SNOG_11382 [Phaeosphaeria nodorum SN15]
  misc_feature (25)..(320): NCBI GI: 154295286 Blast Desc: BC1G_13224 [Botryotinia fuckeliana B05.10] gi|150844091|gb|EDN19284.1| BC1G_13224 [Botryotinia fuckeliana B05.10]
  misc_feature (25)..(320): NCBI GI: 156040635 Blast Desc: SS1G_12334 [Sclerotinia sclerotiorum 1980] gi|154696390|gb|EDN96128.1| SS1G_12334 [Sclerotinia sclerotiorum 1980]
  misc_feature (25)..(288): NCBI GI: 46115490 Blast Desc: FG03587.1 [Gibberella zeae PH-1]
  misc_feature (48)..(265): NCBI GI: 256731250 Blast Desc: NECHADRAFT_96046 [Nectria haematococca mpVI 77-13-4]
  misc_feature (51)..(316): NCBI GI: 169618080 Blast Desc: SNOG_12228 [Phaeosphaeria nodorum SN15] gi|111059520|gb|EAT80640.1| SNOG_12228 [Phaeosphaeria nodorum SN15]
  misc_feature (18)..(236): NCBI GI: 46111019 Blast Desc: FG02391.1 [Gibberella zeae PH-1]
  misc_feature: Useful for introducing or modulating the production of volatile compounds
MRTQLGFYTYRIPKASHVHKDVVMGTQSDVASWFSTQEHIIPSSVKTIEKLNAVLGELEQNIAIGISDNGGPETTAEDKIKVESYIDVVAISHEFVTDHCHEKTLRELPKSTPVIAPDKAFKLINSWNHFDTVIETPAFLGAEAGDWRDALKCELLPSWIGIGRVVTPGNQLYYHSAIIVAFMNRITSDTEGQKDGENGEAIIYSPHGIDAGDLAGVRASGIRTLALLHGLHDVRIWMTKQLNLGGLNGAAAARECRAKYWITTHDEVKKGSGFITPLLRRTKWSLAEVIRKEVRKADSTGNTGPGFEFVELGSGDGLILNRS

SEQ ID NO: 8442 - DNA, 1231 bp, Muscodor strobelii
  misc_feature: SGI EST ID NO. CUFF.20460.0
  misc_feature: Variant of the nucleotide sequence at SEQ ID NO 8440
cccttggttgcaggggactcaatctgatgtcgcaagctggttttcgacgcaagagcatatcattccgtctagcgtcaagactattgaaaagttgaacgctgtgcttggtgagttggagcaaaacatcgctattgggataagtgacaacggcggaccggaaacgacagcagaagacaagatcaaggtggaatcgtacatagatgttgtagcgatctctcatgaattcaccgatcactgccatgagaaaacgttgcgtgaactgccaaagagcacaccggtcattgcgcctgataaggcatttaaattgataaactcatggaatcatttcgatacggtcatcgagaccccagcgtttttgggcgcggaggctggagactggcgcgatgctcttaaatgcgagctgttgccgtcctggattggcatcggacgtgttgtgacaccaggtaatcaactgtattaccactctgctataatcgtggctttcatgaacagaattacaagcgacacagagggacaaaaagatggagagaatggcgaggccatcatctactcgccccacggaattgatgctggcgatctagcgggcgtcagagcatccggcattcgcactctcgctctattacatggtctgcacgacgtccgtatttggatgacaaaacaattgaatcttggtggcttgaacggtgccgccgcagctcgcgaatgtcgtgctaaatactggatcacaacacacgacgaggtcaaaaaggggagtggcttcattacgccgcttctcagaaggacgaaatggtcgcttgctgaggtcattaggaaggaagtacggaaagcagacagcacaggcaatacgggtcctgggtttgaatttgtcgaattaggatctggtgatggtttgattctgaacagatcttgattcgcttcatatgagatagctttgttactcatcagttatggtagtgaaatctcattatcttgtagtcatgacaggtcggaatactgtctctctggcgagcctgccttctcggctcacttcaatacacgcccagtcgtgacttctcgtttagaaacccccctccagtcaattttccagctcatgctagcttcaagcattgtttatcaagctgtcctatccagattcgtaagtcccttcctcgacggcgtgacttccaacctcgtgactcattctactctcggccagatttgggaggcgctttgttttctctttcctaattgc

SEQ ID NO: 8443 - DNA, 1485 bp, Muscodor strobelii
  misc_feature: SGI cDNA ID NO. 562599
  misc_feature: Encodes the peptide sequence at SEQ ID NO 8444
atggcggccgtccaacatccatcgatgaacctttccaacgtcgccggcacgtggctgtatgaatcaaaaacacatatactactaagttttggtttcttgtctgcgttctatctacttgtagtcggcatctatcgcgtctattttcaccccctatctggatttcctggccccaaatccaatgcactaacaggactcattgagcactggaaaatacccaactacgcgttcgaaggagatggcgtctcagtcattggcgccgagtcaactcacatgcaccgccgccaaaggagaaccctcgcatatgcattcagtgacgccgccctcaaggagcaagagggaattattactcaatatattgatcttctcagtatgaaagctaccttccatatggagcccttggatattggctatgtgactaggcttagtgagaaagctgcgactggtaaaccagtcaatattgtgctaacgcagtcgccttctttcctctgcaggaattggttgaacttcaccacgttcgatattatcggcgatctcgtctttgcagattctttccacagtttggacagcagtgactaccacccttacgttttaaatttcttcagagggatcagaggcggggctagaaagcgatttcttcggacttttccattgttcaagcccatcatctacggcctttttggagatgaagatgagagatttgaccaagagcagaggaagatgggaatggcaaaaatgaaagcacgaatggctcttggtgtaacgcccaaagacggtcaacaagatatcaccacctatatgctgaaaaagaatcgtgacggagagagaggaatgcatgataacgaagtaatcatgaattcgtttctactcatcggggccggtagcgaaacaacggccacttctctctcaggtttcttttggaatgtcggcaatgattctagagtttacactctactcgctaatgaaattcgagaagcttttcaggacgagtcggagatcaacatgacaagcacgcgccgacttgagtatctcaaggcggttattgaggaaaatcttcgaatttatcctcctgcgggcgaaacaccgccaagagtgtgcccgggagctgaaatcgatggcaaatggattccgaaagggactctctgttcagtgtcacaattcgcaacgttccgaaacccaaagaacttcaaatcaccaaattcatttattcccgaacgatggctcgcgccgggtcatcttgcttacgacccacagtacgcgggggatgtcaaggaagtattcaaaccattcagctctggaccgcgcgattgtattgggaaaaatctagcctattctgagattcgagtcgtgatttctcgcatcctctttcaattcgactttagtctaagtcctgggcaagacaattggtatgattcgcaggcgacttttattgtttgggataaagggcccttaaatgttgtgctcaaacgtagaacagcgcagggatga

SEQ ID NO: 8444 - protein, 494 aa, Muscodor strobelii
  misc_feature: SGI Peptide ID NO. 562599
  misc_feature (14)..(487): Pfam Id: PF00067 Pfam Desc: Cytochrome P450
  misc_feature (164)..(466): Pfam Id: PF00067 Pfam Desc: Cytochrome P450
  misc_feature (27)..(490): NCBI GI: 46109716 Blast Desc: FG01740.1 [Gibberella zeae PH-1]
  misc_feature (33)..(489): NCBI GI: 189211941 Blast Desc: cytochrome P450 3A17 [Pyrenophora tritici-repentis Pt-1C-BFP] gi|187979497|gb|EDU46123.1| cytochrome P450 3A17 [Pyrenophora tritici-repentis Pt-1C-BFP]
  misc_feature (41)..(488): NCBI GI: 39975105 Blast Desc: MGG_00301 [Magnaporthe grisea 70-15] gi|145018819|gb|EDK03098.1| MGG_00301 [Magnaporthe grisea 70-15]
  misc_feature (37)..(491): NCBI GI: 39968473 Blast Desc: MGG_02329 [Magnaporthe grisea 70-15] gi|145014094|gb|EDJ98735.1| MGG_02329 [Magnaporthe grisea 70-15]
  misc_feature (37)..(491): NCBI GI: 39943628 Blast Desc: MGG_03825 [Magnaporthe grisea 70-15] gi|145014513|gb|EDJ99081.1| MGG_03825 [Magnaporthe grisea 70-15]
  misc_feature (44)..(488): NCBI GI: 145236881 Blast Desc: An06g02670 [Aspergillus niger] gi|134075552|emb|CAK45082.1| protein product [Aspergillus niger]
  misc_feature (11)..(488): NCBI GI: 121716300 Blast Desc: benzoate 4-monooxygenase cytochrome P450 [Aspergillus clavatus NRRL 1] gi|119403916|gb|EAW14333.1| benzoate 4-monooxygenase cytochrome P450 [Aspergillus clavatus NRRL 1]
  misc_feature (79)..(490): NCBI GI: 145614919 Blast Desc: conserved [Magnaporthe grisea 70-15] gi|149209141|ref|XP_001521945.1| MGCH7_ch7g63 [Magnaporthe grisea 70-15] gi|86196018|gb|EAQ70656.1| MGCH7_ch7g63 [Magnaporthe
  misc_feature (27)..(492): NCBI GI: 169783630 Blast Desc: [Aspergillus oryzae RIB40] gi|83775021|dbj|BAE65144.1| protein product [Aspergillus oryzae]
  misc_feature (43)..(490): NCBI GI: 169775077 Blast Desc: [Aspergillus oryzae RIB40] gi|83769869|dbj|BAE60004.1| protein product [Aspergillus oryzae]
  misc_feature (82)..(459): SWISSPROT Homolog: EC 1.14.13.97 Taurochenodeoxycholate 6-alpha-hydroxylase
  misc_feature (82)..(459): SWISSPROT Homolog: EC 1.14.13.67 Quinine 3-monooxygenase
  misc_feature (82)..(459): SWISSPROT Homolog: EC 1.14.13.32 Albendazole monooxygenase
MAAVQHPSMNLSNVAGTWLYESKTHILLSFGFLSAFYLLVVGIYRVYFHPLSGFPGPKSNALTGLIEHWKIPNYAFEGDGVSVIGAESTHMHRRQRRTLAYAFSDAALKEQEGIITQYIDLLSMKATFHMEPLDIGYVTRLSEKAATGKPVNIVLTQSPSFLCRNWLNFTTFDIIGDLVFADSFHSLDSSDYHPYVLNFFRGIRGGARKRFLRTFPLFKPIIYGLFGDEDERFDQEQRKMGMAKMKARMALGVTPKDGQQDITTYMLKKNRDGERGMHDNEVIMNSFLLIGAGSETTATSLSGFFWNVGNDSRVYTLLANEIREAFQDESEINMTSTRRLEYLKAVIEENLRIYPPAGETPPRVCPGAEIDGKWIPKGTLCSVSQFATFRNPKNFKSPNSFIPERWLAPGHLAYDPQYAGDVKEVFKPFSSGPRDCIGKNLAYSEIRVVISRILFQFDFSLSPGQDNWYDSQATFIVWDKGPLNVVLKRRTAQG

SEQ ID NO: 8445 - DNA, 805 bp, Muscodor strobelii
  misc_feature: SGI EST ID NO. CUFF.20469.0
  misc_feature: Variant of the nucleotide sequence at SEQ ID NO 8443
cgggagctgaaatcgatggcaaatggattccgaaagggactctctgttcagtgtcacaattcgcaacgttccgaaacccaaagaacttcaaatcaccaaattcatttattcccgaacgatggctcgcgccgggtcatcttgcttacgacccacagtacgcgggggatgtcaaggaagtattcaaaccattcagctctggaccgcgcgattgtattgggaaaaatctagcctattctgagattcgagtcgtgatttctcgcatcctctttcaattcgactttagtctaagtcctgggcaagacaattggtatgattcgcaggcgacttttattgtttgggataaagggcccttaaatgttgtgctcaaacgtagaacagcgcagggatgaagacatatggccatctcaattgacgtctggctatcaagaagctgaatagactggtcaatttggtatttcagggttgtcctatagggagttgtaggaaagatgcatgctacttgagtcatcacttgaaaggttgtaattacaggtgcaggtgcacatgattatcattgcggtcgtcaatgcagacactgaggtagctgatcgctctatctaccgaagataccggattgatttccgagagggctggacgcgtgctaatccaacatggtgtcgttctcctttctcccaactatgcagatgttttctttctcgtacttttgggttgtatgttcagcctcataacaagtgtttgcttgaaagatgtttctcccgcaacaaaacatagttgaataagttggtattaacaagcgcaatctctg

SEQ ID NO: 8446 - DNA, 474 bp, Muscodor strobelii
  misc_feature: SGI cDNA ID NO. 562600
  misc_feature: Elevated expression when VOC is produced
  misc_feature: Encodes the peptide sequence at SEQ ID NO 8447
atgatagtcaagatggcagcagaagtcaaagccttcttctcatccccacagttcgctgtcgttggcgcaagctccaatccagccaaattcggtcacaaagtactggcatggtaccaggctcacaaactccccgtcacacctatcaatcctgtgtcccagacaatcacaacgtcctatggggagtacgtcgctgttaagtcggtcaccgagcttcccgagccaaagcaaacgtcattgtctatcatcaccgcgccacccattacactcgaggtgctaaaggaggctcagcgtgtaggcatcccagctgtttggctccagcctggtacattcaacgataaggtcgtgaacttcctcaaaggaggagatgaggggtattccggcaagtctgtctttggagacggtgggatgggaggcgaggggtggtgcgttcttgtcgatggagagaagggtatgagagctgctggcaagctctga

SEQ ID NO: 8447 - protein, 157 aa, Muscodor strobelii
  misc_feature: SGI Peptide ID NO. 562600
  misc_feature (7)..(157): NCBI GI: 261352776 Blast Desc: conserved [Verticillium albo-atrum VaMs.102]
  misc_feature (7)..(157): NCBI GI: 256726848 Blast Desc: [Nectria haematococca mpVI 77-13-4]
  misc_feature (7)..(157): NCBI GI: 46121711 Blast Desc: FG05234.1 [Gibberella zeae PH-1]
  misc_feature (9)..(155): NCBI GI: 169774917 Blast Desc: [Aspergillus oryzae RIB40] gi|238496459|ref|XP_002379465.1| conserved [Aspergillus flavus NRRL3357] gi|83769789|dbj|BAE59924.1| protein product oryzae]
  misc_feature (9)..(155): NCBI GI: 121715690 Blast Desc: conserved [Aspergillus clavatus NRRL 1] gi|119403611|gb|EAW14028.1| conserved [Aspergillus clavatus NRRL 1]
  misc_feature (5)..(155): NCBI GI: 226286256 Blast Desc: conserved [Paracoccidioides brasiliensis Pb01]
  misc_feature (9)..(157): NCBI GI: 145602450 Blast Desc: MGG_04896 [Magnaporthe grisea 70-15] gi|145010872|gb|EDJ95528.1| MGG_04896 [Magnaporthe grisea 70-15]
  misc_feature (5)..(155): NCBI GI: 226291721 Blast Desc: conserved [Paracoccidioides brasiliensis Pb18]
  misc_feature (5)..(155): NCBI GI: 225679945 Blast Desc: conserved [Paracoccidioides brasiliensis Pb03]
  misc_feature (5)..(155): NCBI GI: 240282116 Blast Desc: conserved [Ajellomyces capsulatus H143]
  misc_feature: Useful for introducing or modulating the production of volatile compounds
MIVKMAAEVKAFFSSPQFAVVGASSNPAKFGHKVLAWYQAHKLPVTPINPVSQTITTSYGEYVAVKSVTELPEPKQTSLSIITAPPITLEVLKEAQRVGIPAVWLQPGTFNDKVVNFLKGGDEGYSGKSVFGDGGMGGEGWCVLVDGEKGMRAAGKL

SEQ ID NO: 8448 - DNA, 1183 bp, Muscodor strobelii
  misc_feature: SGI EST ID NO. CUFF.20497.1
  misc_feature: Variant of the nucleotide sequence at SEQ ID NO 8446
ctttaagctcaatacattaatcagcgtttatcacttgataaaatgatctacttttgaaggagatctgaaggatacctaatacatttgaaacaggtgggtgtaagtaggtggggtgattactgatagatcatgcccctcatacccagcatttgagcacgccttacccagagaagatgttgacgattctaagaacgttagcatcttccttcttagtatcccggtttagtcaattcatttatccaagaggcatcgacttgtttccgtgatagatgatagtcaagatggcagcagaagtcaaagccttcttctcatccccacagttcgctgtcgttggcgcaagctccaatccagccaaattcggtcacaaagtactggcatggtaccaggctcacaaactccccgtcacacctatcaatcctgtgtcccagacaatcacaacgtcctatggggagtacgtcgctgttaagtcggtcaccgagcttcccgagccaaagcaaacgtcattgtctatcatcaccgcgccacccattacactcgaggtgctaaaggaggctcagcgtgtaggcatcccagctgtttggctccagcctggtacattcaacgataaggtcgtgaacttcctcaaaggaggagatgaggggtattccggcaagtctgtctttggagacggtgggatgggaggcgaggggtggtgcgttcttgtcgatggagagaagggtatgagagctgctggcaagctctgaccttctgaacatatgttatgatgacattctacgatctgattaaagagatgggctggtatgtttcttctcatgagaggactaaagtcgctggattctagatgatcgatggaggtgggcgctggctggtattcggacaatatcagtgactagggagccgtggtggatgaggcattggagtaggtcaaaaggagcacagcagcagcacaacgttgcatattgtgacattgtctgcatatgaaggctccagaatacgttcgccagacctataaggaatgaagaatagcgcgtcgtaccatacaatcatcctaccggatacgatatggccgccgcatgggccaaagagtcttatatccacatcacagtgatactgtatagctgtcgttgaagatccacacagcgcgtattcacgtgctcgcgtattctcgtatgcacacctgttc

SEQ ID NO: 8449 - DNA, 447 bp, Muscodor strobelii
  misc_feature: SGI cDNA ID NO. 562601
  misc_feature: Encodes the peptide sequence at SEQ ID NO 8450
atggccgctaattacgagaataacgggcaggcttctacgaactacaaggaggcgttctctttgttcgacaagcgaggcaacggccgtgtcactctggacagcctaggcgatctactgcgcgcctgcggccagaacccaaccctctccgagatcagagacttagaaaggagtgttggcggtgaattcgatttcgagacattctcgaaaatcctgaaccgaccgggcggattccgcgaccctggcgagccggaggagtactgccgcggattccaggtgttcgacaaagacatgactggcttcattggagttggacagctcaaatacatccttacaaacttgggcgagaaaatgacggatgacgaggtcgacgagttgctcaaggctgtcgacaccagctccggccaggtcaactacacggatctcgtccggaccatccttgccaactga

SEQ ID NO: 8450 - protein, 148 aa, Muscodor strobelii
  misc_feature: SGI Peptide ID NO. 562601
  misc_feature (14)..(42): Pfam Id: PF00036 Pfam Desc: EF hand
  misc_feature (1)..(148): NCBI GI: 225559159 Blast Desc: myosin [Ajellomyces capsulatus G186AR]
  misc_feature (1)..(148): NCBI GI: 154273741 Blast Desc: myosin regulatory light chain cdc4 [Ajellomyces capsulatus NAm1] gi|150415330|gb|EDN10683.1| myosin regulatory light chain cdc4 [Ajellomyces capsulatus NAm1]
  misc_feature (3)..(148): NCBI GI: 46121713 Blast Desc: FG05235.1 [Gibberella zeae PH-1]
  misc_feature (1)..(148): NCBI GI: 39960829 Blast Desc: conserved [Magnaporthe grisea 70-15] gi|145010965|gb|EDJ95621.1| conserved [Magnaporthe grisea 70-15]
  misc_feature (3)..(148): NCBI GI: 261352777 Blast Desc: myosin regulatory light chain cdc4 [Verticillium albo-atrum VaMs.102]
  misc_feature (1)..(148): NCBI GI: 239614268 Blast Desc: myosin regulatory light chain cdc4 [Ajellomyces dermatitidis ER-3]
  misc_feature (10)..(148): NCBI GI: 225679923 Blast Desc: calmodulin [Paracoccidioides brasiliensis Pb03]
  misc_feature (1)..(148): NCBI GI: 261204387 Blast Desc: myosin regulatory light chain cdc4 [Ajellomyces dermatitidis SLH14081] gi|239587192|gb|EEQ69835.1| myosin regulatory light chain cdc4 [Ajellomyces dermatitidis SLH14081]
  misc_feature (8)..(148): NCBI GI: 256727413 Blast Desc: [Nectria haematococca mpVI 77-13-4]
  misc_feature (7)..(148): NCBI GI: 212543929 Blast Desc: cytokinesis EF-hand protein Cdc4, [Penicillium marneffei ATCC 18224] gi|210067026|gb|EEA21119.1| cytokinesis EF-hand protein Cdc4, [Penicillium marneffei ATCC 18224]
  misc_feature (16)..(142): SWISSPROT Homolog: EC 2.7.11.1 Non-specific serine/threonine protein kinase
MAANYENNGQASTNYKEAFSLFDKRGNGRVTLDSLGDLLRACGQNPTLSEIRDLERSVGGEFDFETFSKILNRPGGFRDPGEPEEYCRGFQVFDKDMTGFIGVGQLKYILTNLGEKMTDDEVDELLKAVDTSSGQVNYTDLVRTILAN

SEQ ID NO: 8451 - DNA, 849 bp, Muscodor strobelii
  misc_feature: SGI EST ID NO. CUFF.20533.1
  misc_feature: Variant of the nucleotide sequence at SEQ ID NO 8449
gcgcaacacaaacaagcccagcgcactccgtcgcaacgcagctctgcaacctcaatcctggatatctttagcattgctctggccactacactccgcgcgcatctgatacttgactcaatcacatccaagtaaccaaaatggccgctaattacgagaataacgggcaggcttctacgaactacaaggaggcgttctctttgttcgacaagcgaggcaacggccgtgtcactctggacagcctaggcgatctactgcgcgcctgcggccagaacccaaccctctccgagatcagagacttagaaaggagtgttggcggtgaattcgatttcgagacattctcgaaaatcctgaaccgaccgggcggattccgcgaccctggcgagccggaggagtactgccgcggattccaggtgttcgacaaagacatgactggcttcattggagttggacagctcaaatacatccttacaaacttgggcgagaaaatgacggatgacgaggtcgacgagttgctcaaggctgtcgacaccagctccggccaggtcaactacacggatctcgtccggaccatccttgccaactgagaagttagaggttctggtacggtaaggcggaaggagttttgaggggccgggagtttttctgtttaaacattgttgcaaagggactatgtatgcatgaattggcgacgacattggcgtttctgcattgattgcctggctgttcggccaggcgtatatgagttggactggcctggctgggtcttctgagtcttgagtttcacacttagaaatgtagtgataaagagctatgggcactgcaaaaaaaaggatatctagataacactcg

SEQ ID NO: 8452 - DNA, 2112 bp, Muscodor strobelii
  misc_feature: SGI cDNA ID NO. 562602
  misc_feature: Encodes the peptide sequence at SEQ ID NO 8453
atggctccggacaagtatcgaacccctccacaagctccgccgaccttcacaggcaccaaggagtctattgtagctgatgtcaaggagctctgcgacaacactcgctcgctgcttgacaagatcgccgccgatgtttcgcctgacgatgctaccttcgcgtctgtcttggctcccatgaccgttgacgagaacgaagccactctgagcaaccgtattctaggcttctaccaatatgtatcggccgacgccgatctacgcaatgcctcgactgagggcgagaagattatggacgagttctctattgaatgtaacatgcgcgaggatatctatcagctggtcgaagccgccttccagtcccagaaggcgaaagagccgaacctcgatcctgaaagcacgcgcctacttgacaaagaacgtaaaggatatatcaagaatggcctaggtcttccccaggggccccaacgtgaccggttcaaagagattaagaagcgtttgagccagatcggcatagccttccagaagaacctgaacgaagagagcgggggcatatggtttaccccggaggagttggacggtgtaccccaagatgttctcgatggcctcgacaagggcgaaggcgagaacgagggtaaaatcaagctcagcttcaagtacccggaccttttcccgaccctcaagtttgctaagaaccccgaaacgcgcaagagggtatttattgctaatgaaaataaatgcaacgaaaatattcctttgtttaaagaggcgattctgctacgtgacgaggcagcacgaatgttgggttatccaaaccacgctgcttcccggatagaggacaagatggccaaggtccccgagactgtcaacacattcctcgctgacttacgaactaagctggccccaggtggcgtcaaggagcaagcacatctcttagaactcaagaagaaggatgtagaatcacgagggctttctttcgacggcaactactacctttgggactaccgattttacgacaggatgatggtagagcaggagtataacatcgatgagaccaagattgccgagtattttcctctccagtcgacaattcgcggcatgcttcaaattttcgaggagatatttggattggccttcgtcgagctcgacaccgaggcgcggcagaagctctctcccactggcaaagcagaagacattgcctggcaccaggacgtcataatcttctctgtttggaacgatgcatccgagggcgatggatttgtcggatatctgtatctcgatctgcatccccggcagggcaaatatgggcacgccgccaacttcaatctgcagccaggatacttgcagaaagacggcagccgccgttatcctgctacggcactagtatgcaacttctcgaaaccgacagagaagaagccctccctgctgaagcatgacgaagtggtcacactcttccacgagttgggccacgggatccatgatctcgcgggacgatgcacctacagccgattccacggcacgtcgacagttagagatttcgtagaggcgcccagtcaaatgcttgagaattggtgctggacgtctagtcaactcaagtcactctccaagcattacgagacgggcgagaagataccggatgatctgatcgagaaactcatctcgaccaaacacgtcaacgatgcactgttcaatctgcgacaacttcatttcggtatctttgacatgactgtccactcaccagcgacgcatgaggaattggagaagctggacgccagcaaactctacaacgaattgcgggctgagatctgtggcaataagggccctgagtccgaaggccaggggagtacgtggggccatggtcaggcaacttttggccacctaatcggagggtatgatgcagggtattacggctacctttcgagcgaggtctactcgaccgacatgttctattcgagttttaagaaaaatccgatggacggcaaggaaggccgtagatatcgccacacggtgctagaaaaaggtggaagtcaggatgagatggaaacactgaagcagttcctcggaagggagccgagtagcgatgcgttctaccgtgagctgggaattacggctgcatga

SEQ ID NO: 8453 - protein, 703 aa, Muscodor strobelii
  misc_feature: SGI Peptide ID NO. 562602
  misc_feature (224)..(700): Pfam Id: PF01432 Pfam Desc: Peptidase family M3
  misc_feature (5)..(702): NCBI GI: 116195174 Blast Desc: CHGG_04185 [Chaetomium globosum CBS 148.51] gi|88180098|gb|EAQ87566.1| CHGG_04185 [Chaetomium globosum CBS 148.51]
  misc_feature (5)..(700): NCBI GI: 171691134 Blast Desc: protein product [Podospora anserina] gi|170945515|emb|CAP71627.1| protein product [Podospora anserina]
  misc_feature (4)..(700): NCBI GI: 145602498 Blast Desc: MGG_04858 [Magnaporthe grisea 70-15] gi|145010917|gb|EDJ95573.1| MGG_04858 [Magnaporthe grisea 70-15]
  misc_feature (1)..(701): NCBI GI: 261204391 Blast Desc: metallopeptidase MepB [Ajellomyces dermatitidis SLH14081] gi|239587194|gb|EEQ69837.1| metallopeptidase MepB [Ajellomyces dermatitidis SLH14081] gi|239614266|gb|EEQ91253.1|
  misc_feature (1)..(701): NCBI GI: 212543933 Blast Desc: metallopeptidase MepB [Penicillium marneffei ATCC 18224] gi|210067028|gb|EEA21121.1| metallopeptidase MepB [Penicillium marneffei ATCC 18224]
  misc_feature (1)..(701): NCBI GI: 115399860 Blast Desc: ATEG_06341 [Aspergillus terreus NIH2624] gi|114191185|gb|EAU32885.1| ATEG_06341 [Aspergillus terreus NIH2624]
  misc_feature (1)..(700): NCBI GI: 242788071 Blast Desc: metallopeptidase MepB [Talaromyces stipitatus ATCC 10500] gi|218721295|gb|EED20714.1| metallopeptidase MepB [Talaromyces stipitatus ATCC 10500]
  misc_feature (1)..(700): NCBI GI: 169766102 Blast Desc: [Aspergillus oryzae RIB40] gi|238482735|ref|XP_002372606.1| metallopeptidase MepB [Aspergillus flavus NRRL3357] gi|83765377|dbj|BAE55520.1| protein
  misc_feature (1)..(700): NCBI GI: 119483024 Blast Desc: metallopeptidase MepB [Neosartorya fischeri NRRL 181] gi|119409695|gb|EAW19643.1| metallopeptidase MepB [Neosartorya fischeri NRRL 181]
  misc_feature (1)..(700): NCBI GI: 145237272 Blast Desc: An07g01970 [Aspergillus niger] gi|134075750|emb|CAK48098.1| protein product [Aspergillus niger]
  misc_feature (10)..(700): SWISSPROT Homolog: EC 3.4.24.37 Saccharolysin
MAPDKYRTPPQAPPTFTGTKESIVADVKELCDNTRSLLDKIAADVSPDDATFASVLAPMTVDENEATLSNRILGFYQYVSADADLRNASTEGEKIMDEFSIECNMREDIYQLVEAAFQSQKAKEPNLDPESTRLLDKERKGYIKNGLGLPQGPQRDRFKEIKKRLSQIGIAFQKNLNEESGGIWFTPEELDGVPQDVLDGLDKGEGENEGKIKLSFKYPDLFPTLKFAKNPETRKRVFIANENKCNENIPLFKEAILLRDEAARMLGYPNHAASRIEDKMAKVPETVNTFLADLRTKLAPGGVKEQAHLLELKKKDVESRGLSFDGNYYLWDYRFYDRMMVEQEYNIDETKIAEYFPLQSTIRGMLQIFEEIFGLAFVELDTEARQKLSPTGKAEDIAWHQDVIIFSVWNDASEGDGFVGYLYLDLHPRQGKYGHAANFNLQPGYLQKDGSRRYPATALVCNFSKPTEKKPSLLKHDEVVTLFHELGHGIHDLAGRCTYSRFHGTSTVRDFVEAPSQMLENWCWTSSQLKSLSKHYETGEKIPDDLIEKLISTKHVNDALFNLRQLHFGIFDMTVHSPATHEELEKLDASKLYNELRAEICGNKGPESEGQGSTWGHGQATFGHLIGGYDAGYYGYLSSEVYSTDMFYSSFKKNPMDGKEGRRYRHTVLEKGGSQDEMETLKQFLGREPSSDAFYRELGITAA

SEQ ID NO: 8454 - DNA, 2955 bp, Muscodor strobelii
  misc_feature: SGI EST ID NO. CUFF.20563.0
  misc_feature: Variant of the nucleotide sequence at SEQ ID NO 8452
gcggacctcagctccaggttacacgtagacaggacttcaagcttccgttgatttgtatccagtcacgttgacaaacatcgaattcgcgaggctctcctgccatccattgccatcgggactcagagcataccatccaactgtttccgtcgccaacaatctttcattctgttcctttcctttcgtaaggtagcctccaaccgtaggtgctagagtagatacctagtagcagtgctcacggagtcctgcattcccatcaccttgcctcaagtgcccctcatccttctcattggtgaacctggcagcctcaagaagaaagtccctgcccctcaccctccccttcacctccctccttgtcctcttctccgccattatattcaacctggctgccccacggtcactccctcgaatcacttcatttttgaaccatcttcgctttagaccttctcccactctcccccgatctatcattccaagtaggccactcgtcaccaccgtcatggctccggacaagtatcgaacccctccacaagctccgccgaccttcacaggcaccaaggagtctattgtagctgatgtcaaggagctctgcgacaacactcgctcgctgcttgacaagatcgccgccgatgtttcgcctgacgatgctaccttcgcgtctgtcttggctcccatgaccgttgacgagaacgaagccactctgagcaaccgtattctaggcttctaccaatatgtatcggccgacgccgatctacgcaatgcctcgactgagggcgagaagattatggacgagttctctattgaatgtaacatgcgcgaggatatctatcagctggtcgaagccgccttccagtcccagaaggcgaaagagccgaacctcgatcctgaaagcacgcgcctacttgacaaagaacgtaaaggatatatcaagaatggcctaggtcttccccaggggccccaacgtgaccggttcaaagagattaagaagcgtttgagccagatcggcatagccttccagaagaacctgaacgaagagagcgggggcatatggtttaccccggaggagttggacggtgtaccccaagatgttctcgatggcctcgacaagggcgaaggcgagaacgagggtaaaatcaagctcagcttcaagtacccggaccttttcccgaccctcaagtttgctaagaaccccgaaacgcgcaagagggtatttattgctaatgaaaataaatgcaacgaaaatattcctttgtttaaagaggcgattctgctacgtgacgaggcagcacgaatgttgggttatccaaaccacgctgcttcccggatagaggacaagatggccaaggtccccgagactgtcaacacattcctcgctgacttacgaactaagctggccccaggtggcgtcaaggagcaagcacatctcttagaactcaagaagaaggatgtagaatcacgagggctttctttcgacggcaactactacctttgggactaccgattttacgacaggatgatggtagagcaggagtataacatcgatgagaccaagattgccgagtattttcctctccagtcgacaattcgcggcatgcttcaaattttcgaggagatatttggattggccttcgtcgagctcgacaccgaggcgcggcagaagctctctcccactggcaaagcagaagacattgcctggcaccaggacgtcataatcttctctgtttggaacgatgcatccgagggcgatggatttgtcggatatctgtatctcgatctgcatccccggcagggcaaatatgggcacgccgccaacttcaatctgcagccaggatacttgcagaaagacggcagccgccgttatcctgctacggcactagtatgcaacttctcgaaaccgacagagaagaagccctccctgctgaagcatgacgaagtggtcacactcttccacgagttgggccacgggatccatgatctcgcgggacgatgcacctacagccgattccacggcacgtcgacagttagagatttcgtagaggcgcccagtcaaatgcttgagaattggtgctggacgtctagtcaactcaagtcactctccaagcattacgagacgggcgagaagataccggatgatctgatcgagaaactcatctcgaccaaacacgtcaacgatgcactgttcaatctgcgacaacttcatttcggtatctttgacatgactgtccactcaccagcgacgcatgaggaattggagaagctggacgccagcaaactctacaacgaattgcgggctgagatctgtggcaataagggccctgagtccgaaggccaggggaggtaagtcatgttccaatttggctgacattgcattcatgtccgctgtttctttcgctaacagtgtgataatagtacgtggggccatggtcaggcaacttttggccacctaatcggagggtatgatgcagggtattacggctacctttcgagcgaggtctactcgaccgacatgttctattcgagttttaagaaaaatccgatggacggcaaggaaggccgtagatatcgccacacggtgctagaaaaaggtggaagtcaggatgagatggaaacactgaagcagttcctcggaagggagccgagtagcgatgcgttctaccgtgagctgggaattacggctgcatgactgagcgatagaccgcggttgtgaagtgaccataatcaatggtctctgactctatataaaatagatgggtgctgtgtaagattattatcgagctagctattgtcccgtaacaaatgggccacgatatcgaccgtagtcttgcccgcacagacaggaggacagaaggcgacttgcaatcggtgcattgatatgagtaaacgggtactaaaacatgaaggcagtgtgtcacaagcacagtattgcttcaaaggtactctcacaaggcttgggaagca

SEQ ID NO: 8455 - DNA, 1323 bp, Muscodor strobelii
  misc_feature: SGI cDNA ID NO. 562603
  misc_feature: Encodes the peptide sequence at SEQ ID NO 8456
atgaaacgaagtgcacctacctctgaaaagagtccaaagaaaacgaaaagacctcgccctgaagtacctgagtatcatgcgactccttcattgcgggacgcatcgggagaaatcatctggcccgccccaacggtacagatcgagggagccaggaatttcatcctagaatgtgtcgccgctcaaaagaggacggtcattatccccgacaaagatgctgatggattgacctctggtgccatcttgcagaagactctctgtttactaggtctgaaacctgacttaatcaccgctcatctccttcaaaagggaagcaatgtccatgagcaaaatgagcgtgaggccatagcagctcatgagccgagctacatatttgttctcgatcaaggctctagaaaatctcctcccattattgagcaaccgcaccgagcactggtcattgaccatcactgggcgctggacgacgatttcccagagaagtctgagcatgtatcggcttgctcttctcctccggtcgcgacgactgcattacttacgtaccacatatgctcagctcttcatgacgatgttcaaagctcctgcgactggttatgtgtgatgggtacacatggtgacttgggcacgactttaaaatgggaacctccatttcccgatatgaaggcaacttttaagacgtataccaagaaagcgataaacgacgccgtctcattgataaatgcaccgcgacggacatccacttacgatgttccaagagcttgggcggcattgcttgcagcaaactcaccctccgagttgctaaagaacccacaactactagcagcgagagctgaagtaaatgctgaggtcgagagatgtacacatacgcctcccaagttctcaaaagatgccaagattgcagtctttcgaataaactcgcaggcccaggtgcatccggtaatagcaacaagatgggctggtcatttgcagtcgcctaagctagaggtcatactcgttgccaacgagggctatctaccagggatggtaaacttctcatgtcgtattccgcgtaccgcgagatcgcgcgatccgccggtaaatattatcgaaattctccggggtatagcagatcaggcggaagattctactctaagagaaagattgggcgaatctttcgcccgaggccacaaagaagcaagcggtggcattgtgccaaaagaggtctttgaagagttcctcgccgttctcgagattgggaagaaaccagatggagataccaagccgaagaagacgtctcctgccaagcaatctaacacgctgactaactactttaccaagaaagaaagctaa

SEQ ID NO: 8456 - protein, 440 aa, Muscodor strobelii
  misc_feature: SGI Peptide ID NO. 562603
  misc_feature (57)..(202): Pfam Id: PF01368 Pfam Desc: DHH family
  misc_feature (57)..(163): Pfam Id: PF01368 Pfam Desc: DHH family
  misc_feature (21)..(437): NCBI GI: 46114980 Blast Desc: FG03332.1 [Gibberella zeae PH-1]
  misc_feature (21)..(439): NCBI GI: 189195300 Blast Desc: conserved [Pyrenophora tritici-repentis Pt-1C-BFP] gi|187979867|gb|EDU46493.1| conserved [Pyrenophora tritici-repentis Pt-1C-BFP]
  misc_feature (2)..(437): NCBI GI: 169596751 Blast Desc: SNOG_01145 [Phaeosphaeria nodorum SN15] gi|160707366|gb|EAT90794.2| SNOG_01145 [Phaeosphaeria nodorum SN15]
  misc_feature (23)..(407): NCBI GI: 256724338 Blast Desc: NECHADRAFT_24662 [Nectria haematococca mpVI 77-13-4]
  misc_feature (81)..(437): NCBI GI: 154313324 Blast Desc: BC1G_05359 [Botryotinia fuckeliana B05.10] gi|150849428|gb|EDN24621.1| BC1G_05359 [Botryotinia fuckeliana B05.10]
  misc_feature (143)..(438): NCBI GI: 85092489 Blast Desc: NCU06018 [Neurospora crassa OR74A] gi|28920832|gb|EAA30183.1| conserved [Neurospora crassa OR74A]
  misc_feature (40)..(436): NCBI GI: 71023345 Blast Desc: UM05755.1 [Ustilago maydis 521] gi|46100721|gb|EAK85954.1| UM05755.1 [Ustilago maydis 521]
  misc_feature (144)..(407): NCBI GI: 242206338 Blast Desc: [Postia placenta Mad-698-R] gi|220731890|gb|EED85730.1| [Postia placenta Mad-698-R]
  misc_feature (225)..(437): NCBI GI: 156042990 Blast Desc: SS1G_11295 [Sclerotinia sclerotiorum 1980] gi|154695679|gb|EDN95417.1| SS1G_11295 [Sclerotinia sclerotiorum 1980]
  misc_feature (1)..(160): NCBI GI: 156042990 Blast Desc: SS1G_11295 [Sclerotinia sclerotiorum 1980] gi|154695679|gb|EDN95417.1| SS1G_11295 [Sclerotinia sclerotiorum 1980]
MKRSAPTSEKSPKKTKRPRPEVPEYHATPSLRDASGEIIWPAPTVQIEGARNFILECVAAQKRTVIIPDKDADGLTSGAILQKTLCLLGLKPDLITAHLLQKGSNVHEQNEREAIAAHEPSYIFVLDQGSRKSPPIIEQPHRALVIDHHWALDDDFPEKSEHVSACSSPPVATTALLTYHICSALHDDVQSSCDWLCVMGTHGDLGTTLKWEPPFPDMKATFKTYTKKAINDAVSLINAPRRTSTYDVPRAWAALLAANSPSELLKNPQLLAARAEVNAEVERCTHTPPKFSKDAKIAVFRINSQAQVHPVIATRWAGHLQSPKLEVILVANEGYLPGMVNFSCRIPRTARSRDPPVNIIEILRGIADQAEDSTLRERLGESFARGHKEASGGIVPKEVFEEFLAVLEIGKKPDGDTKPKKTSPAKQSNTLTNYFTKKES

SEQ ID NO: 8457 - DNA, 4585 bp, Muscodor strobelii
  misc_feature: SGI EST ID NO. CUFF.20493.1
  misc_feature: Variant of the nucleotide sequence at SEQ ID NO 8455
aacgagtataatttcttcaatcgtatctatgaaactatttcgccatgccctccacgtgagatctctgtacacctctgtttcaagacttgcaactataaagactaccgtatctacaatgaaacgaagtgcacctacctctgaaaagagtccaaagaaaacgaaaagacctcgccctgaagtacctgagtatcatgcgactccttcattgcgggacgcatcgggagaaatcatctggcccgccccaacggtacagatcgagggagccaggaatttcatcctagaatgtgtcgccgctcaaaagaggacggtcattatccccgacaaagatgctgatggattgacctctggtgccatcttgcagaagactctctgtttactaggtctgaaacctgacttaatcaccgctcatctccttcaaaagggaagcaatgtccatgagcaaaatgagcgtgaggccatagcagctcatgagccgagctacatatttgttctcgatcaaggctctagaaaatctcctcccattattgagcaaccgcaccgagcactggtcattgaccatcactgggcgctggacgacgatttcccagagaagtctgagcatgtatcggcttgctcttctcctccggtcgcgacgactgcattacttacgtaccacatatgctcagctcttcatgacgatgttcaaagctcctgcgactggttatgtgtgatgggtacacatggtgacttgggcacgactttaaaatgggaacctccatttcccgatatgaaggcaacttttaagacgtataccaagaaagcgataaacgacgccgtctcattgataaatgcaccgcgacggacatccacttacgatgttccaagagcttgggcggcattgcttgcagcaaactcaccctccgagttgctaaagaacccacaactactagcagcgagagctgaagtaaatgctgaggtcgagagatgtacacatacgcctcccaagttctcaaaagatgccaagattgcagtctttcgaataaactcgcaggcccaggtgcatccggtaatagcaacaagatgggctggtcatttgcagtcgcctaagctagaggtcatactcgttgccaacgagggctatctaccagggatggtaaacttctcatgtcgtattccgcgtaccgcgagatcgcgcgatccgccggtaaatattatcgaaattctccggggtatagcagatcaggcggaagattctactctaagagaaagattgggcgaatctttcgcccgaggccacaaagaagcaagcggtggcattgtgccaaaagaggtctttgaagagttcctcgccgttctcgagattgggaagaaaccagatggagataccaagccgaagaagacgtctcctgccaagcaatctaacacgctgactaactactttaccaagaaagaaagctaatggtgcccgctaacatgcggctttatactacggatagtctgctacgcatcagtactgcctcttggtgaagcggtgctggtactagatttataatatatgtaataagtactgttcaacaacaattttaaacagaaagacacgagtggcagtgatcatttgatataaatgctcatttgcagattctcaggataaatagcgtgggaaacaccatggaacccgggtttaagtctgcagaacgcgccggatccgagcaatgcaattcactaagttgtctacaatgcttgagagagcatatattcatagctagaacgtaaacatctcagacgatataacaatataactcacctattcgatatccatgatgtcttcacaacctatgctttcaatcaatcatctagcctaaagctaatcatattggtcacatcagactaaaacaacaagttcagactggcacatgaagcgcaatgccaaccagcgtaggggtcagctcaacggccaatatatgcaaagtccgtccaatgcattatcattcgtctctatcctagacgttgtccggcgtttgacgctcatgatcataccatagccatgccttgtttcccaagcctcgatcatatagtcaactattcaaccactcaatcccgcaaaacagatgtgacagcggcgcgtagttgcatgcgagtgtatatttactcccccaaattcccttccaagccctaacgcctttctttgcaaatgcaccaacgccaaccccccgcttcaaagcgcactcgtctgatgcgcgcaattactgcacaacaattccctccaaggctctcatggctctggcgccttctttctcgaatgcagtaacgactgactctgcctcaaaacgcagtcgcttttcagcttgctcggcattgtgatagagccactcttcgacggtcatcggcttctcggagtctgacagctccttgccagttttcaggaaacggccagcagaggtcatgttctcctgctccaagtcgtccaatagcagttcgacatcaatagaagtccaggggtcggtggtgtcaagcccagcaatgacattacgctttgttggtgaagtccgaacccgagttggagtggaggcaattggagcgagggcgacgcgagtgctctttgctgaatccgagggtttggaggatgggggctggttctcggcatctgatgtctgaggtgactgagatggtgaagtagctggtatggggatggcaggaacagatttcttgctgggtcgaccgcgtttcttagggacggtcgtcgatccagataagctcgtccggacaaccgttgcattactcatgatactcatatcgtgtccctctgcaagctcatcgatgttttcgctgtcaacaacctggtcggacacaggctgtggctctgggctaggctcaacgggtgctttggccttcgacttcttactatctaccttagtagaagcaactcgcccacgggtagcacgtttcttgggggcaggtgcttcagctaaggcttgctcgggttcttcaacagcggtgcttgcacgtttgcgaccacgcggaagctttggctgtgggaccatctcctcgacctctggagccgtgaactcaggttctgatgcgaccacctcaggggggtcttcaagaacctcgacaggctcctctttcttgcttctacccttcttgcctttcgcggttgttcctttcttagctctgggccgcttagtaccgccttgagtcatgacagaggtcgtagtgagaacactgtcatcgttgtcgacttgctgatcgagtagagaagtcacgtcagaagcaacggtggtaacagtggcaacggattgaacactggcacgcgctgacttgccacgggccttcttttttggaaacatttcgttgaacatttcgcggtccgcgaagaatctgcagtcgggggatcgacgctgatgctcgtccatggggttgtccttgggctcccagccatcgagagcaagttcgcaatagggacactcagccatatcgtctgactccagagtaggggtgtaggcccatccggcatcgaccatctgcttgatcttgcacttccagcctctctttccctcgtgtggccatctaccagcaaacgtctccttacgggccgataccagctctggcagacatgcattttgggactcccaagggccaaccttgttggtgatggaggcgatgattgcgaatgcgcagtggggagacaaacgcaggtgctccatgcctgggtcatcctccacctcccatccggtcacattcttgcggcagtggaagcagacagtgttatcggggaactcgggcgtagcgtcgagatagaaaccagccttagcaaactgtgacaggttagaagacgtcaccaaaacgagacgatgacttacgggctcggggttcagttgccaggttggggccttgacggcgcctttgcctttacctttggcattggagccacgacgcgcggcgggttgagtggtgggttgtggtgtgcggaaggatgccaatcggccttcgaatgtgtagtagtgatcaggcacctcgggcatctcggccaacgaggcggaagccatgtcgattgcgccagtggccgatgtatcgatatgtctctgacttattataagaagttatcgaagatgtcgcggtggcgctgtacaaagagcagtaacgagtcgcggacgagacgagatcaagagatgaagtcgagggatgggttcagcatcgaacgcgggtgtgatgtgagcagacgcgtccgagccggagcggccaggatgtagagtatcgatcgaacaaatgaatcaattagcaattcacaatactatgcaagcttaaaaataggaaactggaaacacagaagcttttgaatgaaactaggatgctagatcgtagtgttttctgtttgcgtgtaatcgagtacgattgaggaagtgggatgcaagagaacattgaagcttgcaggtggaatggtactcatgtacctcgatagtacggtcgctctagcctctcggctttgtactctcgccccatgaggtacctctctaagcatgggtatgccccgtagcttctcattggcccgtaggcgcgtcatgtttacttctcgaaacggtatgattgcggtgggtacagcaacagc

SEQ ID NO: 8458 - DNA, 1161 bp, Muscodor strobelii
  misc_feature: SGI cDNA ID NO. 562604
  misc_feature: Reduced expression when VOC is produced
  misc_feature: Encodes the peptide sequence at SEQ ID NO 8459
atggcgtccaagtctgtcacccgtagcgagacggcgggacctctggtcgaagccggcaagacccaacaggcttcgaaagcgctgttggcccatatccaaaaggaagtcaaggagaaggctgcaaactccgagaagaaggacctcttggccgacgaggatggccctctcgatgaggtccccatctggcttcagttttccaccaagagacacattatcgactccggcagaaagctccgacccgttcgcctgaccgtgcctttccctctcgagaccgatacccagaaatctatttgcattatagtcgcttccccacagagatggtacaagaacctggttgcttctgaccaattccctgccgaacttcgacctcgcatctcccgcataatcgacattggcaagctcaaggccaagttcaagtcttacgagtctgtccgcgctctgtacaaccagcatgatatcttcttgggtgacgcccgcatcatcaatcgttgccctggtatcctcggcaagactttctacaagagccaaaagaaacgattaatacctatcaacatcgaggaacgaagacccaaagtggacggaaagagaacgaaacgcaccaaggcacaaggcaccgtcaactcctgcaacgctgcgcaattcgctagcgagattgagcgagcggtcggcagcgccctgctcaacctcgccccgtctacgaacgctatgatcagagtcggctgggcagactggaccgcagataaaatctgcgccaatgctgaggaggttatcaagtccgtcatcggaaagcacattcccaagaacaacctgcggagtatctacatcaaaggccctcagaccgtggccctgcctctgtacttgacggacgagctctgggtagacaaagagaaggatatagtaggcgacgactcggaggaggcgaagaagctgctcaagggcgagaaaccaaatatcggcaagaagaggaagtcgctcgagggaaccactgaggaatccgaacccgcccctaagaaatccaaaaaggccgaaccagctcccaagaagggaaagaaggctgtgaagcccgagagcaacgacgacaagctggacaaggagatcgcggaacgcaaagcagctctgaagaagcagaagaaggccgccaagaatgcccttgatgtctga

SEQ ID NO: 8459 - protein, 386 aa, Muscodor strobelii
  misc_feature: SGI Peptide ID NO. 562604
  misc_feature (6)..(385): NCBI GI: 46121201 Blast Desc: FG04979.1 [Gibberella zeae PH-1]
  misc_feature (6)..(385): NCBI GI: 256728090 Blast Desc: NECHADRAFT_70916 [Nectria haematococca mpVI 77-13-4]
  misc_feature (6)..(374): NCBI GI: 164424957 Blast Desc: NCU11321 [Neurospora crassa OR74A] gi|157070730|gb|EDO65101.1| conserved [Neurospora crassa OR74A]
  misc_feature (3)..(373): NCBI GI: 171679167 Blast Desc: protein product [Podospora anserina] gi|170937655|emb|CAP62313.1| protein product [Podospora anserina]
  misc_feature (3)..(369): NCBI GI: 116195014 Blast Desc: CHGG_04105 [Chaetomium globosum CBS 148.51] gi|88180018|gb|EAQ87486.1| CHGG_04105 [Chaetomium globosum CBS 148.51]
  misc_feature (8)..(366): NCBI GI: 39969825 Blast Desc: MGG_10522 [Magnaporthe grisea 70-15] gi|145010127|gb|EDJ94783.1| MGG_10522 [Magnaporthe grisea 70-15]
  misc_feature (1)..(385): NCBI GI: 156049943 Blast Desc: SS1G_07557 [Sclerotinia sclerotiorum 1980] gi|154691959|gb|EDN91697.1| SS1G_07557 [Sclerotinia sclerotiorum 1980]
  misc_feature (6)..(380): NCBI GI: 67541056 Blast Desc: AN6698.2 [Aspergillus nidulans FGSC A4] gi|40739326|gb|EAA58516.1| AN6698.2 [Aspergillus nidulans FGSC A4] gi|259480283|tpe|CBF71271.1| TPA: conserved [Aspergillus FGSC
  misc_feature (1)..(334): NCBI GI: 169766018 Blast Desc: [Aspergillus oryzae RIB40] gi|238482645|ref|XP_002372561.1| conserved [Aspergillus flavus NRRL3357] gi|83765335|dbj|BAE55478.1| protein product oryzae]
  misc_feature (1)..(340): NCBI GI: 238841750 Blast Desc: conserved [Microsporum canis CBS 113480]
  misc_feature: Useful for introducing or modulating the production of volatile compounds
MASKSVTRSETAGPLVEAGKTQQASKALLAHIQKEVKEKAANSEKKDLLADEDGPLDEVPIWLQFSTKRHIIDSGRKLRPVRLTVPFPLETDTQKSICIIVASPQRWYKNLVASDQFPAELRPRISRIIDIGKLKAKFKSYESVRALYNQHDIFLGDARIINRCPGILGKTFYKSQKKRLIPINIEERRPKVDGKRTKRTKAQGTVNSCNAAQFASEIERAVGSALLNLAPSTNAMIRVGWADWTADKICANAEEVIKSVIGKHIPKNNLRSIYIKGPQTVALPLYLTDELWVDKEKDIVGDDSEEAKKLLKGEKPNIGKKRKSLEGTTEESEPAPKKSKKAEPAPKKGKKAVKPESNDDKLDKEIAERKAALKKQKKAAKNALDV

SEQ ID NO: 8460 - DNA, 1436 bp, Muscodor strobelii
  misc_feature: SGI EST ID NO. CUFF.20656.1
  misc_feature: Variant of the nucleotide sequence at SEQ ID NO 8458
attcccaccaggaacttgtttgataccaagtttcttcggtccaattccttctcgaccatcggactacctaggcgtctttaaatccaactaaatcgcaaacatggcgtccaagtctgtcacccgtagcgagacggcgggacctctggtcgaagccggcaagacccaacaggcttcgaaagcgctgttggcccatatccaaaaggaagtcaaggagaaggctgcaaactccgagaagaaggacctcttggccgacgaggatggccctctcgatgaggtccccatctggcttcagttttccaccaagagacacattatcgactccggcagaaagctccgacccgttcgcctgaccgtgcctttccctctcgagaccgatacccagaaatctatttgcattatagtcgcttccccacagagatggtacaagaacctggttgcttctgaccaattccctgccgaacttcgacctcgcatctcccgcataatcgacattggcaagctcaaggccaagttcaagtcttacgagtctgtccgcgctctgtacaaccagcatgatatcttcttgggtgacgcgtgagtgtccccagtctactcggggacgagtgtgtatgctgatttgtacaagccgcatcatcaatcgttgccctggtatcctcggcaagactttctacaagagccaaaagaaacgattaatacctatcaacatcgaggaacgaagacccaaagtggacggaaagagaacgaaacgcaccaaggcacaaggcaccgtcaactcctgcaacgctgcgcaattcgctagcgagattgagcgagcggtcggcagcgccctgctcaacctcgccccgtctacgaacgctatgatcagagtcggctgggcagactggaccgcagataaaatctgcgccaatgctgaggaggttatcaagtccgtcatcggaaagcacattcccaagaacaacctgcggagtatctacatcaaaggccctcagaccgtggccctgcctctgtacttgacggacgagctctgggtagacaaagagaaggatatagtaggcgacgactcggaggaggcgaagaagctgctcaagggcgagaaaccaaatatcggcaagaagaggaagtcgctcgagggaaccactgaggaatccgaacccgcccctaagaaatccaaaaaggccgaaccagctcccaagaagggaaagaaggctgtgaagcccgagagcaacgacgacaagctggacaaggagatcgcggaacgcaaagcagctctgaagaagcagaagaaggccgccaagaatgcccttgatgtctgatctggtgcatatactagggttagagaggttatgtctgagagcatcttgtacttattgtcatgatagacatggtggtgtttggagttaaataccaatttattattgactcgtttctatgagaga

SEQ ID NO: 8461 - DNA, 999 bp, Muscodor strobelii
  misc_feature: SGI cDNA ID NO. 562605
  misc_feature: Encodes the peptide sequence at SEQ ID NO 8462
atgccgtctctacgcagcctcacagccctgacggcgacactagccactaccgtactctcttcagccatctctcccgtcacattctcggagcacaatgacgacacgccactccccgttgtcatctggcacggcctcggcgacacatactcagcagaaggcatccagtccgtcggccagctgatcgaagaggtcaacccaggcaccttcgtctacttcatccgcatcgacgacagcgcctccaacgaccgcaccgccaccttctacggcaacgtcaccgagcagctctccaaagtctgcgccgacctagccgcccaccccatcctgtccaccgccccggccatcgacgccgtgggcttcagccaaggcgggcagttcctgcgcggctacgtcgaacgatgcaatgcgccgcccgtccgcaacctgctcaccttcggcagccagcacaacggcatcgtagactacagggtatgcaagagcaccgactggttgtgcaagggcgccatggccctgctgcacaccaacacctggacctcattcgtccagtcccgcctcgtgcctgcgcaatacttccgcgatccggcggatctagataactacctcgagcactccaacttcctcgccgacatcaacaacgagcgcattctcaagaacaagacctacgctgagaacatcgagtctctcgagaacctcgtgctatacatgtttgaggacgacaccaccgtgatcccgaaagagaccggatggttcgaggaagtacagggagacgaggccacgccgcttcgcgccagggatctgtataaggaggattggattggactgcgagctcttgataggaagggtggactgctgttcaggactacgcctggtgaccatatgcagctttcggacaaggtgcttgttgatgctttccaggagttctttggtcccgagaaaaggggaaagaagaagagctttgctcaggagattcaggagtttttggatcatgagagggagttgtga

SEQ ID NO: 8462 - protein, 332 aa, Muscodor strobelii
  misc_feature: SGI Peptide ID NO. 562605
  misc_feature (32)..(308): Pfam Id: PF02089 Pfam Desc: Palmitoyl protein thioesterase
  misc_feature (11)..(317): NCBI GI: 85104754 Blast Desc: NCU06530 [Neurospora crassa OR74A] gi|28923377|gb|EAA32566.1| NCU06530 [Neurospora crassa OR74A]
  misc_feature (14)..(312): NCBI GI: 39940640 Blast Desc: palmitoyl-protein thioesterase precursor, [Magnaporthe grisea 70-15] gi|145010844|gb|EDJ95500.1| palmitoyl-protein thioesterase precursor, [Magnaporthe grisea 70-15]
  misc_feature (4)..(332): NCBI GI: 171679163 Blast Desc: protein product [Podospora anserina] gi|170937653|emb|CAP62311.1| protein product [Podospora anserina]
  misc_feature (29)..(332): NCBI GI: 156049945 Blast Desc: SS1G_07558 [Sclerotinia sclerotiorum 1980] gi|154691960|gb|EDN91698.1| SS1G_07558 [Sclerotinia sclerotiorum 1980]
  misc_feature (2)..(322): NCBI GI: 46121203 Blast Desc: FG04980.1 [Gibberella zeae PH-1]
  misc_feature (2)..(332): NCBI GI: 256727925 Blast Desc: NECHADRAFT_70914 [Nectria haematococca mpVI 77-13-4]
  misc_feature (9)..(309): NCBI GI: 67524079 Blast Desc: AN2497.2 [Aspergillus nidulans FGSC A4] gi|40744826|gb|EAA63982.1| AN2497.2 [Aspergillus nidulans FGSC A4] gi|259487921|tpe|CBF86972.1| TPA: palmitoyl-protein precursor
  misc_feature (35)..(309): NCBI GI: 121706152 Blast Desc: palmitoyl-protein thioesterase precursor [Aspergillus clavatus NRRL 1] gi|119399485|gb|EAW09913.1| palmitoyl-protein thioesterase precursor [Aspergillus clavatus NRRL 1]
  misc_feature (22)..(309): NCBI GI: 70998993 Blast Desc: palmitoyl-protein thioesterase precursor [Aspergillus fumigatus Af293] gi|66851855|gb|EAL92180.1| palmitoyl-protein thioesterase precursor [Aspergillus fumigatus Af293] thioesterase
  misc_feature (21)..(309): NCBI GI: 119490608 Blast Desc: palmitoyl-protein thioesterase precursor [Neosartorya fischeri NRRL 181] gi|119411218|gb|EAW21161.1| palmitoyl-protein thioesterase precursor [Neosartorya fischeri NRRL 181]
  misc_feature (35)..(308): SWISSPROT Homolog: EC 3.1.2.22 Palmitoyl-protein hydrolase
MPSLRSLTALTATLATTVLSSAISPVTFSEHNDDTPLPVVIWHGLGDTYSAEGIQSVGQLIEEVNPGTFVYFIRIDDSASNDRTATFYGNVTEQLSKVCADLAAHPILSTAPAIDAVGFSQGGQFLRGYVERCNAPPVRNLLTFGSQHNGIVDYRVCKSTDWLCKGAMALLHTNTWTSFVQSRLVPAQYFRDPADLDNYLEHSNFLADINNERILKNKTYAENIESLENLVLYMFEDDTTVIPKETGWFEEVQGDEATPLRARDLYKEDWIGLRALDRKGGLLFRTTPGDHMQLSDKVLVDAFQEFFGPEKRGKKKSFAQEIQEFLDHEREL

SEQ ID NO: 8463 - DNA, 1320 bp, Muscodor strobelii
  misc_feature: SGI cDNA ID NO. 562606
  misc_feature: Encodes the peptide sequence at SEQ ID NO 8464
atggcccaggctcataagtcagaccatcaccttgatgctgacggcgctgttgattcggactctaagggccctccgaatattggcgctgtcaagtgtggccgcgagtacctccatgaaatcacgatacgtcggaagctggccagtctgaatgttgattctgccagagagcaggcagctcgcctgcaaggagttcaactcatcgacgacgtgcgaaattatcttcagctaccagtcaacacgtatgctgcagctagcacttactttcaacgcttccgactcaagtttcccggaagtgattatcaactggccgacgtggcactcgcctgtctcttcgtggcatgcaagtccgaagatactctcaagaagtccaaggatattctgtgcgctaatcacaacatcaaaaatccggaccgaactaccacccctgatgataagatgttcgagcaaagctccaagatgatgcatggtcttgagcgtcaaattatcgaggccataagatttgacttccaagttcgtaagccacataaaattcttgccaagatcgtcaaagctatgattggtcctcggccagaagcctcgcaatttttcgatcttgcctaccaagctggtctcgacatgtacaagacactcgctccgttgaagcatacgacctatacttgcgctgtgatggttgcccagcttaccgctatggtgacttgccaatttgagaaagcattcacccagatgaacctcagggagttcttcacttgcgaggaatgggtagctgaggccatgatcgacttgctcgatctctacaccgactatactaaatcaactcttctgggacaaaaggtcgacctacaagtcttcatcgatgttaagatcagggtcaacaaaaagatggatgcggcccgcatcccccgatatgcgaatttctgtaacgaatgcgaacgcgaacgggttccgccgagcccctcttccatcgggtcgtccccagcttcgcctacaacagagactccgagtagtgttaccgctaggcgcggagctaaaggatccgaaggcactatgcgattcttgttcgatgcagatgaggcccgtcaagagaagaggatatacgaggaattcacgagggacgaatatgacgagtggacagaagaagtggaagagcctatcccagatcctcgcgagaatcaccgtgccgatcttggccccgagcctcgccctccaagagaaccgcggggtcctcgaggccgtggtcgtggacgtggtggaagaggtggtcatgattggcatcctcgtggtggccgtggtcgtcggggcggacgtggtggcttctactag

SEQ ID NO: 8464 - protein, 439 aa, Muscodor strobelii
  misc_feature: SGI Peptide ID NO. 562606
  misc_feature (25)..(387): NCBI GI: 116766027 Blast Desc: C-type cyclin [Epichloe festucae]
  misc_feature (25)..(431): NCBI GI: 46121205 Blast Desc: FG04981.1 [Gibberella zeae PH-1]
  misc_feature (18)..(370): NCBI GI: 256728089 Blast Desc: NECHADRAFT_95351 [Nectria haematococca mpVI 77-13-4]
  misc_feature (25)..(437): NCBI GI: 145605828 Blast Desc: MGG_11817 [Magnaporthe grisea 70-15] gi|145013610|gb|EDJ98251.1| MGG_11817 [Magnaporthe grisea 70-15]
  misc_feature (23)..(437): NCBI GI: 116195356 Blast Desc: CHGG_04276 [Chaetomium globosum CBS 148.51] gi|88180189|gb|EAQ87657.1| CHGG_04276 [Chaetomium globosum CBS 148.51]
  misc_feature (25)..(386): NCBI GI: 164429387 Blast Desc: NCU04495 [Neurospora crassa OR74A] gi|157073460|gb|EAA27828.2| NCU04495 [Neurospora crassa OR74A]
  misc_feature (25)..(419): NCBI GI: 171691346 Blast Desc: protein product [Podospora anserina] gi|170945621|emb|CAP71734.1| protein product [Podospora anserina]
  misc_feature (14)..(386): NCBI GI: 261352579 Blast Desc: C-type cyclin [Verticillium albo-atrum VaMs.102]
  misc_feature (25)..(405): NCBI GI: 156049947 Blast Desc: SS1G_07559 [Sclerotinia sclerotiorum 1980] gi|154691961|gb|EDN91699.1| SS1G_07559 [Sclerotinia sclerotiorum 1980]
  misc_feature (18)..(368): NCBI GI: 189197837 Blast Desc: C-type cyclin [Pyrenophora tritici-repentis Pt-1C-BFP] gi|187981204|gb|EDU47830.1| C-type cyclin [Pyrenophora tritici-repentis Pt-1C-BFP]
MAQAHKSDHHLDADGAVDSDSKGPPNIGAVKCGREYLHEITIRRKLASLNVDSAREQAARLQGVQLIDDVRNYLQLPVNTYAAASTYFQRFRLKFPGSDYQLADVALACLFVACKSEDTLKKSKDILCANHNIKNPDRTTTPDDKMFEQSSKMMHGLERQIIEAIRFDFQVRKPHKILAKIVKAMIGPRPEASQFFDLAYQAGLDMYKTLAPLKHTTYTCAVMVAQLTAMVTCQFEKAFTQMNLREFFTCEEWVAEAMIDLLDLYTDYTKSTLLGQKVDLQVFIDVKIRVNKKMDAARIPRYANFCNECERERVPPSPSSIGSSPASPTTETPSSVTARRGAKGSEGTMRFLFDADEARQEKRIYEEFTRDEYDEWTEEVEEPIPDPRENHRADLGPEPRPPREPRGPRGRGRGRGGRGGHDWHPRGGRGRRGGRGGFY

SEQ ID NO: 8465 - DNA, 3705 bp, Muscodor strobelii
  misc_feature: SGI EST ID NO. CUFF.20659.0
  misc_feature: Variant of the nucleotide sequence at SEQ ID NO 8463
ccggtcttgtgtgacataaccaatgtatttgaggctaagctattcggctcgtcaacataaggattattcgaaatgtcaacagtgttgcaaacaggaagatgataagaggagtttcattatgcccagacagataccagcattattacgaaccacaataaaacattggtatacagaggtcaatcttcgtgttatttgtactgctccaggtatcgtccttcgaatcaaaacgccctcaacgccttagatatttatacacactgcactccctctcacaactccctctcatgatccaaaaactcctgaatctcctgagcaaagctcttcttctttccccttttctcgggaccaaagaactcctggaaagcatcaacaagcaccttgtccgaaagctgcatatggtcaccaggcgtagtcctgaacagcagtccacccttcctatcaagagctcgcagtccaatccaatcctccttatacagatccctggcgcgaagcggcgtggcctcgtctccctgtacttcctcgaaccatccggtctctttcgggatcacggtggtgtcgtcctcaaacatgtatagcacgaggttctcgagagactcgatgttctcagcgtaggtcttgttcttgagaatgcgctcgttgttgatgtcggcgaggaagttggagtgctcgaggtagttatctagatccgccggatcgcggaagtattgcgcaggcacgaggcgggactggacgaatgaggtccaggtgttggtgtgcagcagggccatggcgcccttgcacaaccagtcggtgctcttgcataccctgtagtctacgatgccgttgtgctggctgccgaaggtgagcaggttgcggacgggcggcgcattgcatcgttcgacgtagccgcgcaggaactgcccgccttggctgaagcccacggcgtcgatggccggggcggtggacaggatggggtgggcggctaggtcggcgcagactttggagagctgctcggtgacgttgccgtagaaggtggcggtgcggtcgttggaggcgctgtcgtcgatgcggatgaagtagacgaaggtgcctgggttgacctcttcgatcagctggccgacggactggatgccttctgctgagtatgtgtcgccgaggccgtgccagatgacaacggggagtggcgtgtcgtcattgtgctccgagaatgtgacgggagagatggctgaagagagtacggtagtggctagtgtcgccgtcagggctgtgaggctgcgtagagacggcatctttatatggatgccaatatctttgttaatacctaggtaggtgggagaggttgaagttcgaaacagtgtgggagcaaatggtcatttcatcatgtgcgagcatgtggccaggcagccaggaaaccacatccatggacacagtcggaagcaccactcataccaccctttctaagaaccatatcatggcttcaaattgacacctgataccccttcataatacggtatgatgccattaatgtcttattctgtgcttacccagaaaccatctagagcatagaacgttatttgattgacagcaagctatatctcgattcgacgggtgattggctcgagcttaggtatctcgaaggtcggagctggccccctagaatgccgtgtcgcctcgcgacggccgggtgctgatccctgctgccgcctcacagcgctgtaggtacataaggaagtcagtacggccttctgtgctcaaatgtcagtgggcctcgaacattcacttcaacgtccatattctcacgaccatcctaaatttcaccaacagaacaggggcaaggaatgccaggatatgcttacgaggccgtatcttagtcggctcttgtgaaaacatctgcccgctcacggctgctccactgagatgcacccgaaagatcaatctgtcacagataccgcctgattttagctgaggtctatctcagtctcacaactcatgggctccaaaatatcagctccccgaccttcttagctacatcgccaaaatggcccaggctcataagtcagaccatcaccttgatgctgacggcgctgttgattcggactctaagggccctccgaatattggcgctgtcaagtgtggccgcgagtacctccatgaaatcacgatacgtcggaagctggccagtctgaatgttgattctgccagagagcaggcagctcgcctgcaaggagttcaactcatcgacgacgtgcgaaattatcttcagctaccagtcaacacgtatgctgcagctagcacttactttcaacgcttccgactcaagtttcccggaagtgattatcaactggccgacgtggcactcgcctgtctcttcgtggcatgcaagtccgaagatactctcaagaagtccaaggatattctgtgcgctaatcacaacatcaaaaatccggaccgaactaccacccctgatgataagatgttcgagcaaagctccaagatgatgcatggtcttgagcgtcaaattatcgaggccataagatttgacttccaagttcgtaagccacataaaattcttgccaagatcgtcaaagctatgattggtcctcggccagaagcctcgcaatttttcgatcttgcctaccaagctggtctcgacatgtacaagacactcgctccgttgaagcatacgacctatacttgcgctgtgatggttgcccagcttaccgctatggtgacttgccaatttgagaaagcattcacccagatgaacctcagggagttcttcacttgcgaggaatgggtagctgaggccatgatcgacttgctcgatctctacaccgactatactaaatcaactcttctgggacaaaaggtcgacctacaagtcttcatcgatgttaagatcagggtcaacaaaaagatggatgcggcccgcatcccccgatatgcgaatttctgtaacgaatgcgaacgcgaacgggttccgccgagcccctcttccatcgggtcgtccccagcttcgcctacaacagagactccgagtagtgttaccgctaggcgcggagctaaaggatccgaaggcactatgcgattcttgttcgatgcagatgaggcccgtcaagagaagaggatatacgaggaattcacgagggacgaatatgacgagtggacagaagaagtggaagagcctatcccagatcctcgcgagaatcaccgtgccgatcttggccccgagcctcgccctccaagagaaccgcggggtcctcgaggccgtggtcgtggacgtggtggaagaggtggtcatgattggcatcctcgtggtggccgtggtcgtcggggcggacgtggtggcttctactagacttccactttctagtaaggacgaagactgcaatatcgaacttttgtgtgtcggtattcggcagtgaggcgcattgtggtcacagcagccataaagtgcactatactcccggtttgtacttattgctgatcatcatgcgttcggatcggcatggctgagattccaagcatcatgagcagaggcgttttaatggacagaaaacggcgttgggcgggaagataccctttgggtaggtcttttgcaaaatagtcaaaagtctttcgaggagaacgaacaatcttcgacaggaaaggatatgaagcttgtatgaaataggtgtataaatgtattaatgcccaaaattaatcatgtacaaaaagtatccggcg

SEQ ID NO: 8466 - DNA, 615 bp, Muscodor strobelii
  misc_feature: SGI cDNA ID NO. 562607
  misc_feature: Encodes the peptide sequence at SEQ ID NO 8467
atgcctcgaaagataagaatacccgtagacccagcacaaaatagagaatctcaaagactatcccgcgaaagacatcgggaatacgtcgctagtctcgaggcgcaagtccgggaatttaaagaacgagacgctcgggctacgctcgacatgcaacgggctgcgcgagaagtctcgcgcatgaatgagaagctgatgaaactccttgaacttaagggtgtttctaaagaggagattgatgggtttttatacggacagagacaaggcgacgagaggaccgaagagtcgatagccggttcttgtgatgggttgaattcaagtctggatatggaggcgaacgcagagcgttctattcgctctatacaagaaggatgtagtgaaggagatcatgcagcaagcgatgagaagtctatcaacagggtatgtgaggcatcaacccttcgaagcgagagttcacaggcgcatgtcacatcttgtgacgatgccgcgacgatcatcgctgggttccggggacacggtgatgtgtcgcaggctagacagtctcttggctgtggaaataggagggattgtcatgtgaagaatacgcgactttttcagttattagatgaagctggatga

SEQ ID NO: 8467 - protein, 204 aa, Muscodor strobelii
  misc_feature: SGI Peptide ID NO. 562607
  misc_feature (1)..(202): NCBI GI: 256726525 Blast Desc: NECHADRAFT_79559 [Nectria haematococca mpVI 77-13-4]
  misc_feature (1)..(204): NCBI GI: 85111330 Blast Desc: NCU01851 [Neurospora crassa OR74A] gi|28925631|gb|EAA34649.1| [Neurospora crassa OR74A]
  misc_feature (12)..(203): NCBI GI: 116192759 Blast Desc: [Chaetomium globosum CBS 148.51] gi|88182010|gb|EAQ89478.1| [Chaetomium globosum CBS 148.51]
  misc_feature (15)..(202): NCBI GI: 261359088 Blast Desc: conserved [Verticillium albo-atrum VaMs.102]
  misc_feature (15)..(202): NCBI GI: 169611941 Blast Desc: SNOG_09086 [Phaeosphaeria nodorum SN15] gi|160702401|gb|EAT83278.2| SNOG_09086 [Phaeosphaeria nodorum SN15]
  misc_feature (15)..(201): NCBI GI: 258572686 Blast Desc: [Uncinocarpus reesii 1704] gi|237905375|gb|EEP79776.1| [Uncinocarpus reesii 1704]
  misc_feature (12)..(201): NCBI GI: 255930523 Blast Desc: Pc06g02180 [Penicillium chrysogenum Wisconsin 54-1255] gi|211581434|emb|CAP79211.1| Pc06g02180 [Penicillium chrysogenum Wisconsin 54-1255]
  misc_feature (24)..(201): NCBI GI: 255934955 Blast Desc: Pc13g00550 [Penicillium chrysogenum Wisconsin 54-1255] gi|211583124|emb|CAP91124.1| Pc13g00550 [Penicillium chrysogenum Wisconsin 54-1255]
  misc_feature (1)..(90): NCBI GI: 46124401 Blast Desc: FG06578.1 [Gibberella zeae PH-1]
  misc_feature (12)..(201): NCBI GI: 238845765 Blast Desc: conserved [Microsporum canis CBS 113480]
MPRKIRIPVDPAQNRESQRLSRERHREYVASLEAQVREFKERDARATLDMQRAAREVSRMNEKLMKLLELKGVSKEEIDGFLYGQRQGDERTEESIAGSCDGLNSSLDMEANAERSIRSIQEGCSEGDHAASDEKSINRVCEASTLRSESSQAHVTSCDDAATIIAGFRGHGDVSQARQSLGCGNRRDCHVKNTRLFQLLDEAG

SEQ ID NO: 8468 - DNA, 1140 bp, Muscodor strobelii
  misc_feature: SGI cDNA ID NO. 562608
  misc_feature: Elevated expression when VOC is produced
  misc_feature: Encodes the peptide sequence at SEQ ID NO 8469
atggagccacaagacgaaccaaagagctatcagaaatatatcacggactcgaatcttgaaagccagaatgtcgagtcgagtggaccatcagtgaagaaacaatccgctttcaaaagcctcggttggctcgatcgatacttggcagtttggatctttctcgcaattgtagtcggtatactactgggcaatttcgtcccatcagcaccagaggctcttaataaagggaagtttgttggagtttcagtccctattgccgtcgggctgcttgccatgatgtatccgattctatgcaaagtcaaattcgagtctttggcggaggtttttgcccaacagggtatttggaagcaggtcggcctcagcgtctttatgaactggattgttgctccatttctcatgctcggacttgcgtgggcaactctacctgaccagcctgatcttcgcacaggcctaattctcgttggattgggccgatgtatcgcaatggtcttgatctggacaggactcgccggcggcgatggagagtactgcgcgatcctcgtggcgataaactcgatcctgcaaatcgttctcttcgcccctttagctgtgtttttcattcgtatcatcagcggtgagacaggccagcttgacgttccgtataatgttgtagccaccagcgtagcagtgttcctcggcatccctttcggcgcagcagtgctatctcgcttcgtcctgcgcaaaattgctggacctgagtggtatcagagtgtcttcctgcgactagtagccccttggtcgctcatcggtttgctgtacacgatcgtggttttgttcgcgtaccagggccgccaagtcgttcaccagatcgtgtcggtagttcgagttgctgtacctctgtttctttatttcatcatcatattcttcttcactttatggatcacgcgccgagctggcataggttattcattagccgccacccaaagttttactgcagcaagcaataacttcgaattggctatcgcagtagctgttgctgtgtatggcccagaaagcgatcaagcgttggcttctactgtaggaccacttatagaagtcccggtgctgttagggttggtatatgtggttaaatggattggtaggcgatggaattggaaagactga

SEQ ID NO: 8469 - protein, 379 aa, Muscodor strobelii
  misc_feature: SGI Peptide ID NO. 562608
  misc_feature (85)..(281): Pfam Id: PF01758 Pfam Desc: Sodium Bile acid symporter family
  misc_feature (1)..(378): NCBI GI: 46124403 Blast Desc: FG06579.1 [Gibberella zeae PH-1]
  misc_feature (3)..(379): NCBI GI: 116192761 Blast Desc: CHGG_06098 [Chaetomium globosum CBS 148.51] gi|88182011|gb|EAQ89479.1| CHGG_06098 [Chaetomium globosum CBS 148.51]
  misc_feature (1)..(378): NCBI GI: 39942638 Blast Desc: MGG_03399 [Magnaporthe grisea 70-15] gi|145015584|gb|EDK00074.1| MGG_03399 [Magnaporthe grisea 70-15]
  misc_feature (22)..(378): NCBI GI: 256726390 Blast Desc: [Nectria haematococca mpVI 77-13-4]
  misc_feature (2)..(379): NCBI GI: 189204382 Blast Desc: arsenical-resistance protein [Pyrenophora tritici-repentis Pt-1C-BFP] gi|187985625|gb|EDU51113.1| arsenical-resistance protein [Pyrenophora tritici-repentis
  misc_feature (1)..(379): NCBI GI: 255930527 Blast Desc: Pc06g02210 [Penicillium chrysogenum Wisconsin 54-1255] gi|211581436|emb|CAP79214.1| Pc06g02210 [Penicillium chrysogenum Wisconsin 54-1255]
  misc_feature (15)..(379): NCBI GI: 255934959 Blast Desc: Pc13g00570 [Penicillium chrysogenum Wisconsin 54-1255] gi|211583126|emb|CAP91126.1| Pc13g00570 [Penicillium chrysogenum Wisconsin 54-1255]
  misc_feature (11)..(379): NCBI GI: 212546785 Blast Desc: arsenite efflux transporter (ArsB), [Penicillium marneffei ATCC 18224] gi|210065066|gb|EEA19161.1| arsenite efflux transporter (ArsB), [Penicillium marneffei ATCC 18224]
  misc_feature (5)..(379): NCBI GI: 70996442 Blast Desc: arsenite efflux transporter (ArsB) [Aspergillus fumigatus Af293] gi|66850611|gb|EAL90938.1| arsenite efflux transporter (ArsB), [Aspergillus fumigatus Af293]
  misc_feature (4)..(379): NCBI GI: 119485524 Blast Desc: arsenical-resistance protein [Neosartorya fischeri NRRL 181] gi|119410352|gb|EAW20299.1| arsenical-resistance protein [Neosartorya fischeri NRRL 181]
  misc_feature: Useful for introducing or modulating the production of volatile compounds
MEPQDEPKSYQKYITDSNLESQNVESSGPSVKKQSAFKSLGWLDRYLAVWIFLAIVVGILLGNFVPSAPEALNKGKFVGVSVPIAVGLLAMMYPILCKVKFESLAEVFAQQGIWKQVGLSVFMNWIVAPFLMLGLAWATLPDQPDLRTGLILVGLGRCIAMVLIWTGLAGGDGEYCAILVAINSILQIVLFAPLAVFFIRIISGETGQLDVPYNVVATSVAVFLGIPFGAAVLSRFVLRKIAGPEWYQSVFLRLVAPWSLIGLLYTIVVLFAYQGRQVVHQIVSVVRVAVPLFLYFIIIFFFTLWITRRAGIGYSLAATQSFTAASNNFELAIAVAVAVYGPESDQALASTVGPLIEVPVLLGLVYVVKWIGRRWNWKD

SEQ ID NO: 8470 - DNA, 1309 bp, Muscodor strobelii
  misc_feature: SGI EST ID NO. CUFF.20530.0
  misc_feature: Variant of the nucleotide sequence at SEQ ID NO 8468
ctggagaacgatggaatgtattagacaaaatggcaaaccaagtattctaatttgttgctgtatcaatagccgtcgggctgcttgccatgatgtatccgattctatgcaaagtcaaattcgagtctttggcggaggtttttgcccaacagggtatttggaagcaggtcggcctcagcgtctttatgaactggattgttgctccatttctcatgctcggacttgcgtgggcaactctacctgaccagcctgatcttcgcacaggcctaattctcgttggattgggccgatgtatcgcaatggtcttgatctggacaggactcgccggcggcgatggagagtactgcgcgatcctcgtggcgataaactcgatcctgcaaatcgttctcttcgcccctttagctgtgtttttcattcgtatcatcagcggtgagacaggccagcttgacgttccgtataatgttgtagccaccagcgtagcagtgttcctcggcatccctttcggcgcagcagtgctatctcgcttcgtcctgcgcaaaattgctggacctgagtggtatcagagtgtcttcctgcgactagtagccccttggtcgctcatcggtttgctgtacacgatcgtggttttgttcgcgtaccagggccgccaagtcgttcaccagatcgtgtcggtagttcgagttgctgtacctctgtttctttatttcatcatcatattcttcttcactttatggatcacgcgccgagctggcataggttattcattagccgccacccaaagttttactgcagcaagcaataacttcgaattggctatcgcagtagctgttgctgtgtatggcccagaaagcgatcaagcgttggcttctactgtaggaccacttatagaagtcccggtgctgttagggttggtatatgtggttaaatggattggtaggcgatggaattggaaagactgaatccgtgcgggggaccaagagtgaagggacacgatcatcagtaaaacaaggctgtgattacatggtcgattcttttcaagtcaagcgttacaccgccagagagggctgagttcaacaatggtcaatacagggccaggcttcattgtcatacgtctattattcgaagttccgtcatatagagatcgtggactatagtcgcaagattatcaaaacctttggtaagaattttcaaagaagcctaccctcgcattgaagatatgggccgcattcctggctacatttatgtacctaccatcacctgtgaaagatgattgatgatggtgaggcttatgtcaaataaagattaaactccg

SEQ ID NO: 8471 - DNA, 837 bp, Muscodor strobelii
  misc_feature: SGI cDNA ID NO. 562609
  misc_feature: Reduced expression when VOC is produced
  misc_feature: Encodes the peptide sequence at SEQ ID NO 8472
atggcgccgcctccgtctgcaaacctccccctcggtgagaggctcatggcccttgccaaaacactccaattcgggtggttcactggacacctggtcctcctcgtgtgcatcttccggtacacgctctcgtacatcacgtttaactactacagccgcgctgcccgctggagctatcgcacggccttcttctctgccgccctgacctacggcatcgttgtttataagacatggcgcgcaaggcagaaggtcggatccaagaaccccaacggcgtcgtaggcattctatccgatgagaacgtgcagtatctcgccatggccttggtctggcttctggccccccagtatcctcttgccttgttgccctacggcatctactccatcttccatgtcgctacttacacgcggagcaatgtcatgcccaccatccagcctaacaaggcccctgccggcgccaaggcccagccaaatcctatctcggaagccattggtgccttcgtgaagcagtactacgacagctccatgtctgttgtctccgggcttgagatcgccctttggatccgccttctcctctctgccgtgcttttccagagccgttcgtggatcctgttcggcttgtacactgccttcctccgcatgcgcttctcccagaactctcatgttcagaactcgttcagcgcactggagacccgtgtcgactctcttgtgggctcccaaggcactcctcccgttgctcgatctatttgggatggtgtcaaggggggcgcccgtcagttccacacctatacggatgctagccgatacataggtggctctgccgtgcccaagaagacatcttaa

SEQ ID NO: 8472 - protein, 278 aa, Muscodor strobelii
  misc_feature: SGI Peptide ID NO. 562609
  misc_feature (1)..(278): NCBI GI: 170940245 Blast Desc: protein product [Podospora anserina]
  misc_feature (13)..(278): NCBI GI: 116195618 Blast Desc: CHGG_04407 [Chaetomium globosum CBS 148.51] gi|88180320|gb|EAQ87788.1| CHGG_04407 [Chaetomium globosum CBS 148.51]
  misc_feature (13)..(278): NCBI GI: 85108632 Blast Desc: NCU06968 [Neurospora crassa OR74A] gi|28924218|gb|EAA33372.1| conserved [Neurospora crassa OR74A]
  misc_feature (1)..(278): NCBI GI: 154318128 Blast Desc: BC1G_03047 [Botryotinia fuckeliana B05.10] gi|150843705|gb|EDN18898.1| BC1G_03047 [Botryotinia fuckeliana B05.10]
  misc_feature (1)..(278): NCBI GI: 256727922 Blast Desc: NECHADRAFT_70912 [Nectria haematococca mpVI 77-13-4]
  misc_feature (13)..(278): NCBI GI: 46121209 Blast Desc: FG04983.1 [Gibberella zeae PH-1]
  misc_feature (11)..(276): NCBI GI: 189198393 Blast Desc: conserved [Pyrenophora tritici-repentis Pt-1C-BFP] gi|187981482|gb|EDU48108.1| conserved [Pyrenophora tritici-repentis Pt-1C-BFP]
  misc_feature (12)..(276): NCBI GI: 169620525 Blast Desc: SNOG_13462 [Phaeosphaeria nodorum SN15] gi|111058226|gb|EAT79346.1| SNOG_13462 [Phaeosphaeria nodorum SN15]
  misc_feature (13)..(278): NCBI GI: 39945772 Blast Desc: MGG_08006 [Magnaporthe grisea 70-15] gi|145019240|gb|EDK03468.1| MGG_08006 [Magnaporthe grisea 70-15]
  misc_feature (1)..(271): NCBI GI: 238482573 Blast Desc: conserved [Aspergillus flavus NRRL3357] gi|220700575|gb|EED56913.1| conserved [Aspergillus flavus NRRL3357]
  misc_feature: Useful for introducing or modulating the production of volatile compounds
MAPPPSANLPLGERLMALAKTLQFGWFTGHLVLLVCIFRYTLSYITFNYYSRAARWSYRTAFFSAALTYGIVVYKTWRARQKVGSKNPNGVVGILSDENVQYLAMALVWLLAPQYPLALLPYGIYSIFHVATYTRSNVMPTIQPNKAPAGAKAQPNPISEAIGAFVKQYYDSSMSVVSGLEIALWIRLLLSAVLFQSRSWILFGLYTAFLRMRFSQNSHVQNSFSALETRVDSLVGSQGTPPVARSIWDGVKGGARQFHTYTDASRYIGGSAVPKKTS

SEQ ID NO: 8473 - DNA, 1931 bp, Muscodor strobelii
  misc_feature: SGI EST ID NO. CUFF.20910.1
  misc_feature: Variant of the nucleotide sequence at SEQ ID NO 8471
gtaatattagagcgcgccatcatctcttgtagccatcaccaggtagaatcttagcacatagcagccgtagagacacgatccctttatctcgaatggattcaatattcttgacatgtgtgtcatggctgaagaaccccgcggcactaatatggcctagtgcaggtcattgtggttcatgacgaaatggtgggctagtgggcttggtgaatagcagagatgtgtcccgcagctgaggtagccgacagtgggttgaagtgtccagcgatcgcggcagacctgtgtcggtctcgtcatagcactgttgatggacaacctggtaggacgcagcagtttttagcaatttcagcacaggttgtcacaccaaaaattacccaggccagccagctcgccagacctgatctctcggcacccgagctgccacggcgacctgatccagccacttgaccaacatttcttgaagcttcgttcgtcatcatccacacctaaacaccacgctaccttttctgtcgtctcctttgcatcctgttgctctcgatatttcaagtttccactgcaacttcgccctgcactcttaccctcgccctctctctatattagactacttacatccatttcctctgcgactgctgcctccaacatcaacaaccggataatcgtcatggcgccgcctccgtctgcaaacctccccctcggtgagaggctcatggcccttgccaaaacactccaattcgggtggttcactggacacctggtcctcctcgtgtgcatcttccggtacacgctctcgtacatcacgtttaactactacagccgcgctgcccgctggagctatcgcacggccttcttctctgccgccctgacctacggcatcgttgtttataagacatggcgcgcaaggcagaaggtcggatccaagaaccccaacggcgtcgtaggcattctatccgatgagaacgtgcagtatctcgccatggccttggtctggcttctggccccccagtatcctcttgccttgttgccctacggcatctactccatcttccatgtcgctacttacacgcggagcaatgtcatgcccaccatccagcctaacaaggcccctgccggcgccaaggcccagccaaatcctatctcggaagccattggtgccttcgtgaagcagtactacgacagctccatgtctgttgtctccgggcttgagatcgccctttggatccgccttctcctctctgccgtgcttttccagagccgttcgtggatcctgttcggcttgtacactgccttcctccgcatgcgcttctcccagaactctcatgttcagaactcgttcagcgcactggagacccgtgtcgactctcttgtgggctcccaaggcactcctcccgttgctcgatctatttgggatggtgtcaaggggggcgcccgtcagttccacacctatacggatgctagccgatacataggtggctctgccgtgcccaagaagacatcttaaggctgaggacaaaggcagctttgcttaagttttgatgttggacgcctacggtgatacggtgggaagacaaaaggactacctgggactcagtgggcaccacaattgacggcgattataagcattggttcaaagtgcatattacccatgtttcggcccaaccacgaaacgatgaagaagattgattaggtgattgcacgttaggaggagcgaacaacacaacatgcgcggaagtcgaggacgagcggtgtacggtgtacggtgtagtagattgaggattagtaaactgtgattattgtcgttgtgacgattggctgtcaaccaggaccagcaataaatataccatactactgttaccatgtctttcttagtctttctcgctagtcattgtgataagagcaatactgacggtggccttgacttgcgtcgcaaatccgca

SEQ ID NO: 8474 - DNA, 1917 bp, Muscodor strobelii
  misc_feature: SGI cDNA ID NO. 562610
  misc_feature: Encodes the peptide sequence at SEQ ID NO 8475
atggacgacaactgggaagcaaggcggagagaaatcagaaatatccttcgggctccgagagatgcccctgtaaaagctggtggctctggtgcagatcgtacgcgcagtcgcagtccgcgcagtcccagagggcttaggaatctcagacctagcgattttaacaagcagaaaaaatacgaggacgatgatggagccgacaaacctaaagggaaagtcgacaagtatggccacgacgaggaagatccaacggctgctcagtgcactaatccaaatttaattgtagaagatgtaccaccggtgccgtacgtgtttgaaatgaccgatcttgatcaagctacgctgggtgtcgaactcgaatttttatgtgtccaatgcccatcggtacgcgatccgaatttggcctttgcagatgacccgcatagtcacgacggcagatgggtatcttccaagatgctcctttgggaaatgaccacgccagttttggaaagggagggggctgactatattcaacgtaacatgagatacacccgggttaagatgtgtcgagtcatgagggatgctggtcttactgtcatcaagatggccgacgaggattttgatccactggtaaacaatagaattcccgatacccccagagttcccgaatttagcgacagtgaggccagcgatgatgaacgagaagaagaagtctcgaatgcaaccgtgatctcaaacttctcaagtacacatcattttgttgctgaggaagacctgtacagaaactcgatacttgccacgaggcaacattgtaacgcttttgtgaattttcacacccaaaacagactcaagctttccagaaccaaaaaggcctctatagaagatgcatcaaatagactattctacaactatccagaacccgcgcctccagtcatggtagacaacattaaacagtatttcgcacaagcactatatgcccgcgtgaaagctgagaagcagatgagagaggatgagcgaaatcgacagacagatccgattcatgttcctgttccaggcatcttcccaaaatatcgagcgtggcaagttacgaacgactggtccgtggatggcaatgggaatgccaatgttcccgaaggtgaagatgatcctttcaaactctatagatggcttggggccgaggtgatcagtccggtgttgcctcaaaactcgtccgccactcgtgaggcaatacgtagagcctgtggatcagtccgagacttcttccgaacccgaaagaccgtggaaatgacgcactgtgagtatcacctgtttccacttatggactctaggaacgcggacgacgatgacctacgcgatgctttcgacgaggcagttgaagagcactcggacaccgtaaaaggtatataccaagccgtcgaggaagcaaacatacccatcgaattagacgagctagacgaagatgagagtgcctttttgcacaatctgtatcaaatctcaagcatcgacaatttaacttgggcgttgaactctagtgaagtcagagtgggcttgagatggcgggttggaggaggaaccagcacgtttgatccgcaactcaagcaacaatcgcaaacaatcgaagctcgcataatggcaggcactttagatgccgatcacatcaataactggataacaatcctagagcatattgttacggtggccagagactggccaaacgagcgcttccgacagatgctggtgagattcttaccggatcgatcgattgataacttgcttcgagaaattggtgtctcggaccaggttcgtaattactggcttgatccgaagagaagagacgccaacaaccagtggtgggagtatccagaccgggacgtcgtcgactggaacaacccgttcaatgtacgtggacatggagcgactcacggtagcgagtgggattaa

SEQ ID NO: 8475 - protein, 638 aa, Muscodor strobelii
  misc_feature: SGI Peptide ID NO. 562610
MDDNWEARRREIRNILRAPRDAPVKAGGSGADRTRSRSPRSPRGLRNLRPSDFNKQKKYEDDDGADKPKGKVDKYGHDEEDPTAAQCTNPNLIVEDVPPVPYVFEMTDLDQATLGVELEFLCVQCPSVRDPNLAFADDPHSHDGRWVSSKMLLWEMTTPVLEREGADYIQRNMRYTRVKMCRVMRDAGLTVIKMADEDFDPLVNNRIPDTPRVPEFSDSEASDDEREEEVSNATVISNFSSTHHFVAEEDLYRNSILATRQHCNAFVNFHTQNRLKLSRTKKASIEDASNRLFYNYPEPAPPVMVDNIKQYFAQALYARVKAEKQMREDERNRQTDPIHVPVPGIFPKYRAWQVTNDWSVDGNGNANVPEGEDDPFKLYRWLGAEVISPVLPQNSSATREAIRRACGSVRDFFRTRKTVEMTHCEYHLFPLMDSRNADDDDLRDAFDEAVEEHSDTVKGIYQAVEEANIPIELDELDEDESAFLHNLYQISSIDNLTWALNSSEVRVGLRWRVGGGTSTFDPQLKQQSQTIEARIMAGTLDADHINNWITILEHIVTVARDWPNERFRQMLVRFLPDRSIDNLLREIGVSDQVRNYWLDPKRRDANNQWWEYPDRDVVDWNNPFNVRGHGATHGSEWD

SEQ ID NO: 8476 - DNA, 810 bp, Muscodor strobelii
  misc_feature: SGI cDNA ID NO. 562611
  misc_feature: Encodes the peptide sequence at SEQ ID NO 8477
atggacgacaactgggaagcaaggcggagagaaatcagaaatatccttcgggctccgagagatgcccctgtaaaagctggtggctctggtgcagatcgtacgcgcagtcgcagtccgcgcagtcccagagggcttaggaatctcagacctagcgattttaacaagcagaaaaaatacgaggacgatgatggagccgacaaacctaaagggaaagtcgacaagtatggccacgacgaggaagatccaacggctgctcagtgcactaatccaaatttaattgtagaagatgtaccaccggtgccgtacgtgtttgaaatgaccgatcttgatcaagctacgctgggtgtcgaactcgaatttttatgtgtccaatgcccatcggtacgcgatccgaatttggcctttgcagatgacccgcatagtcacgacggcagatgggtatcttccaagatgctcctttgggaaatgaccacgccagttttggaaagggagggggctgactatattcaacgtaacatgagatacacccgggttaagatgtgtcgagtcatgagggatgctggtcttactgtcatcaagatggccgacgaggattttgatccactggtaaacaatagaattcccgatacccccagagttcccgaatttagcgacagtgaggccagcgatgatgaacgagaagaagaagtctcgaatgcaaccgtgatctcaaacttctcaagtacacatcatacgcccttcgtcagcgacaagtacttctattctattcagagaacagttatcttctactccgtatcattggtcaattga

SEQ ID NO: 8477 - protein, 269 aa, Muscodor strobelii
  misc_feature: SGI Peptide ID NO. 562611
MDDNWEARRREIRNILRAPRDAPVKAGGSGADRTRSRSPRSPRGLRNLRPSDFNKQKKYEDDDGADKPKGKVDKYGHDEEDPTAAQCTNPNLIVEDVPPVPYVFEMTDLDQATLGVELEFLCVQCPSVRDPNLAFADDPHSHDGRWVSSKMLLWEMTTPVLEREGADYIQRNMRYTRVKMCRVMRDAGLTVIKMADEDFDPLVNNRIPDTPRVPEFSDSEASDDEREEEVSNATVISNFSSTHHTPFVSDKYFYSIQRTVIFYSVSLVN

SEQ ID NO: 8478 - DNA, 1527 bp, Muscodor strobelii
  misc_feature: SGI cDNA ID NO. 562612
  misc_feature: Elevated expression when VOC is produced
  misc_feature: Encodes the peptide sequence at SEQ ID NO 8479
atgcctgacggcaattttcagctttcggccagacttcagcactactatgtatttctgaagttgtcgtcgtaccctatcatacacaagctacccacacaggctctaccaatttctgcgattcccgcggtattactcaaccgccgtcgaatatctttgttcgccagcgtaatactcgtcatcttgttgtttcaactatttggcgattttcgttcagatctttttagactcgtaaaaggagtccctggggttcgctacgatgacggtcaatatcgagggaatcccaacatctcgcgggaaggcctggaagatatctttgtcgttgttcggacaggatccaacgaggttgaaaagaagctaggatatactcttaacacaacattacgtggtgtaccaaactacgggatttggtcggatctagaagagtcctacgcaggtcaccacgtcgccaatgctcttgacgagatcgacccagatctgataaacaaccatccagatttcgaatactacaggcggttgcaagagtacggaaaggacggctttagcgaagaagagatgactcgctggagccaggctcccaatactcctactgggcgcgatacgccagcctggaaactggacaaatggaaatttctaccggtggccaagaaggcttatttccagtccccttccagcccgtggtatctatttctagaatgcgatacttatgttttctgggatagtctactggcttttttatcccattttgattcaaatcatccattctatattggccgtcaactgcacactgctacagcccaatttgcctatggaggggctggcatccttatttccaatccagcaatgcaaatgcttgtagaccactacacttctaacttacgagtttacaacgagttaactatctcgaagtggtacggagatttaatccttgcgaagaccatgtccgacgcgggtgtaggtcttacagatgtttggccgacgcttgagggtgacatgccagccacttttgatgtagcgttgaaagcggcaggacatcgactttggtgctattatgcaaccacatatcaccatatgagtcccgaagacattgttgaatatcacgaatttgaaaagtcctggagctcaacgcattccgacttcccaagaacaggtgatgttttccggcagctggtatatccgcacatttcgcccgatatgtcagattgggacaatctttcgacgcaggtggcgtccgagaatgtcacatttgatgagtgccatcaaatttgcgaagacacgtcggactgcatacagttttctttaagcgacagaaatttttacacgattgtcttggggaaagaatctacaggcagcgtacttggttacttcacggaagatgcgtatttgatcatgcccaagcccaactcggataccatcagcgccggcattctcaccggaaaccctgaaagacttgcgcgagcaagctcagatagcggtaacttacgcatcgagggaaatatttgcaggctcgcccttaccatagtcgtttga

SEQ ID NO: 8479 - protein, 508 aa, Muscodor strobelii
  misc_feature: SGI Peptide ID NO. 562612
  misc_feature (47)..(440): NCBI GI: 259482322 Blast Desc: TPA: conserved [Aspergillus nidulans FGSC A4]
  misc_feature (47)..(440): NCBI GI: 67537308 Blast Desc: AN4824.2 [Aspergillus nidulans FGSC A4] gi|40740869|gb|EAA60059.1| AN4824.2 [Aspergillus nidulans FGSC A4]
  misc_feature (43)..(454): NCBI GI: 115385138 Blast Desc: conserved [Aspergillus terreus NIH2624] gi|114196808|gb|EAU38508.1| conserved [Aspergillus terreus NIH2624]
  misc_feature (47)..(467): NCBI GI: 159127898 Blast Desc: conserved [Aspergillus fumigatus A1163]
  misc_feature (47)..(467): NCBI GI: 119492909 Blast Desc: NFIA_070030 [Neosartorya fischeri NRRL 181] gi|119411889|gb|EAW21832.1| conserved [Neosartorya fischeri NRRL 181]
  misc_feature (47)..(467): NCBI GI: 71000381 Blast Desc: conserved [Aspergillus fumigatus Af293] gi|66852522|gb|EAL92847.1| conserved [Aspergillus fumigatus Af293]
  misc_feature (101)..(457): NCBI GI: 121701475 Blast Desc: ACLA_022900 [Aspergillus clavatus NRRL 1] gi|119397145|gb|EAW07576.1| ACLA_022900 [Aspergillus clavatus NRRL 1]
  misc_feature (100)..(439): NCBI GI: 238841200 Blast Desc: conserved [Microsporum canis CBS 113480]
  misc_feature (102)..(494): NCBI GI: 169616260 Blast Desc: SNOG_11300 [Phaeosphaeria nodorum SN15] gi|111059888|gb|EAT81008.1| SNOG_11300 [Phaeosphaeria nodorum SN15]
  misc_feature (48)..(440): NCBI GI: 145234224 Blast Desc: An02g13520 [Aspergillus niger] gi|134057427|emb|CAK47765.1| protein product [Aspergillus niger]
  misc_feature: Useful for introducing or modulating the production of volatile compounds
MPDGNFQLSARLQHYYVFLKLSSYPIIHKLPTQALPISAIPAVLLNRRRISLFASVILVILLFQLFGDFRSDLFRLVKGVPGVRYDDGQYRGNPNISREGLEDIFVVVRTGSNEVEKKLGYTLNTTLRGVPNYGIWSDLEESYAGHHVANALDEIDPDLINNHPDFEYYRRLQEYGKDGFSEEEMTRWSQAPNTPTGRDTPAWKLDKWKFLPVAKKAYFQSPSSPWYLFLECDTYVFWDSLLAFLSHFDSNHPFYIGRQLHTATAQFAYGGAGILISNPAMQMLVDHYTSNLRVYNELTISKWYGDLILAKTMSDAGVGLTDVWPTLEGDMPATFDVALKAAGHRLWCYYATTYHHMSPEDIVEYHEFEKSWSSTHSDFPRTGDVFRQLVYPHISPDMSDWDNLSTQVASENVTFDECHQICEDTSDCIQFSLSDRNFYTIVLGKESTGSVLGYFTEDAYLIMPKPNSDTISAGILTGNPERLARASSDSGNLRIEGNICRLALTIVV

SEQ ID NO: 8480 - DNA, 2548 bp, Muscodor strobelii
  misc_feature: SGI EST ID NO. CUFF.20507.0
  misc_feature: Variant of the nucleotide sequence at SEQ ID NO 8478
tttcacaatcgttctagtctttgattcataatttaagctttatcgtggttattttgtattctcattccattgctttaatccaatgcctgacggcaattttcagctttcggccagacttcagcactactatgtatttctgaagttgtcgtcgtaccctatcatacacaagctacccacacaggctctaccaatttctgcgattcccgcggtattactcaaccgccgtcgaatatctttgttcgccagcgtaatactcgtcatcttgttgtttcaactatttggcgattttcgttcagatctttttagactcgtaaaaggagtccctggggttcgctacgatgacggtcaatatcgagggaatcccaacatctcgcgggaaggcctggaagatatctttgtcgttgttcggacaggatccaacgaggttgaaaagaagctaggatatactcttaacacaacattacgtggtgtaccaaactacgggatttggtcggatctagaagagtcctacgcaggtcaccacgtcgccaatgctcttgacgagatcgacccagatctgataaacaaccatccagatttcgaatactacaggcggttgcaagagtacggaaaggacggctttagcgaagaagagatgactcgctggagccaggctcccaatactcctactgggcgcgatacgccagcctggaaactggacaaatggaaatttctaccggtggccaagaaggcttatttccagtccccttccagcccgtggtatctatttctagaatgcgatacttatgttttctgggatagtctactggcttttttatcccattttgattcaaatcatccattctatattggccgtcaactgcacactgctacagcccaatttgcctatggaggggctggcatccttatttccaatccagcaatgcaaatgcttgtagaccactacacttctaacttacgagtttacaacgagttaactatctcgaagtggtacggagatttaatccttgcgaagaccatgtccgacgcgggtgtaggtcttacagatgtttggccgacgcttgagggtgacatgccagccacttttgatgtagcgttgaaagcggcaggacatcgactttggtgctattatgcaaccacatatcaccatatgagtcccgaagacattgttgaatatcacgaatttgaaaagtcctggagctcaacgcattccgacttcccaagaacaggtgatgttttccggcagctggtatatccgcacatttcgcccgatatgtcagattgggacaatctttcgacgcaggtggcgtccgagaatgtcacatttgatgagtgccatcaaatttgcgaagacacgtcggactgcatacagttttctttaagcgacagtacgtgcaagacatcggaagtcgtaaagcttggacacaagcaaacttccggccaaaaatctgtgcgatcaggctggatcatgcgacgtgttgaagctctaatgagtgctacggatgcatcatgtagtggccaacaatggagactaccttgaagctgggcgcaacggtggtggcagatccgcaataaaggatattacactcttgtcacagcaatcaagcgaaacgcgcccacaccggtcactatacgggaaggaatcaaatgattcaatgtcccgttcaaagtacctataagggaggcatgcgattgctgtatataagggtccataagtggcaacccttcgacgggcctggataagcgggtgaccaccgaggacatcaccaattctggtcaagttagccaacttgaaacgggttcagaccacgtttcaggcagcattcgagtgagaacgccggttcgaactgagacatgaccccttttacactattcttttctcgctttcctcatcttttctgatttcttgacacatcccttatggattctgctaccaacgatgtcagacgtgtggatacgtcacacgcgttgcgcaagaatcgtcaagagaagtcggtcttctgtgatgctgtcacgtacgccactgagtagagattaatttcaagacataggaaatttttacacgattgtcttggggaaagaatctacaggcagcgtacttggttacttcacggaagatgcgtatttgatcatgcccaagcccaactcggataccatcagcgccggcattctcaccggaaaccctgaaagacttgcgcgagcaagctcagatagcggtaacttacgcatcgagggaaatatttgcaggctcgcccttaccatagtcgtttgactagtttcgcataccgtaagagaatgacggtcacgtcgaaccgtctgagacgtccgaagtagacgtgagagaacatgagagtgtcgaaggacggctgacatcgtcgcacaacaatgaatagatgagggttctgtaccgtcaaggagatggaatgcttgagatagcggggggttggaagatgcgcataataaacaagattctataacagaaagactaatctgattgaatacaacaatctatgcaagaattgaaaatgttcgacaaccaacatttcga

SEQ ID NO: 8481 - DNA, 474 bp, Muscodor strobelii
  misc_feature: SGI cDNA ID NO. 562613
  misc_feature: Encodes the peptide sequence at SEQ ID NO 8482
atggatccttcaggcccagcacaacctcctctgaatgctgcctacaaagcagaaggcaatgcagcgacgtcagatcccgtcgaacagcaggcatcacagcagccctcttatgggagaacagtcgaagagcgagtaccaagcaagcaatcttctgggattcaagacgccacattttcaagcctaggctacggtattcacggcgcaccggcaggagaagagcgggccggccggacacaggagcaagttggacgacatcaggaacttgagggcgagcagatgcgtgcaccgggagaaggtgaagtcgcaagcgctgttcgagaaaagccaggagctagcggcacgcagcctgatctagctgctgatcttgaccgaaagaaggaggagcaggctggtgctcgagaggcgatgaaagaggctagacggcatggcgttgtgtcggatggtgccaatgtacgacaaggggtagatacctga

SEQ ID NO: 8482 - protein, 157 aa, Muscodor strobelii
  misc_feature: SGI Peptide ID NO. 562613
  misc_feature (1)..(137): NCBI GI: 189203075 Blast Desc: conserved [Pyrenophora tritici-repentis Pt-1C-BFP] gi|187984972|gb|EDU50460.1| conserved [Pyrenophora tritici-repentis Pt-1C-BFP]
  misc_feature (1)..(141): NCBI GI: 169602973 Blast Desc: SNOG_04491 [Phaeosphaeria nodorum SN15] gi|111067131|gb|EAT88251.1| SNOG_04491 [Phaeosphaeria nodorum SN15]
  misc_feature (45)..(148): NCBI GI: 261359045 Blast Desc: [Verticillium albo-atrum VaMs.102]
  misc_feature (52)..(148): NCBI GI: 154296113 Blast Desc: [Botryotinia fuckeliana B05.10] gi|150843747|gb|EDN18940.1| [Botryotinia fuckeliana B05.10]
  misc_feature (84)..(147): NCBI GI: 156032463 Blast Desc: [Sclerotinia sclerotiorum 1980] gi|154699331|gb|EDN99069.1| [Sclerotinia sclerotiorum 1980]
MDPSGPAQPPLNAAYKAEGNAATSDPVEQQASQQPSYGRTVEERVPSKQSSGIQDATFSSLGYGIHGAPAGEERAGRTQEQVGRHQELEGEQMRAPGEGEVASAVREKPGASGTQPDLAADLDRKKEEQAGAREAMKEARRHGVVSDGANVRQGVDT

SEQ ID NO: 8483 - DNA, 862 bp, Muscodor strobelii
  misc_feature: SGI EST ID NO. CUFF.20554.0
  misc_feature: Variant of the nucleotide sequence at SEQ ID NO 8481
gcaattgcggatttgggggatttgtcgtcactaacgacgtcattgactcaacgtcatctgtccagccaaacaatcccaaccagtttgctagattgtaaggcatcaaagtttcacatttgaatagccctctagtgatatcatctcgtgctttttctcaaatatctcaaaacagcaaatcattacaatttcactcatacaagaatggatccttcaggcccagcacaacctcctctgaatgctgcctacaaagcagaaggcaatgcagcgacgtcagatcccgtcgaacagcaggcatcacagcagccctcttatgggagaacagtcgaagagcgagtaccaagcaagcaatcttctgggattcaagacgccacattttcaagcctaggctacggtattcacggcgcaccggcaggagaagagcgggccggccggacacaggagcaagttggacgacatcaggaacttgagggcgagcagatgcgtgcaccgggagaaggtgaagtcgcaagcgctgttcgagaaaagccaggagctagcggcacgcagcctgatctagctgctgatcttgaccgaaagaaggaggagcaggctggtgctcgagaggcgatgaaagaggctagacggcatggcgttgtgtcggatggtgccaatgtacgacaaggggtagatacctgatgctgatcagtttcaaaatactcgtatcagccgcctttgctcaatcgcgtcgctatgcgtcttcatgtgctgccgtaacttcgaccatgtatattgaaggcgtgatctgtgacatgcctctaaagccaattgtgtatcgtttcgtcgtgcaaatatgcatgagtagcttgacggctatccggttcat

SEQ ID NO: 8484 - DNA, 1419 bp, Muscodor strobelii
  misc_feature: SGI cDNA ID NO. 562614
  misc_feature: Encodes the peptide sequence at SEQ ID NO 8485
atgtcacgacgtgggagccgtcaacgcgagaggcgttcgcgggattcttccctcccacagtccagccaggacgtcgtcacgaatggcaatggcacgtcggaaaccaaggaacgtccaaagaacaatggccccatccgtgttaagactgccggtgaaagtggccgtcgtgggcttcacccgttacagttcatatccattgtctggcgttcgacaagccgcctgtcccgagcagtcaacttcctctggcccatcgtacccgccgctatagccgtctacttcgctctcgagggccatgacactctcaaattcagtctcgcctacgtcgccatggttccctgtgcaaatctgatcggatttgctggtcaagaacttgccagaaagatgccacatacatggggcgtgctgaccgaaacgacgatcggatctgtggtcgaaatcatcctctttcttgtgcttctcctgagcgacaaaaataatcccaatctatacaatatcattcgcgctgctattcttggttcgatcctcgcaacaatgttactctgtctggggttctgtttcctagctgctggactcaagcgcgagacagtaacgttcgattctgtcggcctcggtctcgcaattccttccatttacgacaaaagcatcagtgggaaccctgattacaatctcacgacccaagagattactgatcggacgacgactatttctcgaatcattgccatactcttactcattgcctacgttgtttatgtcattttccaagttcgaactcatcatggtatatacgacgcgatcttcaaggatgacgagaaagccgacgaagatcgccacaaagacatgcaacagaagaaacttactctcacggaatgcattctcgccctcgttatctctgttggcctcgttgctctcctcgcggtcatccttgtgaaagaaattgagcctattgttgagcaaaatggtatttcagaccctttcatgggtctcattctcgtgcctctcgtagaaaaggctgcagagcatttgacggccatcgacgaagcatgggataatcagatcaacctggcgctgtcacactgcattggttccacaatccaaaccgctatgctgaacgctcctctcgttgttctcattgcctggggacaacgtatacctttggacctgagcttcgagacgtttgacattgccatccttataatcgccatcatcactgttggaaattaccttcgagatcaaaagtccgactatctcgagggattcctttgcattattgtatgtaacactgtctccggcattgccacgacatacattgcaattgccgtcgcggcgttttattatccgactctgcacttagcgggcagcgagggcggtgcagaaggtggtgcagaaagtggaaatgcggagcggagccttttgatgtga

SEQ ID NO: 8485 - protein, 472 aa, Muscodor strobelii
  misc_feature: SGI Peptide ID NO. 562614
  misc_feature (299)..(432): Pfam Id: PF01699 Pfam Desc: Sodium/calcium exchanger protein
  misc_feature (108)..(254): Pfam Id: PF01699 Pfam Desc: Sodium/calcium exchanger protein
  misc_feature (299)..(420): Pfam Id: PF01699 Pfam Desc: Sodium/calcium exchanger protein
  misc_feature (168)..(254): Pfam Id: PF01699 Pfam Desc: Sodium/calcium exchanger protein
  misc_feature (47)..(446): NCBI GI: 46110128 Blast Desc: FG01946.1 [Gibberella zeae PH-1]
  misc_feature (45)..(455): NCBI GI: 171688494 Blast Desc: protein product [Podospora anserina] gi|170944209|emb|CAP70319.1| protein product [Podospora anserina]
  misc_feature (47)..(458): NCBI GI: 116196492 Blast Desc: CHGG_04844 [Chaetomium globosum CBS 148.51] gi|88180757|gb|EAQ88225.1| CHGG_04844 [Chaetomium globosum CBS 148.51]
  misc_feature (1)..(455): NCBI GI: 156046781 Blast Desc: Ca2+/H+ antiporter [Sclerotinia sclerotiorum 1980] gi|154693869|gb|EDN93607.1| Ca2+/H+ antiporter [Sclerotinia sclerotiorum 1980]
  misc_feature (9)..(463): NCBI GI: 256720962 Blast Desc: NECHADRAFT_96780 [Nectria haematococca mpVI 77-13-4]
  misc_feature (47)..(446): NCBI GI: 154322276 Blast Desc: BC1G_01285 [Botryotinia fuckeliana B05.10] gi|150850532|gb|EDN25725.1| BC1G_01285 [Botryotinia fuckeliana B05.10]
  misc_feature (2)..(420): NCBI GI: 164425132 Blast Desc: NCU06366 [Neurospora crassa OR74A] gi|157070803|gb|EAA33164.2| conserved [Neurospora crassa OR74A]
  misc_feature (8)..(449): NCBI GI: 240272957 Blast Desc: vacuolar H+/Ca2+ exchanger [Ajellomyces capsulatus H143]
  misc_feature (8)..(449): NCBI GI: 225559502 Blast Desc: vacuolar H+/Ca2+ exchanger [Ajellomyces capsulatus G186AR]
  misc_feature (9)..(447): NCBI GI: 154311230 Blast Desc: BC1G_06733 [Botryotinia fuckeliana B05.10] gi|150851137|gb|EDN26330.1| BC1G_06733 [Botryotinia fuckeliana B05.10]
MSRRGSRQRERRSRDSSLPQSSQDVVTNGNGTSETKERPKNNGPIRVKTAGESGRRGLHPLQFISIVWRSTSRLSRAVNFLWPIVPAAIAVYFALEGHDTLKFSLAYVAMVPCANLIGFAGQELARKMPHTWGVLTETTIGSVVEIILFLVLLLSDKNNPNLYNIIRAAILGSILATMLLCLGFCFLAAGLKRETVTFDSVGLGLAIPSIYDKSISGNPDYNLTTQEITDRTTTISRIIAILLLIAYVVYVIFQVRTHHGIYDAIFKDDEKADEDRHKDMQQKKLTLTECILALVISVGLVALLAVILVKEIEPIVEQNGISDPFMGLILVPLVEKAAEHLTAIDEAWDNQINLALSHCIGSTIQTAMLNAPLVVLIAWGQRIPLDLSFETFDIAILIIAIITVGNYLRDQKSDYLEGFLCIIVCNTVSGIATTYIAIAVAAFYYPTLHLAGSEGGAEGGAESGNAERSLLM

SEQ ID NO: 8486 - DNA, 732 bp, Muscodor strobelii
  misc_feature: SGI EST ID NO. CUFF.20867.0
  misc_feature: Variant of the nucleotide sequence at SEQ ID NO 8484
ctaacacgagacatttttgccatattagattagcgaggttggtacaggtctgttactaatggcaggcctcggtctcgcaattccttccatttacgacaaaagcatcagtgggaaccctgattacaatctcacgacccaagagattactgatcggacgacgactatttctcgaatcattgccatactcttactcattgcctacgttgtttatgtcattttccaagttcgaactcatcatggtatatacgacgcgatcttcaaggatgacgagaaagccgacgaagatcgccacaaagacatgcaacagaagaaacttactctcacggaatgcattctcgccctcgttatctctgttggcctcgttgctctcctcgcggtcatccttgtgaaagaaattgagcctattgttgagcaaaatggtatttcagaccctttcatgggtctcattctcgtgcctctcgtagaaaaggctgcagagcatttgacggccatcgacgaagcatgggataatcagatcaacctggcgctgtcacactgcattggttccacaatccaaaccgctatgctgaacgctcctctcgttgttctcattgcctggggacaacgtatacctttggacctgagcttcgagacgtttgacattgccatccttataatcgccatcatcactgttggaaattaccttcgagatcaaaagtccgactatctcgagggattcctttgcattattgg

SEQ ID NO: 8487 - DNA, 5580 bp, Muscodor strobelii
  misc_feature: SGI cDNA ID NO. 562615
  misc_feature: Reduced expression when VOC is produced
  misc_feature: Encodes the peptide sequence at SEQ ID NO 8488
atggctttccatctccagcctaccggaggcagcggagcccatacacagccgtcgttgccatcgcttcccgcacatctccaatccgatacccagttgacggcacacttggccagccggtttcacgtgtcgctcccgactgcgaggctctcgtcccacgccctcatctccctcaacacttatacatcttcgacgaagggtatcgatggcggcaaggagggcagcgccatggctggcgccgaggagatcgcagaccaggcttttcgcaggctaggacatcgatctgagaatcaggccgtgctctttctaggtgaatcgggatccggaaagactactattcgatcacatctccttacttctcttctgaataaatcctccactccactctccagtaaggtttcgctagccgcatatgttttcgactctctcaccacgacaaagactgccacgaccccgactgcttccaaagctggcttgttctacgagcttcagtacgacacggcgtcgaccaccaaccctattctcattggtggaaaactgttagatcatcgcttggaacgaagcaggatcacttctgtacctaccggagaacgaaacttccacgtgctatactatctcctttccggtaccagcgacgccgagaaagcccatctgggaatcgacacccccagagactcggccggccaaaaacgctggaagtatcttggacatcccacgcaactcaaagttggaattaacgatgccgaaggattccagcttttcaagactgccctccgaaagttggagtttccccggagcgaaatcgcagaaatatgtcaaattctagcatgtattttgcacatcggccagctggagttcgaagcttcgtcgagcactctagctactgctgatgacagtggtggtttctctcacgagggttccgagactgtcacggcagcccggaacaaggacgtgttgggcataattgctgctttcttgggtgtcagctcacaggatctgcagaacaccatgggctacaagaccaaaatgattcaccgcgaacgagtaacagtcatgttggatcctcaaggcgcccgagccaatgcggatgaactggctcgaactctgtattctctgctcgtcgcctacgcgatcgagaccatcaaccaaaagctctgtgctgcggaggaatctatcgtgaataccatcaatattgtagactttcctggcttctctcagcagacatctaccggctctgctctcgaccagctcctcaataatgcggcaatggagtctctttataacctcacgcttcagaatttcttcgacagaaaggcagatatgctggacacagaagaaatttctgttcctgctacaagttactttgataactcggatgcggtcaagggcctactgaaacccggcaatggtctgcttagcattctagacgaccagacacgtcgcaaccgtaccgacatgcagctcctcgagagtctccggaagcgatttgaaggcaagaatcctgcacttaacgttggctccgcaactgcccgacttccaggcagtaacttcttgtctgaaaacactgctgctacattcactgttagacattttgctggcgaggtcgactatccagtgaaaggtatcgtcgaagaaaatggtgaaatcatctcgggtgacctcatgaatctcatcaagtcgagcaagagcgagtttgtcagtcggctctttggacaagaagcgcttcagacagtaatgcacccacaagagcgaactactgtcatgcaagcctccgtgagctcaaaacccatgagggcaccaagtgtcatgtcaaggaagacgacgaggacagcacgggcccgcagattgcgacagggctcgtatgatgatattgccagtgatgccggtgacggtcaaggcgaggagagtcgctcaaaggacgatcgaaagaagagcttacgttcatccgaacaaggcgcttcgggccagtttctcgccgctttgaataatgtgaagcaggcactcactgctcccaatacgaacaattatttcgtcttttgcttgaaacccaatgatagacggatcgcaaaccagttcgacagcaagtgcgtgcgatcacaggtccagacatttggcatagcagaaatcagccaacgtctcagatcggctgatttcagtatattccttccctttggagagttccttggccttgccgacgcggagactattatcgttggaagtgaacgtgaaaaagtcgaggccgtcgtccagaataaacaatggccaagcaacgaagttcgtattggctccactggtgtattcctcagcgagcgatgttggttggaagttgccagcttgggcgatggtagctcaggctctggtcgattattaggtggtggatcgacacctaatagtgatgtaccattcgacagctccaagggacagtccgtttccattggcaatactccacattataatgacaaaactcgagggggctactttggcgttggcgacgtcgacacgcgctcagaggccggagtatccgcctttggtgccggcgacatgtttaaaaacttggacacccgagaacaaatggcggaacgtggaaatgagaaatctctcgaggaggtggaggaattccgagatagcgcgagccggaagcgctgggtcttcatcgtctattttctcacgtggtttgttcctgattttctcatccggtgggtgggtcggatgccacgtaaagacgtgcgaatggcttggcgtgagaagttggcaatcaacttcatcatttggttcagctgtttagttgccgcctttttcattgtcgtctttccactagtcatctgccccaagcagtatgttttcagtgctgcagaactgtctaagtacgacggtaaggatggtcacaaagcgtacgcctcgattcgtggccaagttctcgatattggtgcctactctaccaaacactacccgacgtatattgatccgaaggacatcacccagtacggaggcttggatatcaccgcgcttttccctgtgcaggtctctgccctctgccagggcaagaatggcaatgttaatcccgctgttctgttggattatacatcgaccaaccgctccgggtccgccagtgtagtcaattctcaggatgcgaactcggtctatcatgactacagatacttccgtcctttgtaccaacccgactggttctatgagagggttgaggttcttaaatccagctacaagaaaggcaacatcggttatacatcccaatatgtgaaaacgctcgccaacaagcaaaaccaaatcgccatccttgggtcaagagtttatgatctgacaaagtataatcttgggggacgccacgttcaggtaccgaacggtactgccaagccaactgaccctgatatcatcaatttcttggctgatgaagtggttactcttttcactgaaaaggctggcacagacgtgacgaagctatgggatacactgcccatggataccgcattgcgcaaccgcatgcagctgtgtctggataatctgttctatgtcggcgacgtggatactcgtaactctgtgaaatgtcagttcgcggagtacctgatcctcgccgtgtctattattttggtgtctataatcggtttcaagtttcttgctgccctgcaatttggctccaagaacgtaccagagcacattgataaattcgtcatgtgtcagattcctgcatataccgaagacgaagattcattgcgtcgcgccattgattccgctgcacgtatgaggtacgacgacaagcgcaagcttctcgtcatcatttgtgatggaatgattattgggcagggcaatgacagacccactccgcgcatcgtgctcgatatcctgggtgtttctgataccgtggaccctgaaccgctcagtttcgaatcacttggtgaaggcttaaaacaacacaacatgggcaaggtctactccggtctatacgaagtccaaggtcatattgtccctttccttgttgtcgtgaaggttggtaagccatccgaggtctctcgtcctggcaatagaggcaaacgagactctcaaatggtgatgatgcgtttcctgaaccgcgttcactataacctaccgatgagccccctcgagctggaaatgtaccaccaaattcggaatgtgattggtgtcaaccctacgttttacgagtacatgctccaaatcgatgcagatactatggtcgcggcagactctgccactcgcatggtctctgccttcctccacgatacgcggctgattgcttgctgtggcgagactgctctcacaaactccaagtcctcgttcattacgatgattcaagtttatgagtactacatctcccacaatttagcgaaggctttcgaaagtttgttcggcagtgtgacatgtttgcctggatgtttcaccatgtatcgcattcgtgctgctgagacaggcaagcctctcttcgtcagcagggaggtagtggaagactacgcggctatcagagttgatactcttcacatgaagaaccttctccatctgggtgaggatcgataccttaccactcttcttctgaagtatcattcgaagtacaagacaaaattcatatccaccgcacacgcttggaccattgctcccgatacatggcaagtgttcttgtcccagcgtcgacgatggatcaactcaacggtacataatctcatcgaacttgtccctatgtctcaactttgtggcttctgctgcttcagtatgcgcttcgtcgtgttcatcgatcttttatcaacggttgtgcagccggtgactgtcgcatacgttgtatatctgattgtccttgtcggtactcagagcaccatcgtcccaatcacatcattcattttattaggcgccatttatggtttacaagctgtaatcttcattttacgcagaaaatgggaaatggtgggttggttgattctttacgtactggctgttccagtcttcacttttggtctaccattgtacgctttttggcacatggacgacttcaattggggcaacacccgcgttgttgccggagagaagggcaaaaaggttgttatatccgacgaaggcaaattcgatcctgcttctattccacgcaagaggtgggaggaataccaagccgagctctgggatgctacttctaaggaagacactcgttctgagatcagtggctttagttatgccaccaagccgggtatgaacgttgctgtttctgagtactacgttccgtctcgagctggttcgaccgtgggggcaattcctccctacgacatgaagaatgctggcaccctcagccgcatgtctctagcaccgacagagaatcggatgagccacttcggtgggtcacaattctttggcaacaacggtgagacggagatgatggatttagcatctatgcccagtgatgacgccatcctagcagagattcgggacatcttacaaactgcggatttgatgacggtaacgaagaagggcattaaacaagagttggagaggcgtttcaacgtccctctcgaatccaagagggcctatatcaatagtgctactgaggctctcgtgtctgggcagttgtaa

SEQ ID NO: 8488 - protein, 1859 aa, Muscodor strobelii
  misc_feature: SGI Peptide ID NO. 562615
  misc_feature (1202)..(1732): Pfam Id: PF03142 Pfam Desc: Chitin synthase
  misc_feature (946)..(1079): Pfam Id: PF00173 Pfam Desc: Cytochrome b5-like Heme/Steroid binding domain
  misc_feature (1803)..(1856): Pfam Id: PF08766 Pfam Desc: DEK C terminal domain
  misc_feature (19)..(768): Pfam Id: PF00063 Pfam Desc: Myosin head (motor domain)
  misc_feature (946)..(1003): Pfam Id: PF00173 Pfam Desc: Cytochrome b5-like Heme/Steroid binding domain
  misc_feature (1)..(1859): NCBI GI: 19068026 Blast Desc: chitin synthase C [Glomerella graminicola]
  misc_feature (1)..(1859): NCBI GI: 164429484 Blast Desc: NCU04352 [Neurospora crassa OR74A] gi|157073495|gb|EAA27097.2| NCU04352 [Neurospora crassa OR74A]
  misc_feature (1)..(1859): NCBI GI: 256720951 Blast Desc: glycosyltransferase family 2 [Nectria haematococca mpVI 77-13-4]
  misc_feature (13)..(1859): NCBI GI: 94469539 Blast Desc: class V chitin synthase [Neotyphodium lolii]
  misc_feature (1)..(1859): NCBI GI: 262069076 Blast Desc: chitin synthase V [Gibberella moniliformis]
  misc_feature (1)..(1859): NCBI GI: 46110164 Blast Desc: FG01964.1 [Gibberella zeae PH-1]
  misc_feature (1)..(1859): NCBI GI: 4190972 Blast Desc: Csm1 [Magnaporthe grisea]
  misc_feature (1)..(1850): NCBI GI: 171688356 Blast Desc: protein product [Podospora anserina] gi|170944140|emb|CAP70250.1| protein product [Podospora anserina]
  misc_feature (1)..(1859): NCBI GI: 28628849 Blast Desc: AF484941_1 class V chitin synthase [Fusarium oxysporum]
  misc_feature (11)..(1859): NCBI GI: 154289817 Blast Desc: chitin synthase [Botryotinia fuckeliana B05.10] gi|150848756|gb|EDN23949.1| chitin synthase [Botryotinia fuckeliana B05.10]
  misc_feature (845)..(1791): SWISSPROT Homolog: EC 2.4.1.16 Chitin synthase
  misc_feature: Useful for introducing or modulating the production of volatile compounds
MAFHLQPTGGSGAHTQPSLPSLPAHLQSDTQLTAHLASRFHVSLPTARLSSHALISLNTYTSSTKGIDGGKEGSAMAGAEEIADQAFRRLGHRSENQAVLFLGESGSGKTTIRSHLLTSLLNKSSTPLSSKVSLAAYVFDSLTTTKTATTPTASKAGLFYELQYDTASTTNPILIGGKLLDHRLERSRITSVPTGERNFHVLYYLLSGTSDAEKAHLGIDTPRDSAGQKRWKYLGHPTQLKVGINDAEGFQLFKTALRKLEFPRSEIAEICQILACILHIGQLEFEASSSTLATADDSGGFSHEGSETVTAARNKDVLGIIAAFLGVSSQDLQNTMGYKTKMIHRERVTVMLDPQGARANADELARTLYSLLVAYAIETINQKLCAAEESIVNTINIVDFPGFSQQTSTGSALDQLLNNAAMESLYNLTLQNFFDRKADMLDTEEISVPATSYFDNSDAVKGLLKPGNGLLSILDDQTRRNRTDMQLLESLRKRFEGKNPALNVGSATARLPGSNFLSENTAATFTVRHFAGEVDYPVKGIVEENGEIISGDLMNLIKSSKSEFVSRLFGQEALQTVMHPQERTTVMQASVSSKPMRAPSVMSRKTTRTARARRLRQGSYDDIASDAGDGQGEESRSKDDRKKSLRSSEQGASGQFLAALNNVKQALTAPNTNNYFVFCLKPNDRRIANQFDSKCVRSQVQTFGIAEISQRLRSADFSIFLPFGEFLGLADAETIIVGSEREKVEAVVQNKQWPSNEVRIGSTGVFLSERCWLEVASLGDGSSGSGRLLGGGSTPNSDVPFDSSKGQSVSIGNTPHYNDKTRGGYFGVGDVDTRSEAGVSAFGAGDMFKNLDTREQMAERGNEKSLEEVEEFRDSASRKRWVFIVYFLTWFVPDFLIRWVGRMPRKDVRMAWREKLAINFIIWFSCLVAAFFIVVFPLVICPKQYVFSAAELSKYDGKDGHKAYASIRGQVLDIGAYSTKHYPTYIDPKDITQYGGLDITALFPVQVSALCQGKNGNVNPAVLLDYTSTNRSGSASVVNSQDANSVYHDYRYFRPLYQPDWFYERVEVLKSSYKKGNIGYTSQYVKTLANKQNQIAILGSRVYDLTKYNLGGRHVQVPNGTAKPTDPDIINFLADEVVTLFTEKAGTDVTKLWDTLPMDTALRNRMQLCLDNLFYVGDVDTRNSVKCQFAEYLILAVSIILVSIIGFKFLAALQFGSKNVPEHIDKFVMCQIPAYTEDEDSLRRAIDSAARMRYDDKRKLLVIICDGMIIGQGNDRPTPRIVLDILGVSDTVDPEPLSFESLGEGLKQHNMGKVYSGLYEVQGHIVPFLVVVKVGKPSEVSRPGNRGKRDSQMVMMRFLNRVHYNLPMSPLELEMYHQIRNVIGVNPTFYEYMLQIDADTMVAADSATRMVSAFLHDTRLIACCGETALTNSKSSFITMIQVYEYYISHNLAKAFESLFGSVTCLPGCFTMYRIRAAETGKPLFVSREVVEDYAAIRVDTLHMKNLLHLGEDRYLTTLLLKYHSKYKTKFISTAHAWTIAPDTWQVFLSQRRRWINSTVHNLIELVPMSQLCGFCCFSMRFVVFIDLLSTVVQPVTVAYVVYLIVLVGTQSTIVPITSFILLGAIYGLQAVIFILRRKWEMVGWLILYVLAVPVFTFGLPLYAFWHMDDFNWGNTRVVAGEKGKKVVISDEGKFDPASIPRKRWEEYQAELWDATSKEDTRSEISGFSYATKPGMNVAVSEYYVPSRAGSTVGAIPPYDMKNAGTLSRMSLAPTENRMSHFGGSQFFGNNGETEMMDLASMPSDDAILAEIRDILQTADLMTVTKKGIKQELERRFNVPLESKRAYINSATEALVSGQL

SEQ ID NO: 8489 - DNA, 6262 bp, Muscodor strobelii
  misc_feature: SGI EST ID NO. CUFF.20873.0
  misc_feature: Variant of the nucleotide sequence at SEQ ID NO 8487
cggatgtagggaaaggtgcgggtaacggtcaaccagtcaagtcgcggtggtggaattatctctggctttctcattttgctctgacaatttcatcgtcacagccggttcagtttcatttgaagcaaagttggagagagcttcatatcctgtgtggctgtctcttcacactcgctccctattttctctcccggcctcttggctctgtcatgtccattcgttttagctagtcatttgcacattcgctacaataaggttctgctttctctgttcgactgagctattgcatttcccacccccagccttgaaactattccggaattcgagaatcaacagtcgctactttttacggccattgggtgatctcataattgcagccagcccgctggcaccgagcccatcatggctttccatctccagcctaccggaggcagcggagcccatacacagccgtcgttgccatcgcttcccgcacatctccaatccgatacccagttgacggcacacttggccagccggtttcacgtgtcgctcccgactgcgaggctctcgtcccacgccctcatctccctcaacacttatacatcttcgacgaagggtatcgatggcggcaaggagggcagcgccatggctggcgccgaggagatcgcagaccaggcttttcgcaggctaggacatcgatctgagaatcaggccgtgctctttctaggtgaatcgggatccggaaagactactattcgatcacatctccttacttctcttctgaataaatcctccactccactctccagtaaggtttcgctagccgcatatgttttcgactctctcaccacgacaaagactgccacgaccccgactgcttccaaagctggcttgttctacgagcttcagtacgacacggcgtcgaccaccaaccctattctcattggtggaaaactgttagatcatcgcttggaacgaagcaggatcacttctgtacctaccggagaacgaaacttccacgtgctatactatctcctttccggtaccagcgacgccgagaaagcccatctgggaatcgacacccccagagactcggccggccaaaaacgctggaagtatcttggacatcccacgcaactcaaagttggaattaacgatgccgaaggattccagcttttcaagactgccctccgaaagttggagtttccccggagcgaaatcgcagaaatatgtcaaattctagcatgtattttgcacatcggccagctggagttcgaagcttcgtcgagcactctagctactgctgatgacagtggtggtttctctcacgagggttccgagactgtcacggcagcccggaacaaggacgtgttgggcataattgctgctttcttgggtgtcagctcacaggatctgcagaacaccatgggctacaagaccaaaatgattcaccgcgaacgagtaacagtcatgttggatcctcaaggcgcccgagccaatgcggatgaactggctcgaactctgtattctctgctcgtcgcctacgcgatcgagaccatcaaccaaaagctctgtgctgcggaggaatctatcgtgaataccatcaatattgtagactttcctggcttctctcagcagacatctaccggctctgctctcgaccagctcctcaataatgcggcaatggagtctctttataacctcacgcttcagaatttcttcgacagaaaggcagatatgctggacacagaagaaatttctgttcctgctacaagttactttgataactcggatgcggtcaagggcctactgaaacccggcaatggtctgcttagcattctagacgaccagacacgtcgcaaccgtaccgacatgcagctcctcgagagtctccggaagcgatttgaaggcaagaatcctgcacttaacgttggctccgcaactgcccgacttccaggcagtaacttcttgtctgaaaacactgctgctacattcactgttagacattttgctggcgaggtcgactatccagtgaaaggtatcgtcgaagaaaatggtgaaatcatctcgggtgacctcatgaatctcatcaagtcgagcaagagcgagtttgtcagtcggctctttggacaagaagcgcttcagacagtaatgcacccacaagagcgaactactgtcatgcaagcctccgtgagctcaaaacccatgagggcaccaagtgtcatgtcaaggaagacgacgaggacagcacgggcccgcagattgcgacagggctcgtatgatgatattgccagtgatgccggtgacggtcaaggcgaggagagtcgctcaaaggacgatcgaaagaagagcttacgttcatccgaacaaggcgcttcgggccagtttctcgccgctttgaataatgtgaagcaggcactcactgctcccaatacgaacaattatttcgtcttttgcttgaaacccaatgatagacggatcgcaaaccagttcgacagcaagtgcgtgcgatcacaggtccagacatttggcatagcagaaatcagccaacgtctcagatcggctgatttcagtatattccttccctttggagagttccttggccttgccgacgcggagactattatcgttggaagtgaacgtgaaaaagtcgaggccgtcgtccagaataaacaatggccaagcaacgaagttcgtattggctccactggtgtattcctcagcgagcgatgttggttggaagttgccagcttgggcgatggtagctcaggctctggtcgattattaggtggtggatcgacacctaatagtgatgtaccattcgacagctccaagggacagtccgtttccattggcaatactccacattataatgacaaaactcgagggggctactttggcgttggcgacgtcgacacgcgctcagaggccggagtatccgcctttggtgccggcgacatgtttaaaaacttggacacccgagaacaaatggcggaacgtggaaatgagaaatctctcgaggaggtggaggaattccgagatagcgcgagccggaagcgctgggtcttcatcgtctattttctcacgtggtttgttcctgattttctcatccggtgggtgggtcggatgccacgtaaagacgtgcgaatggcttggcgtgagaagttggcaatcaacttcatcatttggttcagctgtttagttgccgcctttttcattgtcgtctttccactagtcatctgccccaagcagtatgttttcagtgctgcagaactgtctaagtacgacggtaaggatggtcacaaagcgtacgcctcgattcgtggccaagttctcgatattggtgcctactctaccaaacactacccgacgtatattgatccgaaggacatcacccagtacggaggcttggatatcaccgcgcttttccctgtgcaggtctctgccctctgccagggcaagaatggcaatgttaatcccgctgttctgttggattatacatcgaccaaccgctccgggtccgccagtgtagtcaattctcaggatgcgaactcggtctatcatgactacagatacttccgtcctttgtaccaacccgactggttctatgagagggttgaggttcttaaatccagctacaagaaaggcaacatcggttatacatcccaatatgtgaaaacgctcgccaacaagcaaaaccaaatcgccatccttgggtcaagagtttatgatctgacaaagtataatcttgggggacgccacgttcaggtaccgaacggtactgccaagccaactgaccctgatatcatcaatttcttggctgatgaagtggttactcttttcactgaaaaggctggcacagacgtgacgaagctatgggatacactgcccatggataccgcattgcgcaaccgcatgcagctgtgtctggataatctgttctatgtcggcgacgtggatactcgtaactctgtgaaatgtcagttcgcggagtacctgatcctcgccgtgtctattattttggtgtctataatcggtttcaagtttcttgctgccctgcaatttggctccaagaacgtaccagagcacattgataaattcgtcatgtgtcagattcctgcatataccgaagacgaagattcattgcgtcgcgccattgattccgctgcacgtatgaggtacgacgacaagcgcaagcttctcgtcatcatttgtgatggaatgattattgggcagggcaatgacagacccactccgcgcatcgtgctcgatatcctgggtgtttctgataccgtggaccctgaaccgctcagtttcgaatcacttggtgaaggcttaaaacaacacaacatgggcaaggtctactccggtctatacgaagtccaaggtcatattgtccctttccttgttgtcgtgaaggttggtaagccatccgaggtctctcgtcctggcaatagaggcaaacgagactctcaaatggtgatgatgcgtttcctgaaccgcgttcactataacctaccgatgagccccctcgagctggaaatgtaccaccaaattcggaatgtgattggtgtcaaccctacgttttacgagtacatgctccaaatcgatgcagatactatggtcgcggcagactctgccactcgcatggtctctgccttcctccacgatacgcggctgattgcttgctgtggcgagactgctctcacaaactccaagtcctcgttcattacgatgattcaagtttatgagtactacatctcccacaatttagcgaaggctttcgaaagtttgttcggcagtgtgacatgtttgcctggatgtttcaccatgtatcgcattcgtgctgctgagacaggcaagcctctcttcgtcagcagggaggtagtggaagactacgcggctatcagagttgatactcttcacatgaagaaccttctccatctgggtgaggatcgataccttaccactcttcttctgaagtatcattcgaagtacaagacaaaattcatatccaccgcacacgcttggaccattgctcccgatacatggcaagtgttcttgtcccagcgtcgacgatggatcaactcaacggtacataatctcatcgaacttgtccctatgtctcaactttgtggcttctgctgcttcagtatgcgcttcgtcgtgttcatcgatcttttatcaacggttgtgcagccggtgactgtcgcatacgttgtatatctgattgtccttgtcggtactcagagcaccatcgtcccaatcacatcattcattttattaggcgccatttatggtttacaagctgtaatcttcattttacgcagaaaatgggaaatggtgggttggttgattctttacgtactggctgttccagtcttcacttttggtctaccattgtacgctttttggcacatggacgacttcaattggggcaacacccgcgttgttgccggagagaagggcaaaaaggttgttatatccgacgaaggcaaattcgatcctgcttctattccacgcaagaggtgggaggaataccaagccgagctctgggatgctacttctaaggaagacactcgttctgagatcagtggctttagttatgccaccaagccgggtatgaacgttgctgtttctgagtactacgttccgtctcgagctggttcgaccgtgggggcaattcctccctacgacatgaagaatgctggcaccctcagccgcatgtctctagcaccgacagagaatcggatgagccacttcggtgggtcacaattctttggcaacaacggtgagacggagatgatggatttagcatctatgcccagtgatgacgccatcctagcagagattcgggacatcttacaaactgcggatttgatgacggtaacgaagaagggcattaaacaagagttggagaggcgtttcaacgtccctctcgaatccaagagggcctatatcaatagtgctactgaggctctcgtgtctgggcagttgtaagagaaatagtaattgatccacgtgattaacgggttcgtcagcatatatgtgtgtatggacgtttgcatagattttggggcatcgggcacccgggtattgggtacgcaaagcgttaattgtttggccatagtacaagaaaatgcgtctcttcgcatgtaatactaaatcatttcaaattcaccttgcattaaaccatagatcacatttattgtctcgcttagtcgcgaattttcattatcgcgttcgttctgacatagacttcgtggatctatcgggagctgca

SEQ ID NO: 8490 - DNA, 5337 bp, Muscodor strobelii
  misc_feature: SGI cDNA ID NO. 562616
  misc_feature: Reduced expression when VOC is produced
  misc_feature: Encodes the peptide sequence at SEQ ID NO 8491
atggccaaccaccaggcccgtatgtctatgtattcggttgcctccgagtccttcaatggtcctcgaggtgccggacaacaatcatcccaagtgtcgacgacgaccctgctcaatgctatccataatatctacttgtcgtcacagccctatcgactggacgctgggacaagtgcagtagtcaacacatggcttactgccgcacaagctggtcccgatggtcgtcccggtggtactgtagatgctagcctagctgtcagagcctgggagcacgcacgacgccgcgccgaagatggctgcgttgtcctggggtctctacacacatcaactccatcattgttggcaccatttctatcgtcttttccggtctccatcccctcttcgcttttcaccgcactcgaagctatacaacctttcattcgatgtgtaacgccattcaatccatccgcctcacgacaaacagcacttggtgttacactcactctcaacttggctggcaagttgacgggtgcaaccgttgcgctctctcagggtggcatcaacactgaccaaggcttgttgaaaatcccggccgaagcgggctaccgtgccttcgacgtattctactatttgttaacctcagcttcaacacctgcagagcgagaatttctcagtttaagatcagctgctgagtacacacttctggcaaagtcaggcacgtatgacacgccatcgtatctcgctactgccgatgactccgccgccgccgatgatttccgaagggcgttgaaagagatcggcattaaaggatcatctcatcgcaatcttatttctgccctcgcaggtcttctaaagctaggtaacacactggattacactgttgacggtgatgggctggaagcaatctgtgaagatgtcggtgggctcctgggcttagacccagatgtcctgatgacccaatgcacgacagaagatcgacaaactcttgttggtggactctatgaagctcttgtcgactgggttattaccaaagccaatggagctattgaggttcagatgggccgagtccgagatggggatgaatctctagatggccaccgaacgccatcttccaacggcgacaccgtgtccatcactgtcatcgatgtgccagaccccaacctaggcaaagctttgtctatgcgtggcattttcgacgacagcctgggaatcaacgctgaaatgagagaagatggcgttgacgtcgtttcagctggaagttcagtacagcgagagatgcagaatgccgtggcagagtctgcaccggatttgggtgtgatgacgggacctgctgcacgtgatcgccagcatcaattggaaaagagagaaatcgttctcgaaaaggtcggctttgcatgtgaagacgaaggcttcttgaaaaagctcttgttccctatccctggccaaggcattaatctcggccgcaatgcaaggatggatttgtcctctgtcttgggtgccagtcgggtctggtaccacctgtccctgcaccctaccgacgagagtccggcaagcttagcagctcttccctctgtaacgtctgcttggtctgccggtacagtttcccgacagcttcgggcatggagactgccggaatgggccaatttgagaaacaaaaatctcgacttcacggctgattttgatctcgacgagtttcatcaacgctttgctccgcttggttgcagagagggtcgagaaggcatcgagtcatggattcttgaaagaggctggagtaatggcgaagtcgtcgtcggaaaagagcgcgtgtggatgcgggagtctgcgtggtgggaggctgagagtatgcttgatctcaaacctcctcacgaagttatgcctgctatgaataatccattcgcaacgcctggccacgattccgtgtatggcaacaacaacggcagcggattttttgcgccccaatttcctgaccatgcctcgtcgaatcacagccacgaaaacctcatgatgcaccaacgaaatcaaagccagctcacatttgcccagagccaaatgagagctccatctgtcagtccatccgccatgcgtaacgcgccaggtgattatggtctaggtatgaagggtgatagccagcgcgatcagacatactacacaagttggggagagcttgccggggatctggaccctgccgacgccaaaggcaaacatgttgagactgaagaagtttctgccggtcggcgtgtctgggttgccattgtctgggctttaacgttctggattccttcgttccttcttcattacgttggaagaatgaagcgcccagatgttcgcatggcttggcgcgagaagcttgttctggtttggctgatcatattgcttaatgctatcatcgtcttcttcattatttttttcagcaggctattgtgtcccaacttcgacaaagcttggacacagacagaggtttccggtcatacagccgacgacaacttctgggtcagtatccatggctccgtctacgatatcactaaattttggagaattcaacacagcgacagcggtgttcagacaaccaatgacatgatgcgacaatttggcgggttgaatctcgatcaatacttccagccgccactaacagtatcgtgtcctggaattgttacagacgaaacagtccagcttatgatcaacccggaagataccaacttggccacgttgtcgcaaggcttacatacctcgggctactatggtaataaaaactcagatgccttgtcgagtgatacttggtacaaaaagacgtttcagccaaagatcaaggaatactaccatggcgagcttgtctgggacaagaaaaaggtccagaaagaaagttcagaatggagtctcaacgtcgtcatttacgagggacgcatctataatcttacagattacttttacactatcaactacaacgaaaaacttgctttcctcgacagcactctaacagacgtcattacaaacaatcctgggcaagatgtcacaaccacatggaacgaccatctcgccagtgtcgcaaacaatgatacggcttccgcaatcgcccagaacagcatcaactgtatcaaggaaacattttacgtcggaaaacctgatttccgagattcagccagatgtcaggcaatcaactatgctcttctggcattcacgatccttgtcggttcagtaatcattgtcaaatttgttgctgctctacaatttggttcaaaacgacgcccctccccgcaagataaattcgttatttgccaggttcctgcttatacagagggcgaggattcgcttcgcaaagctttagactcccttactgcactccagtatgacaacaagagaaaactcatctgtgtcatctgcgatggtgttatcgtcggtgccggcaacgatcgtcctacacctaaaatagtgctcgacatcttgggcgtcgatcctaaagtagatccacctgctttgccgttcaagtccgtcggtactgggagcgagcagctcaactacggcaaagtgtactctgggttgtatgagtatgagggcaatgttgttccttatattgttgtggtcaaattcggcaaagaatcggaacagacaaaaacgaaaccaggcaaccgtggcaagcgcgactcgcaaatcatgctgatgagcttcttaaatcgtgttcaccatcgcgctccgatgaatcctctggagctcgagatgttccatcagatcaacaacatcattggcgtcgaccccgaattatatgagtatctactgatggtagacgctgatacttgcgtccgagaagactcgctgaatcgtctggttgctgcctgcgccaataactcaaagattgctggaatttgcggtgaaacagcacttcagaacgaggaacgcacatggtggagcatgatccaggtttacgaatattatatttcacatcatctgtcgaaagctttcgagtcgctgtttggtagtgtcacctgtcttcctggctgctttacgatgtaccgcttgagaacagctgataaaggcaaacccttgatcatttctgacgaagtgattcgcgaatacagcttcaacaacgtcgatactcttcacaagaagaacctactcgctctcggtgaagatcgtttcctgaccacacttatgacgaagcactttccatctatgtcatacaaattcctcccagacgcgtactgccaaactgccgcacccgaatcgtggagcgtgctgctttcacagcgacgcagatggatcaactccaccattcacaacctgttcgagctgatgctgttgcccaatatgtgcggcttttgctgcttctctatgcgttttgtggtctttatcgatctcttcggtacaattattttgcctgccacgacggtctatcttggctacttgatttatgtccttgcaactggctctggcccaattccttatatttcattggccatcttggctgctgtgtatggattccaggccatcattttcatcctaaaacgacagtggcagcatattggttggatcatcatctaccttctagctttcccaattttctcgtttgtcttaccggtctactccttctggaatcaagacaatttcacttggggaaatacgcgtattgtcattggggagaagggaaagaaacaagttgttgcggttgatgacaaagacggcttcgacccgcgttctatcccccttcaacgctgggatgactatgccgcccagaatggtctccctggtcgccgcggtacacaggcggagaaagtccacgacccgtatgaggacaactacgaaatggatgacatgcgctcagtgtactcatcagtccgacagccttcagtcctgactggtctccaaggccgtggaggctacatgccaccgcactcaccggctccttttcagggcgtgtcacgacagtctacattcgacgcgtacacggataacccaatgcaccgccagtcaaccgcctcctttggagatattcaacgcgcccattctccttatcaggacatgtcccaatccgtctatagaccaagcatgagcaatctgagagctgtctccaatagctcgccgctcaatgatggacctcgagctgctacccccggcttattgggagcgcgtccttctctcggccaaggacaccaatccgtagcgtccttcgatttccaacgcggaaacactgggccatcggatgccatgatcttggaagccattcaagccgttctgcgagacgtcgacttggacacagttacgaagaaacaagttcgtgccttagtagaacaaagactacaaacggaactagttggagagaagcgaacattcatggatcgtcaaatcgacaatgaattggcgaacatgtag

SEQ ID NO: 8491 - protein, 1778 aa, Muscodor strobelii
  misc_feature: SGI Peptide ID NO. 562616
  misc_feature (1055)..(1578): Pfam Id: PF03142 Pfam Desc: Chitin synthase
  misc_feature (806)..(928): Pfam Id: PF00173 Pfam Desc: Cytochrome b5-like Heme/Steroid binding domain
  misc_feature (1722)..(1776): Pfam Id: PF08766 Pfam Desc: DEK C terminal domain
  misc_feature (22)..(703): Pfam Id: PF00063 Pfam Desc: Myosin head (motor domain)
  misc_feature (806)..(836): Pfam Id: PF00173 Pfam Desc: Cytochrome b5-like Heme/Steroid binding domain
  misc_feature (188)..(393): Pfam Id: PF00063 Pfam Desc: Myosin head (motor domain)
  misc_feature (460)..(612): Pfam Id: PF00063 Pfam Desc: Myosin head (motor domain)
  misc_feature (22)..(102): Pfam Id: PF00063 Pfam Desc: Myosin head (motor domain)
  misc_feature (1)..(1778): NCBI GI: 28192379 Blast Desc: class V chitin synthase [Glomerella graminicola] gi|71842455|gb|AAZ43360.1| class V chitin synthase [Glomerella graminicola]
  misc_feature (10)..(1778): NCBI GI: 261352272 Blast Desc: chitin synthase [Verticillium albo-atrum VaMs.102]
  misc_feature (6)..(1778): NCBI GI: 151413789 Blast Desc: ChsVb [Fusarium oxysporum f. sp. lycopersici]
  misc_feature (6)..(1778): NCBI GI: 262069080 Blast Desc: chitin synthase 7 [Gibberella moniliformis]
  misc_feature (1)..(1778): NCBI GI: 171688358 Blast Desc: protein product [Podospora anserina] gi|170944141|emb|CAP70251.1| protein product [Podospora anserina]
  misc_feature (6)..(1778): NCBI GI: 256720743 Blast Desc: NECHADRAFT_123231 [Nectria haematococca mpVI 77-13-4]
  misc_feature (13)..(1778): NCBI GI: 164429486 Blast Desc: chitin synthase 6 [Neurospora crassa OR74A] gi|157073496|gb|EAA27095.2| chitin synthase 6 [Neurospora crassa OR74A]
  misc_feature (7)..(1778): NCBI GI: 156031389 Blast Desc: SS1G_14116 [Sclerotinia sclerotiorum 1980] gi|154699518|gb|EDN99256.1| SS1G_14116 [Sclerotinia sclerotiorum 1980]
  misc_feature (1)..(1778): NCBI GI: 157285017 Blast Desc: chitin synthase class VII [Paracoccidioides brasiliensis]
  misc_feature (1)..(1778): NCBI GI: 225678085 Blast Desc: chitin synthase [Paracoccidioides brasiliensis Pb03]
  misc_feature: Useful for introducing or modulating the production of volatile compounds
MANHQARMSMYSVASESFNGPRGAGQQSSQVSTTTLLNAIHNIYLSSQPYRLDAGTSAVVNTWLTAAQAGPDGRPGGTVDASLAVRAWEHARRRAEDGCVVLGSLHTSTPSLLAPFLSSFPVSIPSSLFTALEAIQPFIRCVTPFNPSASRQTALGVTLTLNLAGKLTGATVALSQGGINTDQGLLKIPAEAGYRAFDVFYYLLTSASTPAEREFLSLRSAAEYTLLAKSGTYDTPSYLATADDSAAADDFRRALKEIGIKGSSHRNLISALAGLLKLGNTLDYTVDGDGLEAICEDVGGLLGLDPDVLMTQCTTEDRQTLVGGLYEALVDWVITKANGAIEVQMGRVRDGDESLDGHRTPSSNGDTVSITVIDVPDPNLGKALSMRGIFDDSLGINAEMREDGVDVVSAGSSVQREMQNAVAESAPDLGVMTGPAARDRQHQLEKREIVLEKVGFACEDEGFLKKLLFPIPGQGINLGRNARMDLSSVLGASRVWYHLSLHPTDESPASLAALPSVTSAWSAGTVSRQLRAWRLPEWANLRNKNLDFTADFDLDEFHQRFAPLGCREGREGIESWILERGWSNGEVVVGKERVWMRESAWWEAESMLDLKPPHEVMPAMNNPFATPGHDSVYGNNNGSGFFAPQFPDHASSNHSHENLMMHQRNQSQLTFAQSQMRAPSVSPSAMRNAPGDYGLGMKGDSQRDQTYYTSWGELAGDLDPADAKGKHVETEEVSAGRRVWVAIVWALTFWIPSFLLHYVGRMKRPDVRMAWREKLVLVWLIILLNAIIVFFIIFFSRLLCPNFDKAWTQTEVSGHTADDNFWVSIHGSVYDITKFWRIQHSDSGVQTTNDMMRQFGGLNLDQYFQPPLTVSCPGIVTDETVQLMINPEDTNLATLSQGLHTSGYYGNKNSDALSSDTWYKKTFQPKIKEYYHGELVWDKKKVQKESSEWSLNVVIYEGRIYNLTDYFYTINYNEKLAFLDSTLTDVITNNPGQDVTTTWNDHLASVANNDTASAIAQNSINCIKETFYVGKPDFRDSARCQAINYALLAFTILVGSVIIVKFVAALQFGSKRRPSPQDKFVICQVPAYTEGEDSLRKALDSLTALQYDNKRKLICVICDGVIVGAGNDRPTPKIVLDILGVDPKVDPPALPFKSVGTGSEQLNYGKVYSGLYEYEGNVVPYIVVVKFGKESEQTKTKPGNRGKRDSQIMLMSFLNRVHHRAPMNPLELEMFHQINNIIGVDPELYEYLLMVDADTCVREDSLNRLVAACANNSKIAGICGETALQNEERTWWSMIQVYEYYISHHLSKAFESLFGSVTCLPGCFTMYRLRTADKGKPLIISDEVIREYSFNNVDTLHKKNLLALGEDRFLTTLMTKHFPSMSYKFLPDAYCQTAAPESWSVLLSQRRRWINSTIHNLFELMLLPNMCGFCCFSMRFVVFIDLFGTIILPATTVYLGYLIYVLATGSGPIPYISLAILAAVYGFQAIIFILKRQWQHIGWIIIYLLAFPIFSFVLPVYSFWNQDNFTWGNTRIVIGEKGKKQVVAVDDKDGFDPRSIPLQRWDDYAAQNGLPGRRGTQAEKVHDPYEDNYEMDDMRSVYSSVRQPSVLTGLQGRGGYMPPHSPAPFQGVSRQSTFDAYTDNPMHRQSTASFGDIQRAHSPYQDMSQSVYRPSMSNLRAVSNSSPLNDGPRAATPGLLGARPSLGQGHQSVASFDFQRGNTGPSDAMILEAIQAVLRDVDLDTVTKKQVRALVEQRLQTELVGEKRTFMDRQIDNELANM

SEQ ID NO: 8492 - DNA, 6721 bp, Muscodor strobelii
  misc_feature: SGI EST ID NO. CUFF.20904.0
  misc_feature: Variant of the nucleotide sequence at SEQ ID NO 8490
tgacagcagagatcacaatctagtcgaattcgagttttggcgacccgagccaacttcgcaaaatagatgaaggccaaaaactacagagcactagggctgaatcacgagatacccccttttacgcaaatccgatcatcgatgagctgatggggacactaagcctcaatcagggcggataaaaaaaagtagacgagccagcgcgccaggctcgccgggggagattcaccagtcgcaggcggaacgggttaaaaaaagaacattcgaggtacccagtacatgcatggcacagcagtggccagtacatcggcgggacttgtgcacgcctcggcgcccagctttctgtggtggtggaacatggcttggaagacaacaagcactgtgttttgctaaccagagcgctgcgctttggagactttctggaccaaggcctgttgtcaccggacggttatggctttagtgccaggtaccagaggaagagtgcaggaaaagcctggagcccaagcaccatgccatgattctcatggtcaacagtccgagagcaattcttccttgcactttgcaacttcgattcatcatttctcgccagaaagtctgcgtatcacttctaattttcaaccccctcattcgttttggtggcgttgttcatacttagtctgtcgttcataatctatacagcaaattattgcacctaatatagcacactttgtattgccttccgttctgctagagatgcgagtatagtaggtcgacgagatacctaacattccgttgctcgttaaccgagaagactgtcggccgggtctcttttccacaccaaccccgttgtctctgcgtagctgcaatcgtctcgaagctacacccgggcatttggtcctcctctagtcaaattgtcccgtcggggacgcatccgctcgctactacactaagccgacgtgtctgtccgaaagggcaaccacgtttggatccaagtccaacatggccaaccaccaggcccgtatgtctatgtattcggttgcctccgagtccttcaatggtcctcgaggtgccggacaacaatcatcccaagtgtcgacgacgaccctgctcaatgctatccataatatctacttgtcgtcacagccctatcgactggacgctgggacaagtgcagtagtcaacacatggcttactgccgcacaagctggtcccgatggtcgtcccggtggtactgtagatgctagcctagctgtcagagcctgggagcacgcacgacgccgcgccgaagatggctgcgttgtcctggggtctctacacacatcaactccatcattgttggcaccatttctatcgtcttttccggtctccatcccctcttcgcttttcaccgcactcgaagctatacaacctttcattcgatgtgtaacgccattcaatccatccgcctcacgacaaacagcacttggtgttacactcactctcaacttggctggcaagttgacgggtgcaaccgttgcgctctctcagggtggcatcaacactgaccaaggcttgttgaaaatcccggccgaagcgggctaccgtgccttcgacgtattctactatttgttaacctcagcttcaacacctgcagagcgagaatttctcagtttaagatcagctgctgagtacacacttctggcaaagtcaggcacgtatgacacgccatcgtatctcgctactgccgatgactccgccgccgccgatgatttccgaagggcgttgaaagagatcggcattaaaggatcatctcatcgcaatcttatttctgccctcgcaggtcttctaaagctaggtaacacactggattacactgttgacggtgatgggctggaagcaatctgtgaagatgtcggtgggctcctgggcttagacccagatgtcctgatgacccaatgcacgacagaagatcgacaaactcttgttggtggactctatgaagctcttgtcgactgggttattaccaaagccaatggagctattgaggttcagatgggccgagtccgagatggggatgaatctctagatggccaccgaacgccatcttccaacggcgacaccgtgtccatcactgtcatcgatgtgccagaccccaacctaggcaaagctttgtctatgcgtggcattttcgacgacagcctgggaatcaacgctgaaatgagagaagatggcgttgacgtcgtttcagctggaagttcagtacagcgagagatgcagaatgccgtggcagagtctgcaccggatttgggtgtgatgacgggacctgctgcacgtgatcgccagcatcaattggaaaagagagaaatcgttctcgaaaaggtcggctttgcatgtgaagacgaaggcttcttgaaaaagctcttgttccctatccctggccaaggcattaatctcggccgcaatgcaaggatggatttgtcctctgtcttgggtgccagtcgggtctggtaccacctgtccctgcaccctaccgacgagagtccggcaagcttagcagctcttccctctgtaacgtctgcttggtctgccggtacagtttcccgacagcttcgggcatggagactgccggaatgggccaatttgagaaacaaaaatctcgacttcacggctgattttgatctcgacgagtttcatcaacgctttgctccgcttggttgcagagagggtcgagaaggcatcgagtcatggattcttgaaagaggctggagtaatggcgaagtcgtcgtcggaaaagagcgcgtgtggatgcgggagtctgcgtggtgggaggctgagagtatgcttgatctcaaacctcctcacgaagttatgcctgctatgaataatccattcgcaacgcctggccacgattccgtgtatggcaacaacaacggcagcggattttttgcgccccaatttcctgaccatgcctcgtcgaatcacagccacgaaaacctcatgatgcaccaacgaaatcaaagccagctcacatttgcccagagccaaatgagagctccatctgtcagtccatccgccatgcgtaacgcgccaggtgattatggtctaggtatgaagggtgatagccagcgcgatcagacatactacacaagttggggagagcttgccggggatctggaccctgccgacgccaaaggcaaacatgttgagactgaagaagtttctgccggtcggcgtgtctgggttgccattgtctgggctttaacgttctggattccttcgttccttcttcattacgttggaagaatgaagcgcccagatgttcgcatggcttggcgcgagaagcttgttctggtttggctgatcatattgcttaatgctatcatcgtcttcttcattatttttttcagcaggctattgtgtcccaacttcgacaaagcttggacacagacagaggtttccggtcatacagccgacgacaacttctgggtcagtatccatggctccgtctacgatatcactaaattttggagaattcaacacagcgacagcggtgttcagacaaccaatgacatgatgcgacaatttggcgggttgaatctcgatcaatacttccagccgccactaacagtatcgtgtcctggaattgttacagacgaaacagtccagcttatgatcaacccggaagataccaacttggccacgttgtcgcaaggcttacatacctcgggctactatggtaataaaaactcagatgccttgtcgagtgatacttggtacaaaaagacgtttcagccaaagatcaaggaatactaccatggcgagcttgtctgggacaagaaaaaggtccagaaagaaagttcagaatggagtctcaacgtcgtcatttacgagggacgcatctataatcttacagattacttttacactatcaactacaacgaaaaacttgctttcctcgacagcactctaacagacgtcattacaaacaatcctgggcaagatgtcacaaccacatggaacgaccatctcgccagtgtcgcaaacaatgatacggcttccgcaatcgcccagaacagcatcaactgtatcaaggaaacattttacgtcggaaaacctgatttccgagattcagccagatgtcaggcaatcaactatgctcttctggcattcacgatccttgtcggttcagtaatcattgtcaaatttgttgctgctctacaatttggttcaaaacgacgcccctccccgcaagataaattcgttatttgccaggttcctgcttatacagagggcgaggattcgcttcgcaaagctttagactcccttactgcactccagtatgacaacaagagaaaactcatctgtgtcatctgcgatggtgttatcgtcggtgccggcaacgatcgtcctacacctaaaatagtgctcgacatcttgggcgtcgatcctaaagtagatccacctgctttgccgttcaagtccgtcggtactgggagcgagcagctcaactacggcaaagtgtactctgggttgtatgagtatgagggcaatgttgttccttatattgttgtggtcaaattcggcaaagaatcggaacagacaaaaacgaaaccaggcaaccgtggcaagcgcgactcgcaaatcatgctgatgagcttcttaaatcgtgttcaccatcgcgctccgatgaatcctctggagctcgagatgttccatcagatcaacaacatcattggcgtcgaccccgaattatatgagtatctactgatggtagacgctgatacttgcgtccgagaagactcgctgaatcgtctggttgctgcctgcgccaataactcaaagattgctggaatttgcggtgaaacagcacttcagaacgaggaacgcacatggtggagcatgatccaggtttacgaatattatatttcacatcatctgtcgaaagctttcgagtcgctgtttggtagtgtcacctgtcttcctggctgctttacgatgtaccgcttgagaacagctgataaaggcaaacccttgatcatttctgacgaagtgattcgcgaatacagcttcaacaacgtcgatactcttcacaagaagaacctactcgctctcggtgaagatcgtttcctgaccacacttatgacgaagcactttccatctatgtcatacaaattcctcccagacgcgtactgccaaactgccgcacccgaatcgtggagcgtgctgctttcacagcgacgcagatggatcaactccaccattcacaacctgttcgagctgatgctgttgcccaatatgtgcggcttttgctgcttctctatgcgttttgtggtctttatcgatctcttcggtacaattattttgcctgccacgacggtctatcttggctacttgatttatgtccttgcaactggctctggcccaattccttatatttcattggccatcttggctgctgtgtatggattccaggccatcattttcatcctaaaacgacagtggcagcatattggttggatcatcatctaccttctagctttcccaattttctcgtttgtcttaccggtctactccttctggaatcaagacaatttcacttggggaaatacgcgtattgtcattggggagaagggaaagaaacaagttgttgcggttgatgacaaagacggcttcgacccgcgttctatcccccttcaacgctgggatgactatgccgcccagaatggtctccctggtcgccgcggtacacaggcggagaaagtccacgacccgtatgaggacaactacgaaatggatgacatgcgctcagtgtactcatcagtccgacagccttcagtcctgactggtctccaaggccgtggaggctacatgccaccgcactcaccggctccttttcagggcgtgtcacgacagtctacattcgacgcgtacacggataacccaatgcaccgccagtcaaccgcctcctttggagatattcaacgcgcccattctccttatcaggacatgtcccaatccgtctatagaccaagcatgagcaatctgagagctgtctccaatagctcgccgctcaatgatggacctcgagctgctacccccggcttattgggagcgcgtccttctctcggccaaggacaccaatccgtagcgtccttcgatttccaacgcggaaacactgggccatcggatgccatgatcttggaagccattcaagccgttctgcgagacgtcgacttggacacagttacgaagaaacaagttcgtgccttagtagaacaaagactacaaacggaactagttggagagaagcgaacattcatggatcgtcaaatcgacaatgaattggcgaacatgtagttaatggttcatggatttgtgatagatattgtatgagatctgaagacatatctcatgatgttattggtgttgggttcgaagccaccgcccaagcgagggtggcattagacaaaaatcatataggtccgatctacatttgtattttgaaaaggtcttgaatgggttcgcattgcaaagccagatggtatggttttctttttctatctgttgatagtggtatttcagtccttgtcatgataatataatcacgtctcgaattactttttatggggtttcccgaccttggaatttcagcagacgaatatgaatatgctaaatggaatgcggaagacatgtgaaatgacattgcggtaacagaggtagcgtatcttccatgtggttcaccgttcggcgtaggtttggagtcgta

SEQ ID NO: 8493 - DNA, 1419 bp, Muscodor strobelii
  misc_feature: SGI cDNA ID NO. 562617
  misc_feature: Encodes the peptide sequence at SEQ ID NO 8494
atgagaagattacacaggccattgaggtgtttgcgcacgcccaatgcctcgttttaccatgtgaatcgcctacagtctcttcaatttgcaaaatgtattgctaccacaccgtccttgtctctgtcacatgctgccagtgccacacacggccactcgccccaacccatccaccgtgcgacagtcactgacgatgccattgccgacctcgccaacaagggccagcactcgctaagcctggccgatctggtcgaacacggccgtccacctcttgctgaggagtccttgttcgcttcggccaacttcactctcagtctccttcccatccgcctagctcaccgtatccaagccttgcgaaatcttcctttcattgtcgtttcgaacccgaacatttctcgaatttacaataactacctacattcgctctcgacacttctgccgtggaagcacaggaccatctcgaaccttgaagatgagattcagttcacttcggtcctcgccgaactcgtagcaacccaccaagataccattcctattctcgcaaagggcttcctcgagtgccggcgctacatctcacctactgaagtcactagatttcttgacacgcacttgcgtacacgcatcggcactcgtctgattgcagagcagcatattgctctgcactacagtagcgtaccgcattttgaccccggcgcctcgccgacgccatgcccagaacaccccagctacatcggcgtcatcgacaccgcattgtcccctgccgccattgttgactcgtgtgccggcttcgtagctgatatctgcgagctcaagtacggcgtccgcccacaatgggtcattgatggcgagccagatactaccttcgcgttcgtaccgatgcatctcgagtatattgtcactgaacttcttaaaaatgccttccgtgcgactgtagaaaacaccaacatacaagggaatagagaacctgttgtgataaccatagcccctgagcctcccgatgctggtccgccacgcgtaaagctggatccgcctgctgcagctatgggtgcatttcgtgaagaagcgattcaaccgcttgacgacaatgcaccgggggtcacggtgaggattagggatcgtgggggtggcatcgcgcctgatgtattgcccaacatttggagttatagcttcactacttttagtgatgatgatatggacgatatgatgatgtctcacggtggcgccggaggcggtcagaaggacgctctcggggtcatatcggcggctagtagcggtggcagctcgatagctggtcttggttacggattgccgctcagtcgcgcgtatgccgagtatttcggcggaggaattgctgtccagagtttatatggctggggtacagatgtgtatttgcggcttaagggggtgggaaagatacagtga

SEQ ID NO: 8494 - protein, 472 aa, Muscodor strobelii
  misc_feature: SGI Peptide ID NO. 562617
  misc_feature (289)..(468): Pfam Id: PF02518 Pfam Desc: Histidine kinase-, DNA gyrase B-, and HSP90-like ATPase
  misc_feature (289)..(391): Pfam Id: PF02518 Pfam Desc: Histidine kinase-, DNA gyrase B-, and HSP90-like ATPase
  misc_feature (420)..(468): Pfam Id: PF02518 Pfam Desc: Histidine kinase-, DNA gyrase B-, and HSP90-like ATPase
  misc_feature (85)..(472): NCBI GI: 116196614 Blast Desc: CHGG_04905 [Chaetomium globosum CBS 148.51] gi|88180818|gb|EAQ88286.1| CHGG_04905 [Chaetomium globosum CBS 148.51]
  misc_feature (56)..(471): NCBI GI: 256720952 Blast Desc: NECHADRAFT_50108 [Nectria haematococca mpVI 77-13-4]
  misc_feature (51)..(472): NCBI GI: 85079324 Blast Desc: NCU04349 [Neurospora crassa OR74A] gi|28917389|gb|EAA27094.1| NCU04349 [Neurospora crassa OR74A]
  misc_feature (63)..(471): NCBI GI: 46110162 Blast Desc: FG01963.1 [Gibberella zeae PH-1]
  misc_feature (62)..(472): NCBI GI: 171688406 Blast Desc: protein product [Podospora anserina] gi|170944165|emb|CAP70275.1| protein product [Podospora anserina]
  misc_feature (69)..(469): NCBI GI: 261352234 Blast Desc: kinase [Verticillium albo-atrum VaMs.102]
  misc_feature (59)..(458): NCBI GI: 145603206 Blast Desc: MGG_06200 [Magnaporthe grisea 70-15] gi|145011484|gb|EDJ96140.1| MGG_06200 [Magnaporthe grisea 70-15]
  misc_feature (42)..(472): NCBI GI: 239615467 Blast Desc: mitochondrial pyruvate dehydrogenase kinase [Ajellomyces dermatitidis ER-3]
  misc_feature (42)..(472): NCBI GI: 261199392 Blast Desc: mitochondrial pyruvate dehydrogenase kinase [Ajellomyces dermatitidis SLH14081] gi|239594305|gb|EEQ76886.1| mitochondrial pyruvate dehydrogenase kinase [Ajellomyces
  misc_feature (57)..(471): NCBI GI: 255933079 Blast Desc: Pc12g11940 [Penicillium chrysogenum Wisconsin 54-1255] gi|211582629|emb|CAP80821.1| Pc12g11940 [Penicillium chrysogenum Wisconsin 54-1255]
  misc_feature (95)..(468): SWISSPROT Homolog: EC 2.7.11.4 [3-methyl-2-oxobutanoate dehydrogenase (acetyl-transferring)] kinase
MRRLHRPLRCLRTPNASFYHVNRLQSLQFAKCIATTPSLSLSHAASATHGHSPQPIHRATVTDDAIADLANKGQHSLSLADLVEHGRPPLAEESLFASANFTLSLLPIRLAHRIQALRNLPFIVVSNPNISRIYNNYLHSLSTLLPWKHRTISNLEDEIQFTSVLAELVATHQDTIPILAKGFLECRRYISPTEVTRFLDTHLRTRIGTRLIAEQHIALHYSSVPHFDPGASPTPCPEHPSYIGVIDTALSPAAIVDSCAGFVADICELKYGVRPQWVIDGEPDTTFAFVPMHLEYIVTELLKNAFRATVENTNIQGNREPVVITIAPEPPDAGPPRVKLDPPAAAMGAFREEAIQPLDDNAPGVTVRIRDRGGGIAPDVLPNIWSYSFTTFSDDDMDDMMMSHGGAGGGQKDALGVISAASSGGSSIAGLGYGLPLSRAYAEYFGGGIAVQSLYGWGTDVYLRLKGVGKIQ

SEQ ID NO: 8495 - DNA, 1673 bp, Muscodor strobelii
  misc_feature: SGI EST ID NO. CUFF.20571.0
  misc_feature: Variant of the nucleotide sequence at SEQ ID NO 8493
gccagagactaccacatcatgccgccatgagaagattacacaggccattgaggtgtttgcgcacgcccaatgcctcgttttaccatgtgaatcgcctacagtctcttcaatttgcaaaatgtattgctaccacaccgtccttgtctctgtcacatgctgccagtgccacacacggccactcgccccaacccatccaccgtgcgacagtcactgacgatgccattgccgacctcgccaacaagggccagcactcgctaagcctggccgatctggtcgaacacggccgtccacctcttgctgaggagtccttgttcgcttcggccaacttcactctcagtctccttcccatccgcctagctcaccgtatccaagccttgcgaaatcttcctttcattgtcgtttcgaacccgaacatttctcgaatttacaataactacctacattcgctctcgacacttctgccgtggaagcacaggaccatctcgaaccttgaagatgagattcagttcacttcggtcctcgccgaactcgtagcaacccaccaagataccattcctattctcgcaaagggcttcctcgagtgccggcgctacatctcacctactgaagtcactagatttcttgacacgcacttgcgtacacgcatcggcactcgtctgattgcagagcagcatattgctctgcactacagtagcgtaccgcattttgaccccggcgcctcgccgacgccatgcccagaacaccccagctacatcggcgtcatcgacaccgcattgtcccctgccgccattgttgactcgtgtgccggcttcgtagctgatatctgcgagctcaagtacggcgtccgcccacaatgggtcattgatggcgagccagatactaccttcgcgttcgtaccgatgcatctcgagtatattgtcactgaacttcttaaaaatgccttccgtgcgactgtagaaaacaccaacatacaagggaatagagaacctgttgtgataaccatagcccctgagcctcccgatgctggtccgccacgcgtaaagctggatccgcctgctgcagctatgggtgcatttcgtgaagaagcgattcaaccgcttgacgacaatgcaccgggggtcacggtgaggattagggatcgtgggggtggcatcgcgcctgatgtattgcccaacatttggagttatagcttcactacttttagtgatgatgatatggacgatatgatgatgtctcacggtggcgccggaggcggtcagaaggacgctctcggggtcatatcggcggctagtagcggtggcagctcgatagctggtcttggttacggattgccgctcagtcgcgcgtatgccgagtatttcggcggaggaattgctgtccagagtttatatggctggggtacagatgtgtatttgcggcttaagggggtgggaaagatacagtgatttgttgtgaaatacaagtgacgtgatgagagtcaacgtttgggcattctccaatgtttgtgcaatgctgattatagtttagttgatagaggcaaatcacgcatctgtaggagcgcattacatgtctgtcatcttggctatttggcgcctcatctgaggcaaagccctgttggctgaggtgccacaaactggcacagagatatggaatacatgaacatacgaaatctg

SEQ ID NO: 8496 - DNA, 216 bp, Muscodor strobelii
  misc_feature: SGI cDNA ID NO. 562618
  misc_feature: Elevated expression when VOC is produced
  misc_feature: Encodes the peptide sequence at SEQ ID NO 8497
atgcctacctacattgttacttgcaaagatggcgccaccgacgagcaggtcgctgctgcgaagaagcacgcagaggaccaaggcggcaagatcacccacgagtatagcctgacaaagggctttgctgtctcattccctgcggactcgatatccactcttgaatcgcatgaacatgtcaaggctgtcgagcaagaccaagaagtgaagacgcaatag

SEQ ID NO: 8497 - protein, 71 aa, Muscodor strobelii
  misc_feature: SGI Peptide ID NO. 562618
  misc_feature (2)..(71): Pfam Id: PF05922 Pfam Desc: Subtilisin N-terminal Region
  misc_feature (1)..(71): NCBI GI: 46110156 Blast Desc: FG01960.1 [Gibberella zeae PH-1]
  misc_feature (1)..(70): NCBI GI: 145603204 Blast Desc: [Magnaporthe grisea 70-15] gi|145011483|gb|EDJ96139.1| [Magnaporthe grisea 70-15]
  misc_feature (1)..(71): NCBI GI: 256720953 Blast Desc: [Nectria haematococca mpVI 77-13-4]
  misc_feature (1)..(71): NCBI GI: 171688408 Blast Desc: protein product [Podospora anserina] gi|170944166|emb|CAP70276.1| protein product [Podospora anserina]
  misc_feature (1)..(71): NCBI GI: 261352235 Blast Desc: [Verticillium albo-atrum VaMs.102]
  misc_feature (1)..(67): NCBI GI: 116196614 Blast Desc: CHGG_04905 [Chaetomium globosum CBS 148.51] gi|88180818|gb|EAQ88286.1| CHGG_04905 [Chaetomium globosum CBS 148.51]
  misc_feature (1)..(67): NCBI GI: 85079324 Blast Desc: NCU04349 [Neurospora crassa OR74A] gi|28917389|gb|EAA27094.1| NCU04349 [Neurospora crassa OR74A]
  misc_feature (1)..(71): NCBI GI: 155970651 Blast Desc: [Dactylellina haptotyla]
  misc_feature (1)..(71): NCBI GI: 189198263 Blast Desc: conserved [Pyrenophora tritici-repentis Pt-1C-BFP] gi|187981417|gb|EDU48043.1| conserved [Pyrenophora tritici-repentis Pt-1C-BFP]
  misc_feature (1)..(71): NCBI GI: 115384316 Blast Desc: conserved [Aspergillus terreus NIH2624] gi|114196397|gb|EAU38097.1| conserved [Aspergillus terreus NIH2624]
  misc_feature: Useful for introducing or modulating the production of volatile compounds
MPTYIVTCKDGATDEQVAAAKKHAEDQGGKITHEYSLTKGFAVSFPADSISTLESHEHVKAVEQDQEVKTQ

SEQ ID NO: 8498 - DNA, 883 bp, Muscodor strobelii
  misc_feature: SGI EST ID NO. CUFF.20574.0
  misc_feature: Variant of the nucleotide sequence at SEQ ID NO 8496
gtagactttcattaggtgggctgacccgaatgacgtataccacaccactctcggtttcccatggaggggtacacactatagtcagagatcgctgagctgaggaaagcctccgttaagcgttgtactgcgccttgctttttcgttgctgaagataaaacagcgaacccctctcgtcaagcactacactctcctcctttcctttactattaacatcatcaccttgcaccatttgaccgcctatcaccatattccagagaaactatcatccgtctgccaactcgacgtcttcacagcatagcctcaacgaagatgcctacctacattgttacttgcaaagatggcgccaccgacgagcaggtcgctgctgcgaagaagcacgcagaggaccaaggcggcaagatcacccacgagtatagcctgacaaagggctttgctgtctcattccctgcggactcgatatccactcttgaatcgcatgaacatgtcaaggctgtcgagcaagaccaagaagtgaagacgcaatagatggcgtgtcttgtacaccacactatagatcctctggatgtgggtgacggagtatagtagatgtcgggcggacatgtcctacctatgacccatgaggggcagattgcggggatgatgcgataccatcgatccactattagcctgtccatttcttgtacgatgggagtttcgcgttctagatcgatgaatatacctaattcatgagaaacgccaacaacaggaacaacgtttgtgtacatgtcagtcgtcatccgagatcatttgggcccagtcatatgcaaaggtgatcttctgtatgctgtttgacccaataaacgatcatggccctgttgtgggaaacccgtacaaaggcgtggcc

SEQ ID NO: 8499 - DNA, 1191 bp, Muscodor strobelii
  misc_feature: SGI cDNA ID NO. 562619
  misc_feature: Encodes the peptide sequence at SEQ ID NO 8500
atgatccagaaagcctttatcctctcagcgttggcacaacatgccctcggaggtgctgctcagatccggcgccgcgaagtcgtgacgctgacgaaggcgcccacgattactgaggtagtcccagccttcaaggagatcgagacgacgatcacccgcgctggcgagtacacggtcggcgttggaggcgattgcggcctgctcgcgctcggctgcattgtgtccgtcgtcgatgcggtcgtgtcagaggtccttacccttacgggaatcatcgagaagacaaccacatacccctgttctactcccactacttggacgtcacactcgaccacgtaccagtggtcgccgcccccgacctccgggtatccgacctatccggccacttccacgtgttcaacagctacggtcactgcaactgaaactagcacgactactacaactgtgacagcaacacccagctgcgttcccacgccagccctgacatgcgacaagtacggatatctcgtccaggcaagcgccttgtaccaggttgacctagcgacaggcaactatacaaccgtaacggaggacatcagcgatggcgacggcaggacgtacaacgctgtcgggtacaacatcctggacaactacctgtacgctgtggagtacacgtccggtggcagtcagaatctggcgcggatcgacgcggacggcggcgttgagacgcttaccacgggtatcacagctggtgtggtgggcgacatcgacggcagtgggacgtactggaacagcgacgggcgttcgacctggagctcgtttgacgtcaacccgacgtcaccgacgtacctccgcgccacgggcactggctcgttcggcaccgatgtcgccggctaccaattccgcgactgggtctatctgccctccgaaggcaactatctttggaccgtcggctccaacagtagtcacatcagcctgctgcgctacgccttcggcagcaacagatgggctcagatcacctcatacacgcgccccgagcgcgcctccaccttcggcgcgctgtacggtctcgacaacggcactatctacggtagccgcaaccaagatggcgagatctggggattccctatcgacggttctaccccttacattgcttccgacggcccgacttcgagctcgaatgatggtgcgcggtgcgcctacaacttggctatctaa

SEQ ID NO: 8500 - protein, 396 aa, Muscodor strobelii
  misc_feature: SGI Peptide ID NO. 562619
  misc_feature (151)..(395): NCBI GI: 2352910 Blast Desc: proline rich protein 5MeD [Metarhizium anisopliae]
  misc_feature (125)..(391): NCBI GI: 167623208 Blast Desc: Shal_1274 [Shewanella halifaxensis HAW-EB4] gi|167353230|gb|ABZ75843.1| conserved cytosolic protein [Shewanella halifaxensis HAW-EB4]
  misc_feature (157)..(394): NCBI GI: 46117462 Blast Desc: FG04573.1 [Gibberella zeae PH-1]
  misc_feature (152)..(391): NCBI GI: 157961065 Blast Desc: Spea_1237 [Shewanella pealeana ATCC 700345] gi|157846065|gb|ABV86564.1| conserved cytosolic protein [Shewanella pealeana ATCC 700345]
  misc_feature (159)..(390): NCBI GI: 86130603 Blast Desc: MED134_06769 [Dokdonia donghaensis MED134] gi|85819278|gb|EAQ40437.1| MED134_06769 [Dokdonia donghaensis MED134]
  misc_feature (151)..(390): NCBI GI: 2352910 Blast Desc: proline rich protein 5MeD [Metarhizium anisopliae]
  misc_feature (157)..(391): NCBI GI: 153836666 Blast Desc: conserved [Vibrio parahaemolyticus AQ3810] gi|260903091|ref|ZP_05911486.1| VparAQ_20458 [Vibrio parahaemolyticus AQ4037] gi|149750015|gb|EDM60760.1| conserved
  misc_feature (130)..(391): NCBI GI: 157374507 Blast Desc: Ssed_1368 [Shewanella sediminis HAW-EB3] gi|157316881|gb|ABV35979.1| conserved cytosolic protein [Shewanella sediminis HAW-EB3]
  misc_feature (157)..(391): NCBI GI: 28901027 Blast Desc: VPA1172 [Vibrio parahaemolyticus RIMD 2210633] gi|260366237|ref|ZP_05778697.1| VparK_22210 [Vibrio parahaemolyticus K5030] gi|260879878|ref|ZP_05892233.1| [Vibrio
  misc_feature (157)..(391): NCBI GI: 212634258 Blast Desc: Cytosolic protein, [Shewanella piezotolerans WP3] gi|212555742|gb|ACJ28196.1| Cytosolic protein, [Shewanella piezotolerans WP3]
MIQKAFILSALAQHALGGAAQIRRREVVTLTKAPTITEVVPAFKEIETTITRAGEYTVGVGGDCGLLALGCIVSVVDAVVSEVLTLTGIIEKTTTYPCSTPTTWTSHSTTYQWSPPPTSGYPTYPATSTCSTATVTATETSTTTTTVTATPSCVPTPALTCDKYGYLVQASALYQVDLATGNYTTVTEDISDGDGRTYNAVGYNILDNYLYAVEYTSGGSQNLARIDADGGVETLTTGITAGVVGDIDGSGTYWNSDGRSTWSSFDVNPTSPTYLRATGTGSFGTDVAGYQFRDWVYLPSEGNYLWTVGSNSSHISLLRYAFGSNRWAQITSYTRPERASTFGALYGLDNGTIYGSRNQDGEIWGFPIDGSTPYIASDGPTSSSNDGARCAYNLAI

SEQ ID NO: 8501 - DNA, 3000 bp, Muscodor strobelii
  misc_feature: SGI EST ID NO. CUFF.20598.0
  misc_feature: Variant of the nucleotide sequence at SEQ ID NO 8499
ctacctcattacgactatagaagatccctagaatggctgtctttgctgcaacctccaatagctgctattcgaaatttccccaagaagaggtacatagtctgttgggcattcgagcaaacaagttctcaaaagtctaccagtgattttctgcacaccgctgcattcgtcgccaagccggctccccatgttaaaacggcgagcagtccctagagtccagaattcctaatgcgcaaggggagaacccgattagggttgcgagctgtcattcagctcggcatttagatttgatcaacaggacaattgccacattgggcttcaatatcatctgcaacgcacgagatagttgtcaacgaagaaccctcagccctacaaagtgcaccgttctactctagcttgagttgtcaaaagtcataatattgattcgtgcatacttgatgatagctagttcagtcttgtcacttaagggatcaacattgcaagtactccatatggatcattgcaggggaattcagctatgacagtgaccgaagcgcatgccatcgcacttcgacgtcgaggagcagcagatttgaagtcttgctagcaatgaggaaaggaaacaagagcatgtcgacatcgagtgttgctcgcgaagaggctgggtttccaagcataaaagggacgtctatctgcagctccggcccaagatgttctgaaccacaaaccggagcactcctgtctctttggctctctcggcactcgctttctttgttgaatataacattgacattatcttcgaggactcattttcatcatgatccagaaagcctttatcctctcagcgttggcacaacatgccctcggaggtgctgctcagatccggcgccgcgaagtcgtgacgctgacgaaggcgcccacgattactgaggtagtcccagccttcaaggagatcgagacgacgatcacccgcgctggcgagtacacggtcggcgttggaggcgattgcggcctgctcgcgctcggctgcattgtgtccgtcgtcgatgcggtcgtgtcagaggtccttacccttacgggaatcatcgagaagacaaccacatacccctgttctactcccactacttggacgtcacactcgaccacgtaccagtggtcgccgcccccgacctccgggtatccgacctatccggccacttccacgtgttcaacagctacggtcactgcaactgaaactagcacgactactacaactgtgacagcaacacccagctgcgttcccacgccagccctgacatgcgacaagtacggatatctcgtccaggcaagcgccttgtaccaggttgacctagcgacaggcaactatacaaccgtaacggaggacatcagcgatggcgacggcaggacgtacaacgctgtcgggtacaacatcctggacaactacctgtacgctgtggagtacacgtccggtggcagtcagaatctggcgcggatcgacgcggacggcggcgttgagacgcttaccacgggtatcacagctggtgtggtgggcgacatcgacggcagtgggacgtactggaacagcgacgggcgttcgacctggagctcgtttgacgtcaacccgacgtcaccgacgtacctccgcgccacgggcactggctcgttcggcaccgatgtcgccggctaccaattccgcgactgggtctatctgccctccgaaggcaactatctttggaccgtcggctccaacagtagtcacatcagcctgctgcgctacgccttcggcagcaacagatgggctcagatcacctcatacacgcgccccgagcgcgcctccaccttcggcgcgctgtacggtctcgacaacggcactatctacggtagccgcaaccaagatggcgagatctggggattccctatcgacggttctaccccttacattgcttccgacggcccgacttcgagctcgaatgatggtgcgcggtgcgcctacaacttggctatctaagcttcactcatgtttcttctgaataggttttgatatggcgccggtatagtggaaacttcggatcgagagtaatactaatgatcgagtcggaaaggtcctcaattggaatgcagatacataataccattagccagagatcggttgttgcgtgggaacttaattaacgaagaaataattagtgtaatgtatcagaggcaaaatagtcgttggaaaataaggaataataataggtcaagtagtcaactgatgagatcgacatactttcagctgagagtccgacgactattgatgcacgttgcgcctcagtatgcggtgtacgcagttctcgtatgatgcgtacacgtcaacgtgagtgctggataataaagtagaatccatcatagcatttgataccatgctaggcatttgacgggcgagtagcatcgtcgttcaggttctagtgggaattgaatggtgggggagccactgttgctcataacgtgctgtctccagtacctcatcattatgatcgacgaatgcagccatgaacatcggagtagaagaagtgtccatgtagtccgccattagtgcgaatcgatcacaatataaaactctgcatggccggtgatgtgcagacctgacaaggcagcacacgcgtggccccatcacggtctgtgatcgaggtgccagcgctctagatgagagcacttccgcaattcgcaggatgtgtagtagggcaacaatatgtttctcctggaacatatcgcttcttgatcatacacttgccgacgctgacggcagcgcctgcgggcggaactgagggggtggcgaccctcgaagtggtgacagcttcatcttcttcatggcgctacatgcagtagcgtacataatgaaaacgagtggtaaatatcaaaaattgcccccagtacgatcccgaaggataatacagagcagttgactccgcgatgtgcaatgcaggtctcctacactcctaagcgtgatggttgagccacacttaggtgaagaaggtaagtatg

SEQ ID NO: 8502 - DNA, 1527 bp, Muscodor strobelii
  misc_feature: SGI cDNA ID NO. 562620
  misc_feature: Encodes the peptide sequence at SEQ ID NO 8503
atgtacgctctcgtatccgttgccgcgctgctcatctcagcggcccgcgcggcgctgtacgatcagatcatcaagacgccgaatggtcctgtccagggttatgctgccttcaatgcgagcccggccaacatgaatctaacccactgggcggacgttactgtctggaagggcatccgttttgccgcggacaccaagggcgccaaccgtttccgcccgccccagccagtgacgccatggaacactacattcgacgccagtgaatacggcttgtcctgcctgtcgtccggcaccaactatgccaccatcggcgaggactgcctcaacgtcaatgtctggagcgctgccaactcgacctcggataggctgcccgtcgtcatgtggagctaccctgccggcggctccaacgccgacccgcgcttcgacggcggcggcatggctgattctggtatcgtctttgtgaactacaactatcgcaccggtcccaccggctggatcgtgctccctgagctgacagaggagaaccaggcgaccatcggcgtcaacagctccggcaactacggcatgctagaccagttcgccgccctgcagtggacgcgcgacaacatcgcctcgtttggcggcgacccagaccgcatcaccgtcatgggccagtcggccggctctgctgccacctaccacatcctcaacagcaagttgacggccggcaacttcgtcggcgccatcatccagtctggtgtccgtgacccccacgatcccctggcaacgagcctggccgagggctaccagacctacggtgtcgccctcgcgctcggcgaagagtttctcgcctccgtcaactgcactgatgtcgcctgtcttcgcgctctcgacgctgaggccctcgatgtcaacgccatgcccggcagctccgcccctttcgtggaaagcgacgttggactactactgcatgcccgacacctacctcaacacgctcaaagcggcgctagcttcaatcagaccactaccctcgcccagtacctggccgacctcaactcgacctacgcgggcgacttctacgacaaattcctggccgtctatcctgccaacgacacggcgacggcctcagtttccgagaacgctcagtatatcaaccgtaatcgcgtcggcacccagttctgggccgacctctggctcagcaaccgcacgagccccatctacacctatctctgggaccacgcccctccgggacagaacggtggcgctggccacatgaccgagatccagtacacgcagaacaatctgtacaatgagtactacggtgcttgggaggctgaagactaccagatcgccaccaagatgaatggctactgggccaacttcatcaaatctggcaaccccaatggtgacggcctcgcccagtgggatgaggccacactcaacggtaccatgactatggagctgggcgacggcttcacatcgatgcccatcgccaccaccaagcaaatcgaactctttgcagagtggttctccagcttgcccgctatctaa

SEQ ID NO: 8503 - protein, 508 aa, Muscodor strobelii
  misc_feature: SGI Peptide ID NO. 562620
  misc_feature (3)..(498): Pfam Id: PF00135 Pfam Desc: Carboxylesterase
  misc_feature (3)..(294): Pfam Id: PF00135 Pfam Desc: Carboxylesterase
  misc_feature (381)..(498): Pfam Id: PF00135 Pfam Desc: Carboxylesterase
  misc_feature (6)..(508): NCBI GI: 256721237 Blast Desc: NECHADRAFT_34817 [Nectria haematococca mpVI 77-13-4]
  misc_feature (3)..(505): NCBI GI: 145256240 Blast Desc: An10g00780 [Aspergillus niger CBS 513.88] gi|134078641|emb|CAK40514.1| protein product [Aspergillus niger]
  misc_feature (3)..(508): NCBI GI: 154319071 Blast Desc: BC1G_02487 [Botryotinia fuckeliana B05.10] gi|150856918|gb|EDN32110.1| BC1G_02487 [Botryotinia fuckeliana B05.10]
  misc_feature (11)..(507): NCBI GI: 145248527 Blast Desc: An13g03800 [Aspergillus niger] gi|134081267|emb|CAK41773.1| protein product [Aspergillus niger]
  misc_feature (19)..(503): NCBI GI: 154316937 Blast Desc: BC1G_03886 [Botryotinia fuckeliana B05.10] gi|150845498|gb|EDN20691.1| BC1G_03886 [Botryotinia fuckeliana B05.10]
  misc_feature (19)..(503): NCBI GI: 156043743 Blast Desc: SS1G_10875 [Sclerotinia sclerotiorum 1980] gi|154695262|gb|EDN95000.1| SS1G_10875 [Sclerotinia sclerotiorum 1980]
  misc_feature (11)..(502): NCBI GI: 145236429 Blast Desc: An06g00340 [Aspergillus niger] gi|134075316|emb|CAK44950.1| protein product [Aspergillus niger]
  misc_feature (3)..(502): NCBI GI: 119492051 Blast Desc: carboxylesterase [Neosartorya fischeri NRRL 181] gi|119411680|gb|EAW21623.1| carboxylesterase [Neosartorya fischeri NRRL 181]
  misc_feature (5)..(502): NCBI GI: 70999960 Blast Desc: carboxylesterase [Aspergillus fumigatus Af293] gi|66852334|gb|EAL92659.1| carboxylesterase, [Aspergillus fumigatus Af293] gi|159127705|gb|EDP52820.1| carboxylesterase,
  misc_feature (4)..(502): NCBI GI: 145246752 Blast Desc: An12g05590 [Aspergillus niger] gi|134080346|emb|CAK46268.1| protein product [Aspergillus niger]
  misc_feature (50)..(467): SWISSPROT Homolog: EC 3.1.1.1 Carboxylesterase
MYALVSVAALLISAARAALYDQIIKTPNGPVQGYAAFNASPANMNLTHWADVTVWKGIRFAADTKGANRFRPPQPVTPWNTTFDASEYGLSCLSSGTNYATIGEDCLNVNVWSAANSTSDRLPVVMWSYPAGGSNADPRFDGGGMADSGIVFVNYNYRTGPTGWIVLPELTEENQATIGVNSSGNYGMLDQFAALQWTRDNIASFGGDPDRITVMGQSAGSAATYHILNSKLTAGNFVGAIIQSGVRDPHDPLATSLAEGYQTYGVALALGEEFLASVNCTDVACLRALDAEALDVNAMPGSSAPFVESDVGLLLHARHLPQHAQSGASFNQTTTLAQYLADLNSTYAGDFYDKFLAVYPANDTATASVSENAQYINRNRVGTQFWADLWLSNRTSPIYTYLWDHAPPGQNGGAGHMTEIQYTQNNLYNEYYGAWEAEDYQIATKMNGYWANFIKSGNPNGDGLAQWDEATLNGTMTMELGDGFTSMPIATTKQIELFAEWFSSLPAI

SEQ ID NO: 8504 - DNA, 2725 bp, Muscodor strobelii
  misc_feature: SGI EST ID NO. CUFF.20587.1
  misc_feature: Variant of the nucleotide sequence at SEQ ID NO 8502
aaacggccggcagacgcttcgcagtgctacgatgctaggcaagatcccaatggttagatgcatcatatagctgcggggcctaaccggggtacaccatgaacgagcaccggtacgggttggcttggcccacgagtgtcccactgccggcaatgcaccctccgcacttcatctgaaatgtaacggccgggaaatgaatagcccgggggacgcgtctgtcccgtcggccgagctcgacttgggccttcgagctcttgctgtactggctgttgaccctgctcttgcctgcttgactggtcgctgtgctctgcggggattctcgagcgcatctcgttatgtgaaacgacgcgcaactgttgagattgcaataaaggagtggctacgttagctggggctggtacacgtaataaacatgttcaacacctggaacctgcagaactcacagcccagcatcgaggcatatatgatgtttaccatctgctcgccgctgagagaggaggaaaggaaggagacagccacggtcacattggtctatttgcacactgcggcgaagagattgtgactagactctcgttctttctcttttcttcactctttttctggtcaagcggcggtttaccaccaccggcagcaatcatgtacgctctcgtatccgttgccgcgctgctcatctcagcggcccgcgcggcgctgtacgatcagatcatcaagacgccgaatggtcctgtccagggttatgctgccttcaatgcgagcccggccaacatgaatctaacccactgggcggacgttactgtctggaagggcatccgttttgccgcggacaccaagggcgccaaccgtttccgcccgccccagccagtgacgccatggaacactacattcgacgccagtgaatacggcttgtcctgcctgtcgtccggcaccaactatgccaccatcggcgaggactgcctcaacgtcaatgtctggagcgctgccaactcgacctcggataggctgcccgtcgtcatgtggagctaccctgccggcggctccaacgccgacccgcgcttcgacggcggcggcatggctgattctggtatcgtctttgtgaactacaactatcgcaccggtcccaccggctggatcgtgctccctgagctgacagaggagaaccaggcgaccatcggcgtcaacagctccggcaactacggcatgctagaccagttcgccgccctgcagtggacgcgcgacaacatcgcctcgtttggcggcgacccagaccgcatcaccgtcatgggccagtcggccggctctgctgccacctaccacatcctcaacagcaagttgacggccggcaacttcgtcggcgccatcatccagtctggtgtccgtgacccccacgatcccctggcaacgagcctggccgagggctaccagacctacggtgtcgccctcgcgctcggcgaagagtttctcgcctccgtcaactgcactgatgtcgcctgtcttcgcgctctcgacgctgaggccctcgatgtcaacgccatgcccggcagctccgcccctttcgtggaaagcgacgttggactactactgcatgcccgacacctacctcaacacgctcaagtacggcctcgccaacgacggttcccgtcatgactggcaacacccgtgacgagagcggcgctagcttcaatcagaccactaccctcgcccagtacctggccgacctcaactcgacctacgcgggcgacttctacgacaaattcctggccgtctatcctgccaacgacacggcgacggcctcagtttccgagaacgctcagtatatcaaccgtaatcgcgtcggcacccagttctgggccgacctctggctcagcaaccgcacgagccccatctacacctatctctgggaccacgcccctccgggacagaacggtggcgctggccacatgaccgagatccagtacacgcagaacaatctgtacaatgagtactacggtgcttgggaggctgaagactaccagatcgccaccaagatgaatggctactgggccaacttcatcaaatctggcaaccccaatggtgacggcctcgcccagtgggatgaggccacactcaacggtaccatgactatggagctgggcgacggcttcacatcgatgcccatcgccaccaccaagcaaatcgaactctttgcagagtggttctccagcttgcccgctatctaaataagcggatcggagttgtcaaaggcatcttcaaacgtaatctttagtagacatcttcagaggacgtatagaaaccatgtatatcctagcacaattgatcattggaaaaacatcaactcctttcgttgtcctcgaccgctgggcgataaaaatcaaaaaaatgtacggcatgcaagagtcccgtgtcaagttgaacaaatgatatactggctgtgacgcttccaatcatgtgacttgcttcggtcatgtagtagcgggctgacaggtagctaatttatgtcgatgtttccggtctatgagttgaatgtgagactgcaatcgggaggtatgacatacgtacactgtacctcagtagcatcggagggtactacaggtagtatttgagacgagaatctgaatcgaagcactgtgacattaggaaaatggcagcttcagttccaattttttgattggctcattcatcgcgtttgaccataggcaacagctgtgggtcaacaggttgactgattgtg

SEQ ID NO: 8505 - DNA, 229 bp, Muscodor strobelii
  misc_feature: SGI cDNA ID NO. 562621
  misc_feature: Encodes the peptide sequence at SEQ ID NO 8506
atgcatttctccaagaccaccatcgtcgtcgctctgctcgccattggcggcatggctctccctaccatgaacgcgcgcgacgctgagctctggactgagggcggaaaatccgacaagcgcggcgctgaagtctggacagaaggaggcaaagcagacaagcgagatgctgaactctggacagaaggtggcaagtctgacaagcgcgatgccgagctatggaccgagggtg

SEQ ID NO: 8506 - protein, 76 aa, Muscodor strobelii
  misc_feature: SGI Peptide ID NO. 562621
MHFSKTTIVVALLAIGGMALPTMNARDAELWTEGGKSDKRGAEVWTEGGKADKRDAELWTEGGKSDKRDAELWTEG

SEQ ID NO: 8507 - DNA, 989 bp, Muscodor strobelii
  misc_feature: SGI EST ID NO. CUFF.20590.0
  misc_feature: Variant of the nucleotide sequence at SEQ ID NO 8505
attcatcagcacatccgccaacttagacccttgctgcattgcatcttgccatcatatcgatgtttcatcacatgtatctggtacttgccggtatgaattagcatgttatcccacaaaacctcgatcggaaatgttccgcgacaagttgcgcgatctacaacttcaagatcatcatcactaaattggcgaagtactgcatttcggagcgtttttggaaggtaaaaccatcttcgcaatccgaaacccatcatgcgatatgttgttgcggtggcgaatccagagaacaacgacacgacgacacactctaacgatcacgccgtctgacgcgacgacgacgaattactatgcttgcgcgagaagtgcgggagtgtggggaaacaccatgatgacgagaactaggactcggatattggaagacaggcatggaggatcgtctccttgacgaaagagacacccggcagtctcgcgaggtgatgagaaaaccgaatccgcatgtgttgcggggctgaagatcaggagagagagaagactcggggaatgggtgcgggatatcgatgaagcatacaacagcaccaactatcacttgggatatataagaggcccggagaaccgttgaagagagggagaaagacatcacaaccacgcagcaagatcaccatcgcactccaaagctcttcgactatagaaacccgctgtcttccacaacaccaacgctgtctacaatttccatcaaaccttctgtcaaaatgcatttctccaagaccaccatcgtcgtcgctctgctcgccattggcggcatggctctccctaccatgaacgcgcgcgacgctgagctctggactgagggcggaaaatccgacaagcgcggcgctgaagtctggacagaaggaggcaaagcagacaagcgagatgctgaactctggacagaaggtggcaagtctgacaagcgcgatgccgagctatggaccgagggtggtaaatctgacaag

SEQ ID NO: 8508 - DNA, 975 bp, Muscodor strobelii
  misc_feature: SGI cDNA ID NO. 562622
  misc_feature: Encodes the peptide sequence at SEQ ID NO 8509
atggcttcttattctgagttgaagaggatcgaggagcaagatagcgagcgcagtagtctcacagtggcgggcgagtctgaagatggcctctatctagctggcaccgcgaaatggggccagatctccgaacgacaaacctggatcacatggtaccagcagtattggctcagtatcgtgactcacttagcactcttaacagtcaatctcattatcgtgagcttattcgcggtcggcgctcagagaccttgccagatgcagccgatatttgagcagaatccctttaaagatacaatttcttacgaacaacaccggtttgagcttcaagccatctataccaccgatggcgaaatcaacgaactcaaacccagccacttgatgggtactcctcgtcccgagctcgaggatgcctgggacaagctgatgcaacattcggaggtccgcgtcagcaaagacgagctcggcggattcaagaacgacgacagcatcgtcgagttgacagacgggtctggatactacgtgacaatatcggcatttcacggcctgcattgcgtcaggagacttcacaagtacatttggtccgaagtgtactatgccaacgtctccgaacacgacgcattttacctccgacgacacacagaacactgcctcgattggatccgacaatatgtacaatgccacgctgatccgaccctaattcctatacactggactaacaacgatgatgtcccagtttcaaaagatacaggaaaccggatgtgcgtcaaatgggatgcctttgaaggatggatggctgagcactctttcgatccttttgagcccggtcttctggttcatcctctcttcggcgtgccggaaggggtcaagcacccggacgccaaggtggcattgggagtacatgatctgggaaatggcagtttgctccacgccgatcctaacaagcatgatctcaacttcaatgacgatcccgctgcttga

SEQ ID NO: 8509 - protein, 324 aa, Muscodor strobelii
  misc_feature: SGI Peptide ID NO. 562622
  misc_feature (87)..(310): NCBI GI: 85079216 Blast Desc: NCU03374 [Neurospora crassa OR74A] gi|28917367|gb|EAA27073.1| [Neurospora crassa OR74A]
  misc_feature (43)..(284): NCBI GI: 116198683 Blast Desc: CHGG_07497 [Chaetomium globosum CBS 148.51] gi|88178776|gb|EAQ86244.1| CHGG_07497 [Chaetomium globosum CBS 148.51]
  misc_feature (93)..(282): NCBI GI: 242778427 Blast Desc: conserved [Talaromyces stipitatus ATCC 10500] gi|218722855|gb|EED22273.1| conserved [Talaromyces stipitatus ATCC 10500]
  misc_feature (51)..(282): NCBI GI: 115401678 Blast Desc: [Aspergillus terreus NIH2624] gi|114190368|gb|EAU32068.1| [Aspergillus terreus NIH2624]
  misc_feature (48)..(283): NCBI GI: 145229825 Blast Desc: An01g07960 [Aspergillus niger] gi|134055334|emb|CAK43888.1| protein product [Aspergillus niger]
  misc_feature (58)..(300): NCBI GI: 261204982 Blast Desc: conserved [Ajellomyces dermatitidis SLH14081] gi|239592287|gb|EEQ74868.1| conserved [Ajellomyces dermatitidis SLH14081] gi|239611559|gb|EEQ88546.1| conserved [Ajellomyces
  misc_feature (62)..(286): NCBI GI: 225562435 Blast Desc: conserved [Ajellomyces capsulatus G186AR]
  misc_feature (58)..(282): NCBI GI: 225680940 Blast Desc: conserved [Paracoccidioides brasiliensis Pb03]
  misc_feature (10)..(286): NCBI GI: 154279258 Blast Desc: [Ajellomyces capsulatus NAm1] gi|150412385|gb|EDN07772.1| [Ajellomyces capsulatus NAm1]
  misc_feature (58)..(286): NCBI GI: 116204067 Blast Desc: CHGG_09917 [Chaetomium globosum CBS 148.51] gi|88176045|gb|EAQ83513.1| CHGG_09917 [Chaetomium globosum CBS 148.51]
MASYSELKRIEEQDSERSSLTVAGESEDGLYLAGTAKWGQISERQTWITWYQQYWLSIVTHLALLTVNLIIVSLFAVGAQRPCQMQPIFEQNPFKDTISYEQHRFELQAIYTTDGEINELKPSHLMGTPRPELEDAWDKLMQHSEVRVSKDELGGFKNDDSIVELTDGSGYYVTISAFHGLHCVRRLHKYIWSEVYYANVSEHDAFYLRRHTEHCLDWIRQYVQCHADPTLIPIHWTNNDDVPVSKDTGNRMCVKWDAFEGWMAEHSFDPFEPGLLVHPLFGVPEGVKHPDAKVALGVHDLGNGSLLHADPNKHDLNFNDDPAA

SEQ ID NO: 8510 - DNA, 756 bp, Muscodor strobelii
  misc_feature: SGI EST ID NO. CUFF.20595.0
  misc_feature: Variant of the nucleotide sequence at SEQ ID NO 8508
ctcgtcccgagctcgaggatgcctgggacaagctgatgcaacattcggaggtccgcgtcagcaaagacgagctcggcggattcaagaacgacgacagcatcgtcgagttgacagacgggtctggatactacgtgacaatatcggcatttcacggcctgcattgcgtcaggagacttcacaagtacatttggtccgaagtgtactatgccaacgtctccgaacacgacgcattttacctccgacgacacacagaacactgcctcgattggatccgacaatatgtacaatgccacgctgatccgaccctaattcctatacactggactaacaacgatgatgtcccagtttcaaaagatacaggaaaccggatgtgcgtcaaatgggatgcctttgaaggatggatggctgagcactctttcgatccttttgagcccggtcttctggttcatcctctcttcggcgtgccggaaggggtcaagcacccggacgccaaggtggcattgggagtacatgatctgggaaatggcagtttgctccacgccgatcctaacaagcatgatctcaacttcaatgacgatcccgctgcttgaactatggctcatagttatttgtaatttgatagatggaatccgatgtaaacatacttactttatttgtaaagcacattagagtcgtttagcgtgcagttaaagagtgttcatctaacgttgaactgtgtgctacatcacagcacaacaagcccgagcttgtcttcgt

SEQ ID NO: 8511 - DNA, 828 bp, Muscodor strobelii
  misc_feature: SGI cDNA ID NO. 562623
  misc_feature: Encodes the peptide sequence at SEQ ID NO 8512
atggcttcagacacatcccccttccttgccaacgtcgatgatggcagctccttttcagacgacagcgagtttccctcgaaagagcagattaacactttccgttcgccaccgactcgccccagatctctcttacgcgccgctgcgaggttgtctgtgattttgtttgcggcctggggcattcttgtaaccttccttgccatcgcccacgcgttcttcccgtcttgggtcccgctccgccagaacgatgtctaccgtcctgggactctacgcgcagggctgaatcgctgtctttgtggcaatacaaaggaagaagctctcgctctcgattgcgcctacgactcactcgcgactgcctggctacccaagcgatgtcgtgacgacgagctcaccgccaaattcgaccgtgctggcccgggcgggaaatggaactactaccacgatgagaacggcacgatgcccatctcctccaaggctgagatcgcggacttgggcttggcgggaggttctttctgggcgtcgcgcgactggcacatcgcccactgtgcctactactggcaaaagtacaagcgtattggcagaacaggcgttatcatggagcagcgcttcgatactctgcatcatgtcgagcactgtggtgcgctaatcatggcggagcggcctgattatttctacctcatcgaggtaccagtacgcatgaatgggagctttgacgagcattcagttgactccaagatcggtgggaaactaccgctccctataccgggccatgtttcccctgacggatcatcgcattctgagcatgaacatggccaccgctcggctcaatag

SEQ ID NO: 8512 - protein, 275 aa, Muscodor strobelii
  misc_feature: SGI Peptide ID NO. 562623
  misc_feature (25)..(235): NCBI GI: 189194886 Blast Desc: conserved [Pyrenophora tritici-repentis Pt-1C-BFP] gi|187979660|gb|EDU46286.1| conserved [Pyrenophora tritici-repentis Pt-1C-BFP]
  misc_feature (1)..(234): NCBI GI: 28881152 Blast Desc: [Neurospora crassa]
  misc_feature (43)..(233): NCBI GI: 85079219 Blast Desc: NCU03375 [Neurospora crassa OR74A] gi|28917368|gb|EAA27074.1| [Neurospora crassa OR74A]
  misc_feature (96)..(215): NCBI GI: 189208320 Blast Desc: conserved [Pyrenophora tritici-repentis Pt-1C-BFP] gi|187976586|gb|EDU43212.1| conserved [Pyrenophora tritici-repentis Pt-1C-BFP]
  misc_feature (94)..(237): NCBI GI: 189212210 Blast Desc: conserved [Pyrenophora tritici-repentis Pt-1C-BFP] gi|187980665|gb|EDU47291.1| conserved [Pyrenophora tritici-repentis Pt-1C-BFP]
  misc_feature (52)..(218): NCBI GI: 145230473 Blast Desc: An01g11330 [Aspergillus niger] gi|134055663|emb|CAK44037.1| protein product [Aspergillus niger]
  misc_feature (96)..(220): NCBI GI: 238492685 Blast Desc: conserved [Aspergillus flavus NRRL3357] gi|220696073|gb|EED52415.1| conserved [Aspergillus flavus NRRL3357]
  misc_feature (96)..(216): NCBI GI: 169772257 Blast Desc: [Aspergillus oryzae RIB40] gi|83768458|dbj|BAE58595.1| protein product [Aspergillus oryzae]
  misc_feature (3)..(168): NCBI GI: 145229825 Blast Desc: An01g07960 [Aspergillus niger] gi|134055334|emb|CAK43888.1| protein product [Aspergillus niger]
  misc_feature (45)..(220): NCBI GI: 145229823 Blast Desc: An01g07950 [Aspergillus niger] gi|134055333|emb|CAK43887.1| protein product [Aspergillus niger]
MASDTSPFLANVDDGSSFSDDSEFPSKEQINTFRSPPTRPRSLLRAAARLSVILFAAWGILVTFLAIAHAFFPSWVPLRQNDVYRPGTLRAGLNRCLCGNTKEEALALDCAYDSLATAWLPKRCRDDELTAKFDRAGPGGKWNYYHDENGTMPISSKAEIADLGLAGGSFWASRDWHIAHCAYYWQKYKRIGRTGVIMEQRFDTLHHVEHCGALIMAERPDYFYLIEVPVRMNGSFDEHSVDSKIGGKLPLPIPGHVSPDGSSHSEHEHGHRSAQ

SEQ ID NO: 8513 - DNA, 1062 bp, Muscodor strobelii
  misc_feature: SGI EST ID NO. CUFF.20626.0
  misc_feature: Variant of the nucleotide sequence at SEQ ID NO 8511
gttcgaactaatgcggtctatacctctggggccgtttctatgtatagtaaacccaagtcaatcgtataatctcatttcttgccttaccgtggccgcacacataggccgtgtcatgacacacaggcacattatggcttcagacacatcccccttccttgccaacgtcgatgatggcagctccttttcagacgacagcgagtttccctcgaaagagcagattaacactttccgttcgccaccgactcgccccagatctctcttacgcgccgctgcgaggttgtctgtgattttgtttgcggcctggggcattcttgtaaccttccttgccatcgcccacgcgttcttcccgtcttgggtcccgctccgccagaacgatgtctaccgtcctgggactctacgcgcagggctgaatcgctgtctttgtggcaatacaaaggaagaagctctcgctctcgattgcgcctacgactcactcgcgactgcctggctacccaagcgatgtcgtgacgacgagctcaccgccaaattcgaccgtgctggcccgggcgggaaatggaactactaccacgatgagaacggcacgatgcccatctcctccaaggctgagatcgcggacttgggcttggcgggaggttctttctgggcgtcgcgcgactggcacatcgcccactgtgcctactactggcaaaagtacaagcgtattggcagaacaggcgttatcatggagcagcgcttcgatactctgcatcatgtcgagcactgtggtgcgctaatcatggcggagcggcctgattatttctacctcatcgaggtaccagtacgcatgaatgggagctttgacgagcattcagttgactccaagatcggtgggaaactaccgctccctataccgggccatgtttcccctgacggatcatcgcattctgagcatgaacatggccaccgctcggctcaatagtcttgctgatgctccaagttatttttaacttggttagctttcgtgtacatataattctcactgctagatagccttttcaacgcaagcttcactgtttactgcct

SEQ ID NO: 8514 - DNA, 765 bp, Muscodor strobelii
  misc_feature: SGI cDNA ID NO. 562624
  misc_feature: Elevated expression when VOC is produced
  misc_feature: Encodes the peptide sequence at SEQ ID NO 8515
atgccatcgatcctctcttggaacagtgttcgcccttcatggccttggccactcaccctagacaataccgtctactcttctctccctactaaagaggacaagagcggtctcgactctgatgaacaagatgatcatcatctcaccctcaaagaaagacggcgacggtcgaagcgagaccagcgcctctcgatctgcctcagaatatggcaactgctgactctgttcctcttcatcgccctctgcggcatcacgacaatccataaacgccttctagatgatgtcaaaccacctcctcacattcgctgcggcgactcactcgccgaggccgaggccaatggatgcatcttcgaccagctcaataaagcctggatgcctcccgactgccctcgttatgggctacaagagtaccttgacgccggttacgcctccagtaacgcttcagagacgggctcggtgcagttccctttttggcgagacctggaacagacgcggccgctctcaatcgaggagctcaccagcatagccaacaacgacgtcgagcatgctgagaagtactatactaccgggcgcgagcacatgacgcactgcgcatggatgctcgtccgcatggcgtacgtctacacgcagggcgagcggcatgacatgttgacgtccgacttcccgcacgccaagcattgcacattgttcctgctagaccgcgccttggagggtcccgacgtcgacgccgtcaggactgttggcaatgttgtctttggtggatgttaa

SEQ ID NO: 8515 - protein, 254 aa, Muscodor strobelii
  misc_feature: SGI Peptide ID NO. 562624
  misc_feature (102)..(254): NCBI GI: 259489795 Blast Desc: TPA: conserved [Aspergillus nidulans FGSC A4]
  misc_feature (96)..(254): NCBI GI: 169785501 Blast Desc: [Aspergillus oryzae RIB40] gi|83775959|dbj|BAE66078.1| protein product [Aspergillus oryzae]
  misc_feature (17)..(233): NCBI GI: 238492685 Blast Desc: conserved [Aspergillus flavus NRRL3357] gi|220696073|gb|EED52415.1| conserved [Aspergillus flavus NRRL3357]
  misc_feature (63)..(233): NCBI GI: 145250026 Blast Desc: An14g07300 [Aspergillus niger] gi|134082037|emb|CAK46722.1| protein product [Aspergillus niger]
  misc_feature (96)..(254): NCBI GI: 238506513 Blast Desc: conserved [Aspergillus flavus NRRL3357] gi|220689171|gb|EED45522.1| conserved [Aspergillus flavus NRRL3357]
  misc_feature (60)..(233): NCBI GI: 169772257 Blast Desc: [Aspergillus oryzae RIB40] gi|83768458|dbj|BAE58595.1| protein product [Aspergillus oryzae]
  misc_feature (102)..(231): NCBI GI: 67515479 Blast Desc: AN0021.2 [Aspergillus nidulans FGSC A4] gi|40746184|gb|EAA65340.1| AN0021.2 [Aspergillus nidulans FGSC A4]
  misc_feature (96)..(232): NCBI GI: 255942865 Blast Desc: Pc18g03630 [Penicillium chrysogenum Wisconsin 54-1255] gi|211586934|emb|CAP94587.1| Pc18g03630 [Penicillium chrysogenum Wisconsin 54-1255]
  misc_feature (100)..(254): NCBI GI: 261357203 Blast Desc: conserved [Verticillium albo-atrum VaMs.102]
  misc_feature (71)..(254): NCBI GI: 212540118 Blast Desc: conserved [Penicillium marneffei ATCC 18224] gi|210067513|gb|EEA21605.1| conserved [Penicillium marneffei ATCC 18224]
  misc_feature: Useful for introducing or modulating the production of volatile compounds
MPSILSWNSVRPSWPWPLTLDNTVYSSLPTKEDKSGLDSDEQDDHHLTLKERRRRSKRDQRLSICLRIWQLLTLFLFIALCGITTIHKRLLDDVKPPPHIRCGDSLAEAEANGCIFDQLNKAWMPPDCPRYGLQEYLDAGYASSNASETGSVQFPFWRDLEQTRPLSIEELTSIANNDVEHAEKYYTTGREHMTHCAWMLVRMAYVYTQGERHDMLTSDFPHAKHCTLFLLDRALEGPDVDAVRTVGNVVFGGC

SEQ ID NO: 8516 - DNA, 1616 bp, Muscodor strobelii
  misc_feature: SGI EST ID NO. CUFF.20605.0
  misc_feature: Variant of the nucleotide sequence at SEQ ID NO 8514
tgtaccgatacattctacctggaatgggattctttcggattccggagatgcatgatgcaagatgcaagtgcacattagagtccagatttagactccgaggtacggaaaagtgaaaaggattggccgcctcggctacggcgagttcctctacctagttcatcttttgccgatcacgaaccgttatcgtgctttcgcttaccgaaaatgcgatatagcaatctgcagatcgcgatggcctcaccatggccgtgtttccgttcatttgggcctcgcactgcacctcacatgttgggtcgccagcggcagagggggtgtcgccctcgctccttttctgtccgataacttacaataccggagcgaggcccatcacagaccagacctggagcattacatgatatgttccattcatcaccatgccatcgatcctctcttggaacagtgttcgcccttcatggccttggccactcaccctagacaataccgtctactcttctctccctactaaagaggacaagagcggtctcgactctgatgaacaagatgatcatcatctcaccctcaaagaaagacggcgacggtcgaagcgagaccagcgcctctcgatctgcctcagaatatggcaactgctgactctgttcctcttcatcgccctctgcggcatcacgacaatccataaacgccttctagatgatgtcaaaccacctcctcacattcgctgcggcgactcactcgccgaggccgaggccaatggatgcatcttcgaccagctcaataaagcctggatgcctcccgactgccctcgttatgggctacaagagtaccttgacgccggttacgcctccagtaacgcttcagagacgggctcggtgcagttccctttttggcgagacctggaacagacgcggccgctctcaatcgaggagctcaccagcatagccaacaacgacgtcgagcatgctgagaagtactatactaccgggcgcgagcacatgacgcactgcgcatggatgctcgtccgcatggcgtacgtctacacgcagggcgagcggcatgacatgttgacgtccgacttcccgcacgccaagcattgcacattgttcctgctagaccgcgccttggagggtcccgacgtcgacgccgtcaggactgttggcaatgttgtctttggtggatgttaagtagctattagtcgcttgttcactcttctaatagatagaacagtatgttatatattatataatgtatttcgctccgttgcgactgtgaattgctgatgggaagtctttgacagtccaattagacacgcttcctgtagattttcatcctagactcaccttcttcctgaatttacccagtcgcacggagtatgatgtgcatacaacttaagctgccttcaatgctggatgatgcgattgtgttcatcaggcgggccatttaacatgttcgcatttcggactaagtctccattccgagtagtaaataattgttgattgagcgacgtacaatgaatgggaactacctgcgtactgtacgagcgaccctatgtggagttgttgatccgatctgcacgcaagcttgagtgttactccacgagatgcagggtccatagaatctat

SEQ ID NO: 8517 - DNA, 1335 bp, Muscodor strobelii
  misc_feature: SGI cDNA ID NO. 562625
  misc_feature: Encodes the peptide sequence at SEQ ID NO 8518
atgactcataaccacgcgtggttccgcacttcctactacgatggcggccatggcactacatctatttctcgtcgctctttcacaagatacgagtcatatgcagagtatacggctcccgtctccggccaacatcgacgggatgatcaaggatatgtttatgtgttaaacccgcctgggtcttcattcccttcagatagacgcccaagtgaacacggcagaccaagaagacatggcaatgcaggaggacatgatcgtggaagagaagaccatcggccaaggggacatcatccggcaagagaacgtgatcatacaagagaacatgatagccgaaaggaagacgaccgcgtaatggaacacgagcgcaaaaaagaagaaaagatcaaaaaagaaaaagaaatcaaaaacaaagaagaacttaagaggaaagaagatctgagaaaagaagaagagcgcagaagaaacagacctacaagggggtataagtatgctgagccaaggagttcgtcgacttccaaatacgtaaagaacccggtgctcatgagccacgaagtcaataagcctaaaggcaaaccttataatcatcaaggagatgctcatcgtgcaggtggaggggatcgttcatcgagtagaaaagacacagctagcacgcgcgagaggcgcagaagcaaggtatacgcaaacacagcttgcagtgatcaatacaattacaagccagccaaggaatctaagtcaatacccaaaactaaaaacaaggacgtacgaaaagctggcgacagcgttcagaacagtaacaccgacaactcctattcacagacggccagcgacaataaaacgtatcaacagcccgcgccactccaacctacctttcaacttctcggtgacactatggaatgtaaacccttaatggaaacgattctccgcctcttcgaagaaagcaggggaccggaatccacagcggcaggaaaatttgcgtggaatttctatgtacctctgggcggcgtctcggacatctatgtcatcgctcgatccaagcttgatacagaacggaacgaaaataagaaagagaatttgaaaagaatcatagaatcggcagaaggcatgctgaacgagtttagagagtggctccgcgacgtgacagggcatttgtccaaggaactgcagcgatcgcacattggagaactcaagggcatgcaaaaggaacacctgctcgttgctattgacacgaaccaccatttcgcgcagaatctggacgattggatgcggaggaacaacgattgggttcagcagtttgaaattggtcaagatcgaagtaaacagtctgcaaagaacaagtaa

SEQ ID NO: 8518 - protein, 444 aa, Muscodor strobelii
  misc_feature: SGI Peptide ID NO. 562625
MTHNHAWFRTSYYDGGHGTTSISRRSFTRYESYAEYTAPVSGQHRRDDQGYVYVLNPPGSSFPSDRRPSEHGRPRRHGNAGGHDRGREDHRPRGHHPARERDHTREHDSRKEDDRVMEHERKKEEKIKKEKEIKNKEELKRKEDLRKEEERRRNRPTRGYKYAEPRSSSTSKYVKNPVLMSHEVNKPKGKPYNHQGDAHRAGGGDRSSSRKDTASTRERRRSKVYANTACSDQYNYKPAKESKSIPKTKNKDVRKAGDSVQNSNTDNSYSQTASDNKTYQQPAPLQPTFQLLGDTMECKPLMETILRLFEESRGPESTAAGKFAWNFYVPLGGVSDIYVIARSKLDTERNENKKENLKRIIESAEGMLNEFREWLRDVTGHLSKELQRSHIGELKGMQKEHLLVAIDTNHHFAQNLDDWMRRNNDWVQQFEIGQDRSKQSAKNK

SEQ ID NO: 8519 - DNA, 339 bp, Muscodor strobelii
  misc_feature: SGI EST ID NO. CUFF.20614.0
  misc_feature: Variant of the nucleotide sequence at SEQ ID NO 8517
ctcgtcgctctttcacaagatacgagtcatatgcagagtatacggctcccgtctccggccaacatcgacgggatgatcaaggatatgtttatgtgttaaacccgcctgggtcttcattcccttcagatagacgcccaagtgaacacggcagaccaagaagacatggcaatgcaggaggacatgatcgtggaagagaagaccatcggccaaggggacatcatccggcaagagaacgtgatcatacaagagaacatgatagccgaaaggaagacgaccgcgtaatggaacacgagcgcaaaaaagaagaaaagatcaaaaaagaaaaagaaatcaaaaaca

SEQ ID NO: 8520 - DNA, 1023 bp, Muscodor strobelii
  misc_feature: SGI cDNA ID NO. 562626
  misc_feature: Encodes the peptide sequence at SEQ ID NO 8521
atgtacctacagaatcgccttctcgaggataccagcgccccaaaagaagaagttccatgcgtcatgctcgtcggggtgattccaaatccaaatcacaacaccgagaccgagactataacccagaggacgctcattcgacacggcgatcacgtcgaagatctttcagtagcaagcatcagagatggacatgacaccctcaaaaagcacactaagtttgactccgactcggaaactgaggatgcagaaagaagacgaaggaacgtcaagcaggagataagaggatccatgagaccatcagtctcagttccggttaatagcgtgccagaatatggcgagaacacctttggatctgagacgttctacgattctccgggcgaaatggaaaacaatgacagccgcacttctacatacagctcgtcgggtaggatgaggaatgacccttcgttcagaaaccaagacgagcccaactccaatccgatagatcataccatgcagctgtttgcaaccgtaatgaacgcaggcacttttgtggaggcaattcaagcgatgatcggtcgcactatgaagtgcgggacgatcctcgaatctgaaattgccaacgattttgaagcattcagatacatgatcgccgtacctctaaagttaatgattcaaagtatgagaagtgctcagaaactcattgacgacgaggtagacaatgacaatgacacagagtatgaatcgttgatacagaaagggaacttagtcttctcggtattgagaaagtggatggataaagtccagcgaaaattgccagaagacgttctcaagaatccggtaaaagatgtgccaatcgaatatcaaaggcaactaatccaagttatttttggcgataggaaacatttgcgcatacatatttttaatctgctctattgggctaaggagtatgatgatgccatatcgacttgggaaacgggtattgagcaaaaggagcgccagaaatacatggacctcggagagaagattgcttgggatgtattttga

SEQ ID NO: 8521 - protein, 340 aa, Muscodor strobelii
  misc_feature: SGI Peptide ID NO. 562626
MYLQNRLLEDTSAPKEEVPCVMLVGVIPNPNHNTETETITQRTLIRHGDHVEDLSVASIRDGHDTLKKHTKFDSDSETEDAERRRRNVKQEIRGSMRPSVSVPVNSVPEYGENTFGSETFYDSPGEMENNDSRTSTYSSSGRMRNDPSFRNQDEPNSNPIDHTMQLFATVMNAGTFVEAIQAMIGRTMKCGTILESEIANDFEAFRYMIAVPLKLMIQSMRSAQKLIDDEVDNDNDTEYESLIQKGNLVFSVLRKWMDKVQRKLPEDVLKNPVKDVPIEYQRQLIQVIFGDRKHLRIHIFNLLYWAKEYDDAISTWETGIEQKERQKYMDLGEKIAWDVF

SEQ ID NO: 8522 - DNA, 585 bp, Muscodor strobelii
  misc_feature: SGI cDNA ID NO. 562627
  misc_feature: Elevated expression when VOC is produced
  misc_feature: Encodes the peptide sequence at SEQ ID NO 8523
atggattccaaacccgtgaataaatggcgtgaaggattgacaacgagttttgatgccggccatcgaccttcaagtagcaagaagtcgcacaagtcaccaggcagtggtacaaaatctcgagagcgatacgcagatgcccttgaggtgatgagccccgacggtaaagctacccctcaacatcatatccatcgagacagatcgattacaaaggctggagaacgcccagtggctgacaagtccacctctaaatccaagaacaaaaggggtcctcaacaaaagcagcacgatgacaacaccgcaagctttgatgtccacaatttcattcgaaccaatgaagagaagaagctgcttgagttctttagaaatgtagacacttgggacttcaaggaattcaatatggccaagcgtcgttttgatgctttttggacacgtttgtgtagcgccaaaggctatgatccaaatgaggcagctcggctaaacgagcgattcaacccagtcactaagcagccctcagcgtacatatccccaccgccatatccgggccagcctgaggatgccatgccacctgttacttgtcaacagtga

SEQ ID NO: 8523 - protein, 194 aa, Muscodor strobelii
  misc_feature: SGI Peptide ID NO. 562627
  misc_feature: Useful for introducing or modulating the production of volatile compounds
MDSKPVNKWREGLTTSFDAGHRPSSSKKSHKSPGSGTKSRERYADALEVMSPDGKATPQHHIHRDRSITKAGERPVADKSTSKSKNKRGPQQKQHDDNTASFDVHNFIRTNEEKKLLEFFRNVDTWDFKEFNMAKRRFDAFWTRLCSAKGYDPNEAARLNERFNPVTKQPSAYISPPPYPGQPEDAMPPVTCQQ

SEQ ID NO: 8524 - DNA, 953 bp, Muscodor strobelii
  misc_feature: SGI EST ID NO. CUFF.20638.0
  misc_feature: Variant of the nucleotide sequence at SEQ ID NO 8522
ctcagtttctataaaattattttgctgaatttacctctttcgttagatgttagaacatctggaacaagcttcatgcttttttgcagtctcggtcttctcctcttatttccacattagagtagtatttccatgcaacatggattccaaacccgtgaataaatggcgtgaaggattgacaacgagttttgatgccggccatcgaccttcaagtagcaagaagtcgcacaagtcaccaggcagtggtacaaaatctcgagagcgatacgcagatgcccttgaggtgatgagccccgacggtaaagctacccctcaacatcatatccatcgagacagatcgattacaaaggctggagaacgcccagtggctgacaagtccacctctaaatccaagaacaaaaggggtcctcaacaaaagcagcacgatgacaacaccgcaagctttgatgtccacaatttcattcgaaccaatgaagagaagaagctgcttgagttctttagaaatgtagacacttgggacttcaaggaattcaatatggccaagcgtcgttttgatgctttttggacacgtttgtgtagcgccaaaggctatgatccaaatgaggcagctcggctaaacgagcgattcaacccagtcactaagcagccctcagcgtacatatccccaccgccatatccgggccagcctgaggatgccatgccacctgttacttgtcaacagtgagtcaatatgtgtgtgtggtggtcgcctctatctgcgtacgcagatgcaccgtcaacaagtgagtcaatatgaacttacatgacggattgtttcttggataaggaagtaccaggcttatgtggcagagaattgaattctggatgaggaaacattactacgtctcaacaatcagattgcttgtgttgcagatgtagatggactgtattaattgacaatgtaaaatggaaacttt

SEQ ID NO: 8525 - DNA, 954 bp, Muscodor strobelii
  misc_feature: SGI cDNA ID NO. 562628
  misc_feature: Encodes the peptide sequence at SEQ ID NO 8526
atgcacagctctctgatcgtagccgcctttgtctggctcgctgggctggccgctgctcacggtggctccttggctaccgaggtcctcaagcgaggcgaattcctggcaatcaatggtccggcatttctgcttgctcgagatgcctgtggtgctggtgcttcgcccgatgcagcttcatacattcgcttagcccgcgatcttcacgccgagtctagtctcgccactcgtaacttcacagattacaatcacagtcatgaaaccgacgatgatttccacttggacactgatccccacgagattttctcaaaataccctgcttgcgctttgtctccggatgccacagagggacctttctacgttgagggagaattggtgcgccctgacatcatcgacggtcagcatggcattccactgtacctcaagattcgcgtgaaggatgtcgagaaatgcacggacgtttctaacgtcttcgtcgagatctggcacgcgaacgctacgggagtctacagcggagtcgaccaacagcacggcatgacgttctgccgtggactacagaagacagacgacatgggcgttgtttccttcgtcactatttttccgggacattactacggccgaacaccgcatatccacgtcgcagttcacgttgatgccaaacaagaagctgataactccgtacatgacaacacagtctcgatgaatgcgcaggtatactttgaccagagcctcatcgatgcagtcgagaagaagaatccgtacaacaagaacacccaagagttcacgaagaatgaggatgattggttcttgggccaggaggcgagcgctcagttcgatccgttcgtgtactggattccggtctccacgcgtatggaggatggtctcattggatggattaccgtaggagccaatttgacggagcatcggcagctgtctgttgctgatcatcgaccttga

SEQ ID NO: 8526 - protein, 317 aa, Muscodor strobelii
  misc_feature: SGI Peptide ID NO. 562628
  misc_feature (114)..(272): Pfam Id: PF00775 Pfam Desc: Dioxygenase
  misc_feature (114)..(215): Pfam Id: PF00775 Pfam Desc: Dioxygenase
  misc_feature (3)..(313): NCBI GI: 238495921 Blast Desc: extracellular dioxygenase, [Aspergillus flavus NRRL3357] gi|220694076|gb|EED50420.1| extracellular dioxygenase, [Aspergillus flavus NRRL3357]
  misc_feature (3)..(313): NCBI GI: 119467386 Blast Desc: dioxygenase, [Neosartorya fischeri NRRL 181] gi|119405651|gb|EAW15602.1| dioxygenase, [Neosartorya fischeri NRRL 181]
  misc_feature (4)..(316): NCBI GI: 116205694 Blast Desc: CHGG_02140 [Chaetomium globosum CBS 148.51] gi|88182737|gb|EAQ90205.1| CHGG_02140 [Chaetomium globosum CBS 148.51]
  misc_feature (3)..(313): NCBI GI: 159122553 Blast Desc: extracellular dioxygenase, [Aspergillus fumigatus A1163]
  misc_feature (3)..(313): NCBI GI: 70984525 Blast Desc: extracellular dioxygenase [Aspergillus fumigatus Af293] gi|66845396|gb|EAL85731.1| extracellular dioxygenase, [Aspergillus fumigatus Af293]
  misc_feature (63)..(313): NCBI GI: 85111326 Blast Desc: NCU01849 [Neurospora crassa OR74A] gi|28925629|gb|EAA34647.1| conserved [Neurospora crassa OR74A]
  misc_feature (57)..(313): NCBI GI: 145247088 Blast Desc: An12g07430 [Aspergillus niger] gi|134080521|emb|CAK46368.1| protein product [Aspergillus niger]
  misc_feature (61)..(300): NCBI GI: 67541995 Blast Desc: AN7161.2 [Aspergillus nidulans FGSC A4] gi|40742223|gb|EAA61413.1| AN7161.2 [Aspergillus nidulans FGSC A4] gi|259483508|tpe|CBF78955.1| TPA: extracellular dioxygenase,
  misc_feature (1)..(301): NCBI GI: 116194560 Blast Desc: CHGG_03878 [Chaetomium globosum CBS 148.51] gi|88179791|gb|EAQ87259.1| CHGG_03878 [Chaetomium globosum CBS 148.51]
  misc_feature (1)..(305): NCBI GI: 119490176 Blast Desc: NFIA_062650 [Neosartorya fischeri NRRL 181] gi|119411161|gb|EAW21104.1| conserved [Neosartorya fischeri NRRL 181]
MHSSLIVAAFVWLAGLAAAHGGSLATEVLKRGEFLAINGPAFLLARDACGAGASPDAASYIRLARDLHAESSLATRNFTDYNHSHETDDDFHLDTDPHEIFSKYPACALSPDATEGPFYVEGELVRPDIIDGQHGIPLYLKIRVKDVEKCTDVSNVFVEIWHANATGVYSGVDQQHGMTFCRGLQKTDDMGVVSFVTIFPGHYYGRTPHIHVAVHVDAKQEADNSVHDNTVSMNAQVYFDQSLIDAVEKKNPYNKNTQEFTKNEDDWFLGQEASAQFDPFVYWIPVSTRMEDGLIGWITVGANLTEHRQLSVADHRP

SEQ ID NO: 8527 - DNA, 4144 bp, Muscodor strobelii
  misc_feature: SGI EST ID NO. CUFF.20687.0
  misc_feature: Variant of the nucleotide sequence at SEQ ID NO 8525
gcgagacaagcgagacaagtgcagtaaacatgggagagaggcgtccactgacatccctgaaaaccggtatgtgcagctgcagcttgttgcgcaaaccctagcaatcccgcaacccaggcacattttctcgaggccgtcagcgggttaatgaaccatatgcattcgcaaatgatcttcaatggcaatagacggcgattcaatggcttttcatctcaatgtgccccgttcataacccctgtcggcggcgtcgtaatggggctaggccagctagtcgctgctaggattgcgtgcttatctacgatgttgtctacaagtactgcaaagaacgttgtcgttcactttcccatgcggagaatgcgtggtaatgtgagacatttaaaacttcttcctccccaaatgagcgcgaggtgaacttgtgccatatcatcattataccatgtcttccgttcccgacccggcggtggtgcctcagcccgttgctcaagacgtccatgatgtcagcaaactgaactccgatgcagacgcttccgaacatggtggcatcgtcgtcccggcactaacttccgctgaagtccctgagacctcgaagtgggaaatctggtcatggtacgcttattacatcggcgccaacggcctcgcgcttttcaactttggaccgacgattgctcaaaatctcctgtcgcaagcagctccagaggatacaggattgctcccattcatcggtcaagagcgcaatgtcaacagtatcgttctcgttgccaatggcatttcattcgcaatccaggctgtcctattcattatcattggctcatatgctgatttcggtactggtcgtcgatggatcctcatcttctggtccatcctggcttacgcaattggattcgcttggcttggtgtacatacgcctgacaaatggcaaactggaatcggtctatacatcgttggcctcatctgctaccaattgactctcacatactggaccgcagcatttccgtccttggctcggaatacgcctctcctgaaagaagccgctcgagcatatgctgagggagaaatcactcatcaagaatatgatcaccaagatgagatggaacgcagcagattgagcaacatcgcgttctacatacaaagcgtcggtgagatcttcatcctcgctatcatcgttggcattctgttcggcgtgaaagttgatgccagtaccgagaacaataatcgaggccagagtgtcctgattgccttctcgactggtgtctggcttctgctttcaatcccctggtttctgatcgagaagacacgaccgggcctgaaagtacctccaggccaaaatatggtcacagttggcttttggcaattgaaggaagcattgggtcagatctggcacctgaaaatgagtctcgtgtacttgttcggatacttccttctgggtgactccttgaacaccactgtcaccgttattgctactctgcaaaatgaaattgttgcgtacgacacattgacgcttacctatctatatcttgttggcattgctgctcaaggtataggtattggggcattttggctgattcagaaacgatttaaactcagtgccaagactatgttcaacggtgtaatggtcgggatcatacttcttgatggatggggaatgattggtaattggacgaatggatttggatttcatcggtatgtaaaagcccccatcgtggcggtcccttggggcggtcagacctggcgtcgtccaagagctaacttctgttgatagtatgtgacgcccttacttccgccgctgttttcactctgctcggaacaagagctttgaagtaaacttgtgcaaatatgctgacgttctttgttttgatagatgtctgggaagtctgggtgtaccaggtgttctacgggctattcgtctgcccttggtactcctactcacaaatcatgatttcgtcggtcaccccacgcggtcacgagttcctcttcttctccctattcaccattatcggaaaaacatcatccttcattggaccttttgttagtagtgcgattattgaccgaacaccaaatcatgacaacaataacgcagcattttacttcctgttcgcattgtcgctggtcagtgcagctggtctctggattttcttagatttggagaagagtgctagggagcaggaagcgttcattgagaaagagaaggccaggatggcagcagggtcggacagtgactgaacacggtgttcctgattcgtctctctttgtttgagattgatgaccagcaacaaagataccatgcaattagcgattgctcactagggcattatatgcattgtacgtgcatttcaatgataccccattatgttctctgcttcagtccaatatcaattgaagggactagccccatctccaccattgaagtctgcaagtgatcaactggggcaacggtttataacatgaactaggaaagggaaaggcgcaatttacgataccttgaattgcaggcctagaattaacattcaattacggccgtgtcattgaatgtttagacggcacgtctagtatctgcgaccagggatcaacattcctaccattgtcaccaaggcggagcctattcaagatttgttatatagatcgcaacatttggctcgatggctcaggagctcacatcgtccttcacttgactaagcaagacagatcgctgatttggccatcttgctttggcttttacattcagcaattacttcttcgcgacttcaacatgcacagctctctgatcgtagccgcctttgtctggctcgctgggctggccgctgctcacggtggctccttggctaccgaggtcctcaagcgaggcgaattcctggcaatcaatggtccggcatttctgcttgctcgagatgcctgtggtgctggtgcttcgcccgatgcagcttcatacattcgcttagcccgcgatcttcacgccgagtctagtctcgccactcgtaacttcacagattacaatcacagtcatgaaaccgacgatgatttccacttggacactgatccccacgagattttctcaaaataccctgcttgcgctttgtctccggatgccacagagggacctttctacgttgagggagaattggtgcgccctgacatcatcgacggtcagcatggcattccactgtacctcaagattcgcgtgaaggatgtcgagaaatgcacggacgtttctaacgtcttcgtcgagatctggcacgcgaacgctacgggagtctacagcggagtcgaccaacagcacggcatgacgttctgccgtggactacagaagacagacgacatgggcgttgtttccttcgtcactatttttccgggacattactacggccgaacaccgcatatccacgtcgcagttcacgttgatgccaaacaagaagctgataactccgtacatgacaacacagtctcgatgaatgcgcaggtatactttgaccagagcctcatcgatgcagtcgagaagaagaatccgtacaacaagaacacccaagagttcacgaagaatgaggatgattggttcttgggccaggaggcgagcgctcagttcgatccgttcgtgtactggattccggtctccacgcgtatggaggatggtctcattggatggattaccgtaggagccaatttgacggagcatcggcagctgtctgttgctgatcatcgaccttgatgtagtgtatgagatgtgattcacatattcctacattggctagtcagtggcaggtgataagaggccgaagtgataatatattggctcagaaaagtcagcattagtatacttcatggccagggaacgccgccgagtagtactagggtcactcaataataagcatttggatgaccaccctgcagtctatagcgaaccagatgactcaacactcgagaacaggtagctgaatgggtgagcgcaacgacacgaggcaataggatcatttgtgctgccctgaactgcaagaacagagtaatgaaatggtagaattgaaaacatcacccccggtcctttcgacatgctactagtaggtagaagcgtgcaaacccggcaaaactaagttctttccaattaatattgcttacttcaatagatctagtgaatcaaaaaacaatcaagatcggg

SEQ ID NO: 8528 - DNA, 1644 bp, Muscodor strobelii
  misc_feature: SGI cDNA ID NO. 562629
  misc_feature: Reduced expression when VOC is produced
  misc_feature: Encodes the peptide sequence at SEQ ID NO 8529
atgtcttccgttcccgacccggcggtggtgcctcagcccgttgctcaagacgtccatgatgtcagcaaactgaactccgatgcagacgcttccgaacatggtggcatcgtcgtcccggcactaacttccgctgaagtccctgagacctcgaagtgggaaatctggtcatggtacgcttattacatcggcgccaacggcctcgcgcttttcaactttggaccgacgattgctcaaaatctcctgtcgcaagcagctccagaggatacaggattgctcccattcatcggtcaagagcgcaatgtcaacagtatcgttctcgttgccaatggcatttcattcgcaatccaggctgtcctattcattatcattggctcatatgctgatttcggtactggtcgtcgatggatcctcatcttctggtccatcctggcttacgcaattggattcgcttggcttggtgtacatacgcctgacaaatggcaaactggaatcggtctatacatcgttggcctcatctgctaccaattgactctcacatactggaccgcagcatttccgtccttggctcggaatacgcctctcctgaaagaagccgctcgagcatatgctgagggagaaatcactcatcaagaatatgatcaccaagatgagatggaacgcagcagattgagcaacatcgcgttctacatacaaagcgtcggtgagatcttcatcctcgctatcatcgttggcattctgttcggcgtgaaagttgatgccagtaccgagaacaataatcgaggccagagtgtcctgattgccttctcgactggtgtctggcttctgctttcaatcccctggtttctgatcgagaagacacgaccgggcctgaaagtacctccaggccaaaatatggtcacagttggcttttggcaattgaaggaagcattgggtcagatctggcacctgaaaatgagtctcgtgtacttgttcggatacttccttctgggtgactccttgaacaccactgtcaccgttattgctactctgcaaaatgaaattgttgcgtacgacacattgacgcttacctatctatatcttgttggcattgctgctcaaggtataggtattggggcattttggctgattcagaaacgatttaaactcagtgccaagactatgttcaacggtgtaatggtcgggatcatacttcttgatggatggggaatgattggtaattggacgaatggatttggatttcatcggtatgtaaaagcccccatcgtggcggtcccttggggcgatgtctgggaagtctgggtgtaccaggtgttctacgggctattcgtctgcccttggtactcctactcacaaatcatgatttcgtcggtcaccccacgcggtcacgagttcctcttcttctccctattcaccattatcggaaaaacatcatccttcattggaccttttgttagtagtgcgattattgaccgaacaccaaatcatgacaacaataacgcagcattttacttcctgttcgcattgtcgctggtcagtgcagctggtctctggattttcttagatttggagaagagtgctagggagcaggaagcgttcattgagaaagagaaggccaggatggcagcagggtcggacagtgactga

SEQ ID NO: 8529 - protein, 547 aa, Muscodor strobelii
  misc_feature: SGI Peptide ID NO. 562629
  misc_feature (1)..(546): NCBI GI: 46115666 Blast Desc: FG03675.1 [Gibberella zeae PH-1]
  misc_feature (15)..(537): NCBI GI: 256722111 Blast Desc: [Nectria haematococca mpVI 77-13-4]
  misc_feature (15)..(546): NCBI GI: 119481155 Blast Desc: autophagy protein (Atg22), [Neosartorya fischeri NRRL 181] gi|119408760|gb|EAW18709.1| autophagy protein (Atg22), [Neosartorya fischeri NRRL 181]
  misc_feature (1)..(544): NCBI GI: 121715636 Blast Desc: autophagy protein (Atg22), [Aspergillus clavatus NRRL 1] gi|119403584|gb|EAW14001.1| autophagy protein (Atg22), [Aspergillus clavatus NRRL 1]
  misc_feature (11)..(542): NCBI GI: 212543863 Blast Desc: autophagy protein (Atg22), [Penicillium marneffei ATCC 18224] gi|210066993|gb|EEA21086.1| autophagy protein (Atg22), [Penicillium marneffei ATCC 18224]
  misc_feature (45)..(546): NCBI GI: 255938967 Blast Desc: Pc15g00260 [Penicillium chrysogenum Wisconsin 54-1255] gi|129716028|gb|ABO31318.1| Atg22B-1p [Penicillium chrysogenum] gi|211584875|emb|CAP82912.1| Pc15g00260 [Penicillium chrysogenum
  misc_feature (45)..(546): NCBI GI: 71001578 Blast Desc: autophagy protein (Atg22) [Aspergillus fumigatus Af293] gi|66853108|gb|EAL93432.1| autophagy protein (Atg22), [Aspergillus fumigatus Af293]
  misc_feature (49)..(546): NCBI GI: 159129539 Blast Desc: autophagy protein (Atg22), [Aspergillus fumigatus A1163]
  misc_feature (31)..(538): NCBI GI: 169624180 Blast Desc: SNOG_15345 [Phaeosphaeria nodorum SN15] gi|111056158|gb|EAT77278.1| SNOG_15345 [Phaeosphaeria nodorum SN15]
  misc_feature (14)..(547): NCBI GI: 189207471 Blast Desc: conserved [Pyrenophora tritici-repentis Pt-1C-BFP] gi|187976162|gb|EDU42788.1| conserved [Pyrenophora tritici-repentis Pt-1C-BFP]
  misc_feature: Useful for introducing or modulating the production of volatile compounds
MSSVPDPAVVPQPVAQDVHDVSKLNSDADASEHGGIVVPALTSAEVPETSKWEIWSWYAYYIGANGLALFNFGPTIAQNLLSQAAPEDTGLLPFIGQERNVNSIVLVANGISFAIQAVLFIIIGSYADFGTGRRWILIFWSILAYAIGFAWLGVHTPDKWQTGIGLYIVGLICYQLTLTYWTAAFPSLARNTPLLKEAARAYAEGEITHQEYDHQDEMERSRLSNIAFYIQSVGEIFILAIIVGILFGVKVDASTENNNRGQSVLIAFSTGVWLLLSIPWFLIEKTRPGLKVPPGQNMVTVGFWQLKEALGQIWHLKMSLVYLFGYFLLGDSLNTTVTVIATLQNEIVAYDTLTLTYLYLVGIAAQGIGIGAFWLIQKRFKLSAKTMFNGVMVGIILLDGWGMIGNWTNGFGFHRYVKAPIVAVPWGDVWEVWVYQVFYGLFVCPWYSYSQIMISSVTPRGHEFLFFSLFTIIGKTSSFIGPFVSSAIIDRTPNHDNNNAAFYFLFALSLVSAAGLWIFLDLEKSAREQEAFIEKEKARMAAGSDSD

SEQ ID NO: 8530 - DNA, 1272 bp, Muscodor strobelii
  misc_feature: SGI cDNA ID NO. 562630
  misc_feature: Encodes the peptide sequence at SEQ ID NO 8531
atgttgggtaaagctgtagtcttgtccaatattcttgctgccagtgtgcatgcatcgtcgtcatgttatacaaagcctagcccgatcaagatcctccagggcggttacaattccacatatgctgttcttgaattcaacccatatgtaacaccaaatacccttgaggtggtcaagtactacaacacggcagatggcaatctcaaagcatggctcacccggcatccagctaatccgacaattgtcttgggagtcaatgacaatgctcatccgaacaagcccggctatatgacttcttaccacctggatcgtgataccggcaagctcactgcgattgacagtgttgatactggtggctatcccgtacccgactacagcatcgctgcagcgcattgcgcattctttcccgatggtcttgtagcaggagccgcaaactactacggacaatccgctgctactttcaagttcgatccagttaccggacattttggcaagcagatcaataccggaggaattcttgactaccccggctatacgcctaagcctggtcaaatcggcactgcaggcgatgacacgacttctcaagctactgcccatcctcacatgattgcacctcacccctggttgaatgtattatatattcctgacctgggagaagacaaacttaggctattcaatattgcagaagatggtaccctgagcgacttgacccaataccaggtgccatacggacatggaccgaggcatatatccattgaccctacagggaagtcattatacgtcttgtttgagcttgctgcgctcattagggcatatgatatcgatcagactacgggagagctcacgcagaggggtgtagatctaccgatctacaatcccctcaacacgacattctcgctcaacatcagcggcgctgaggtacatgtcagcaatgacggacgatttgtctacgccactcagcgtaacttgactacggcctcagtcattgagcctagcgatccatccgacatcattgccgtctatgcagtctcgccaagcaacggtactctgacgagaatccagagccccatggctcctggttcacgtcagatccgagccatggagctgtcgcctattggaatgactggtgttgctggcggacaagattatcttgttgctggaggtcttacgaccaacaatacttttatctttaagcgcgatcgcgctactggcatgttggatcttgtggcgagtactggaggaacttatatgccgtcgacttacctatggttatag

SEQ ID NO: 8531 - protein, 423 aa, Muscodor strobelii
  misc_feature: SGI Peptide ID NO. 562630
  misc_feature (3)..(414): NCBI GI: 221196867 Blast Desc: conserved [Burkholderia multivorans CGD2M] gi|221203537|ref|ZP_03576556.1| conserved [Burkholderia multivorans CGD2] gi|221177471|gb|EEE09899.1| conserved CGD2]
  misc_feature (3)..(414): NCBI GI: 221212550 Blast Desc: conserved [Burkholderia multivorans CGD1] gi|221167649|gb|EEE00119.1| conserved [Burkholderia multivorans CGD1]
  misc_feature (86)..(406): NCBI GI: 209521892 Blast Desc: 6-phosphogluconolactonase [Burkholderia sp. H160] gi|209497667|gb|EDZ97850.1| 6-phosphogluconolactonase [Burkholderia sp. H160]
  misc_feature (86)..(406): NCBI GI: 187923239 Blast Desc: 6-phosphogluconolactonase [Burkholderia phytofirmans PsJN] gi|187714433|gb|ACD15657.1| 6-phosphogluconolactonase [Burkholderia phytofirmans PsJN]
  misc_feature (82)..(405): NCBI GI: 149188311 Blast Desc: YkgB [Vibrio shilonii AK1] gi|148837900|gb|EDL54843.1| YkgB [Vibrio shilonii AK1]
  misc_feature (92)..(410): NCBI GI: 228909186 Blast Desc: bthur0013_33410 [Bacillus thuringiensis IBL 200] gi|228850507|gb|EEM95333.1| bthur0013_33410 [Bacillus thuringiensis IBL 200]
  misc_feature (92)..(410): NCBI GI: 218898453 Blast Desc: BCG9842_B1848 [Bacillus cereus G9842] gi|218545906|gb|ACK98300.1| conserved [Bacillus cereus G9842]
  misc_feature (60)..(405): NCBI GI: 256419796 Blast Desc: 6-phosphogluconolactonase [Chitinophaga pinensis DSM 2588] gi|256034704|gb|ACU58248.1| 6-phosphogluconolactonase [Chitinophaga pinensis DSM 2588]
  misc_feature (63)..(405): NCBI GI: 284040561 Blast Desc: 6-phosphogluconolactonase [Spirosoma linguale DSM 74] gi|283819854|gb|ADB41692.1| 6-phosphogluconolactonase [Spirosoma linguale DSM 74]
  misc_feature (92)..(410): NCBI GI: 218231889 Blast Desc: 6-phosphogluconolactonase [Bacillus cereus B4264] gi|218159846|gb|ACK59838.1| 6-phosphogluconolactonase [Bacillus cereus B4264]
MLGKAVVLSNILAASVHASSSCYTKPSPIKILQGGYNSTYAVLEFNPYVTPNTLEVVKYYNTADGNLKAWLTRHPANPTIVLGVNDNAHPNKPGYMTSYHLDRDTGKLTAIDSVDTGGYPVPDYSIAAAHCAFFPDGLVAGAANYYGQSAATFKFDPVTGHFGKQINTGGILDYPGYTPKPGQIGTAGDDTTSQATAHPHMIAPHPWLNVLYIPDLGEDKLRLFNIAEDGTLSDLTQYQVPYGHGPRHISIDPTGKSLYVLFELAALIRAYDIDQTTGELTQRGVDLPIYNPLNTTFSLNISGAEVHVSNDGRFVYATQRNLTTASVIEPSDPSDIIAVYAVSPSNGTLTRIQSPMAPGSRQIRAMELSPIGMTGVAGGQDYLVAGGLTTNNTFIFKRDRATGMLDLVASTGGTYMPSTYLWL

SEQ ID NO: 8532 - DNA, 1425 bp, Muscodor strobelii
  misc_feature: SGI cDNA ID NO. 562631
  misc_feature: Encodes the peptide sequence at SEQ ID NO 8533
atgagcctctcaacgaccatgcagcgcctcgggtttctcgctgcggctatcgttgcaattcacgccgctctttgttcgtgtgtactgggggctcaccatcaccatcaccagatgcaccatcgcagtatcactgcacgcgatgcagcgggtattaatggaacgccacatttcacaccttttaccatcgacgtcatcatcgacactcagggtggaacctcaaatctgaagggagacagtgtgaatgcatatctcatgggaacccgtcgctctcacccggaagaccctaccaatcccgaggaagtcaaatttttggctcaacatgtagatggacaactggacacgtcttatttccctgattcttcctcactatcagtcggcgctgttcgcatgaacatgacctccatggactacgattcggcaaaacttttatggaatgtgaagcagtcaaatgcagcaagattccgaacgcctggtcctgtcacagctggccgtatctatgtttcccaggagaaattgagtttctcgaatggtcagggcgagatgactgaacctgatccatacaatggtgacagttttgcattcattgagttcacgcatgtagagaaggaagacgacacagatgatgacatgtcagtgaatttgtcgtatgttgactgggtgtctgctttatctctcggcatcaatatcacgtacggcgatgcatcgaacccgaagtccgtgtaccatgccggcatggaagccgatggtatacagcagatatgcgacgagcttgcgaaggtccccggattttggaatgaactgtgcattatatcgaaagacactggtactccaattcaggtacgatcacccaacatacaactatccctgaatagcaattcagacgctggcaaatactgggagccatacatcgagtcagtttggaagcagtattcaaactcgaccctccgtcttgatactggatacagaggggatcgtatgaatgatacaaaggtgaattgtcaagtccagggcgacgacatgctacactgcgaccaggaggatatcggtaactttatccgacctaagagcaaagacatctggagttgcgattcaggtccgttcaatctcaggtgcataaatgacgaggagccatgtgttgctgccacaacctctcgcggccgagtagtagccgttctcgctgctgcattcacacgctctacaatccacatcgaagctgtcaacccgtcaccagacattggacctgacaagtattacgtgcatccgatcactcatcactattctaaggcagtacacgaacagctcattgatggcattggatatgccttcccgtacgatgatgttacacccggtggagatattggcatgtcggctggtctattttcgacgaacgagcctatccagttggacatctttgtcaacgcttag

SEQ ID NO: 8533 - protein, 474 aa, Muscodor strobelii
  misc_feature: SGI Peptide ID NO. 562631
  misc_feature (148)..(474): NCBI GI: 256726304 Blast Desc: NECHADRAFT_94692 [Nectria haematococca mpVI 77-13-4]
  misc_feature (148)..(472): NCBI GI: 46111053 Blast Desc: FG02408.1 [Gibberella zeae PH-1]
  misc_feature (72)..(472): NCBI GI: 261361626 Blast Desc: glucanase B [Verticillium albo-atrum VaMs.102]
  misc_feature (160)..(472): NCBI GI: 212531815 Blast Desc: glucan endo-1,3-beta-glucosidase precursor, [Penicillium marneffei ATCC 18224] gi|210071428|gb|EEA25517.1| glucan endo-1,3-beta-glucosidase precursor, [Penicillium ATCC
  misc_feature (148)..(472): NCBI GI: 212526330 Blast Desc: conserved [Penicillium marneffei ATCC 18224] gi|210072720|gb|EEA26807.1| conserved [Penicillium marneffei ATCC 18224]
  misc_feature (157)..(472): NCBI GI: 242780568 Blast Desc: conserved [Talaromyces stipitatus ATCC 10500] gi|218719770|gb|EED19189.1| conserved [Talaromyces stipitatus ATCC 10500]
  misc_feature (157)..(472): NCBI GI: 242774018 Blast Desc: glucan endo-1,3-beta-glucosidase precursor, [Talaromyces stipitatus ATCC 10500] gi|218721977|gb|EED21395.1| glucan endo-1,3-beta-glucosidase precursor, [Talaromyces ATCC
  misc_feature (58)..(474): NCBI GI: 256668240 Blast Desc: StAA4_13875 [Streptomyces sp. AA4]
  misc_feature (151)..(472): NCBI GI: 256394360 Blast Desc: Carbohydrate binding family 6 [Catenulispora acidiphila DSM 44928] gi|256360586|gb|ACU74083.1| Carbohydrate binding family 6 [Catenulispora acidiphila DSM 44928]
  misc_feature (160)..(461): NCBI GI: 189192364 Blast Desc: glucanase B [Pyrenophora tritici-repentis Pt-1C-BFP] gi|187974127|gb|EDU41626.1| glucanase B [Pyrenophora tritici-repentis Pt-1C-BFP]
MSLSTTMQRLGFLAAAIVAIHAALCSCVLGAHHHHHQMHHRSITARDAAGINGTPHFTPFTIDVIIDTQGGTSNLKGDSVNAYLMGTRRSHPEDPTNPEEVKFLAQHVDGQLDTSYFPDSSSLSVGAVRMNMTSMDYDSAKLLWNVKQSNAARFRTPGPVTAGRIYVSQEKLSFSNGQGEMTEPDPYNGDSFAFIEFTHVEKEDDTDDDMSVNLSYVDWVSALSLGINITYGDASNPKSVYHAGMEADGIQQICDELAKVPGFWNELCIISKDTGTPIQVRSPNIQLSLNSNSDAGKYWEPYIESVWKQYSNSTLRLDTGYRGDRMNDTKVNCQVQGDDMLHCDQEDIGNFIRPKSKDIWSCDSGPFNLRCINDEEPCVAATTSRGRVVAVLAAAFTRSTIHIEAVNPSPDIGPDKYYVHPITHHYSKAVHEQLIDGIGYAFPYDDVTPGGDIGMSAGLFSTNEPIQLDIFVNA

SEQ ID NO: 8534 - DNA, 2054 bp, Muscodor strobelii
  misc_feature: SGI EST ID NO. CUFF.20650.0
  misc_feature: Variant of the nucleotide sequence at SEQ ID NO 8532
cgcgcattctcttccttcgttgcaagcacacttcgttctttccttgcgcaatccagcagacacggagtcttcagttggtggttccacaagatctgtgatgtgctgtgaaccgcttcagcactgccctagaccaactagcaaacaccaactggccccggccttacatagcaacaaattgaatccgtgtgaaccaaccccgctagaatgagcctctcaacgaccatgcagcgcctcgggtttctcgctgcggctatcgttgcaattcacgccgctctttgttcgtgtgtactgggggctcaccatcaccatcaccagatgcaccatcgcagtatcactgcacgcgatgcagcgggtattaatggaacgccacatttcacaccttttaccatcgacgtcatcatcgacactcagggtggaacctcaaatctgaagggagacagtgtgaatgcatatctcatgggaacccgtcgctctcacccggaagaccctaccaatcccgaggaagtcaaatttttggctcaacatgtagatggacaactggacacgtcttatttccctgattcttcctcactatcagtcggcgctgttcgcatgaacatgacctccatggactacgattcggcaaaacttttatggaatgtgaagcagtcaaatgcagcaagattccgaacgcctggtcctgtcacagctggccgtatctatgtttcccaggagaaattgagtttctcgaatggtcagggcgagatgactgaacctgatccatacaatggtgacagttttgcattcattgagttcacgcatgtagagaaggaagacgacacagatgatgacatgtcagtgaatttgtcgtatgttgactgggtgtctgctttatctctcggcatcaatatcacgtacggcgatgcatcgaacccgaagtccgtgtaccatgccggcatggaagccgatggtatacagcagatatgcgacgagcttgcgaaggtccccggattttggaatgaactgtgcattatatcgaaagacactggtactccaattcaggtacgatcacccaacatacaactatccctgaatagcaattcagacgctggcaaatactgggagccatacatcgagtcagtttggaagcagtattcaaactcgaccctccgtcttgatactggatacagaggggatcgtatgaatgatacaaaggtgaattgtcaagtccagggcgacgacatgctacactgcgaccaggaggatatcggtaactttatccgacctaagagcaaagacatctggagttgcgattcaggtccgttcaatctcaggtgcataaatgacgaggagccatgtgttgctgccacaacctctcgcggccgagtagtagccgttctcgctgctgcattcacacgctctacaatccacatcgaagctgtcaacccgtcaccagacattggacctgacaagtattacgtgcatccgatcactcatcactattctaaggcagtacacgaacagctcattgatggcattggatatgccttcccgtacgatgatgttacacccggtggagatattggcatgtcggctggtctattttcgacgaacgagcctatccagttggacatctttgtcaacgcttagcaggcgtcaccttccgatgagtgctcgtgcgtccctccgtcgacaactgtcacgacgactgtgtacccgagcgctaccggagtttgaggtgggataactgattgtcctcaagcggatacggcgatgaatgggagagttatctggaacggcgtcacgatggtgatcgtgatgtcaagtttcaacgactatacattggaatggtgataggaatccgaatgaagctcaatgtatagtcgatcatggtgaagaatacggaatacgcgacagtggagtcttcgtgttcctcaagaaaatacttgggtcaattgggattctctggagcatggagtgcagtctgtctagcttacctcctagatagtagttcgcacagaatgcaatccgaatctcatatggtgaacctctacatgttgaatcatagtatgata

SEQ ID NO: 8535 - DNA, 1659 bp, Muscodor strobelii
  misc_feature: SGI cDNA ID NO. 562632
  misc_feature: Encodes the peptide sequence at SEQ ID NO 8536
atgggtgcagttcactcttcgctgaagaatgtccttcttggcatcaaagctctattgcagatgcaggcagaactgcaagagatgttgaagcgtgccaatgcatctcccggtctgccagtctcaaatcctacaaagccctactggcttgaggacccgccttatccggaacttgtaaatagacaatccacgactctaccgcaaaaagcagacatcatcattataggatcgggaattactggcgttgcagcagctcggtcaattctgtatgatgccgctcgcaagagtcgcgaggggaggtcgagcaaaagtgacaagctctcgcaatcatcaacagagaatgagaagctagctagctccgacttgcctcgagttgtggtgctcgaggcgcgatctctttgttctggcgcaaccggccgcaacggtggtcacattaaagcctcaccacatgagttatttgctcaattgcgacgtatgaagatgagtggggagcgagccgcggcccttggacgctttcagcttgcccatctcgatgttcttacgagcctgtgtgaagccgagggttgggaagctgctgagtgccgaaaggtagaaacaacggacatgtatcttactgatgaagatcgtgaaaaggcttttgaacaggtccgaaatctacgcgaatgggtacccgagctagacgtcaagatgttggatgccgaagaggcacaagagaaattcaaaacaaatacatatatcaaaggcgcgatatcatatacagcaggtgcgctgtggccttttcgattcgttagctgcgtgtggaaagacctacttgatagattcgagagcaacatttccttggaaacgaacacgcctgtaacaaaaattgaagcttctcccccattagcaacgaatcagtttgcctacatggtttcaacggagcgcggcatcatacgctgtaatcagatcgtacacgcgacgaatgggtttacgacgcagtttgtaccaggtttgaaaaacaaaatgaccggccttttagcgcacatgtctgcccagagaccgggtaaatcattcccggatagcaatggtgaacgatcttggtcagtcttctataatggatcgttcgactatgttactcagcgcccatctcatggcggtaagccgggggatattatgctcgggggcggtttctctaggtctgcaaacgatggaatgagcgccatcgggatctgggatgatagcagaatggacgcacttcccgttgcgcacataggcgggatattcccaaccatatttgagcctcgttggggagcggaggctgagggcggcaggatgaaaagcacctggtctggaatagtatgcgctacaggcgacctccacccatttgtcgggaaactagatccgaaattgaccgaacgggagtctagtatcaataatcaagcatccggcccgaaggctggagaatgggtagcggctggatattctggcgacggcatggtatgggcttggctctcgggcacggctgtgggtttaatgctcaacggtagcgaaaacgaagtcgttgtggggcagcctgggatgctcgatggtcgcctgtatgattggttcccaagagaacttgagccaacaataccaagattgaagaaagcaaacctggaaaacctccttgagctgttactttga

SEQ ID NO: 8536 - protein, 552 aa, Muscodor strobelii
  misc_feature: SGI Peptide ID NO. 562632
  misc_feature (70)..(504): Pfam Id: PF01266 Pfam Desc: FAD dependent oxidoreductase
  misc_feature (116)..(504): Pfam Id: PF01266 Pfam Desc: FAD dependent oxidoreductase
  misc_feature (1)..(551): NCBI GI: 189203395 Blast Desc: conserved [Pyrenophora tritici-repentis Pt-1C-BFP] gi|187985132|gb|EDU50620.1| conserved [Pyrenophora tritici-repentis Pt-1C-BFP]
  misc_feature (1)..(547): NCBI GI: 39947610 Blast Desc: MGG_08611 [Magnaporthe grisea 70-15] gi|145010232|gb|EDJ94888.1| MGG_08611 [Magnaporthe grisea 70-15]
  misc_feature (1)..(551): NCBI GI: 46109532 Blast Desc: FG01648.1 [Gibberella zeae PH-1]
  misc_feature (1)..(551): NCBI GI: 256730517 Blast Desc: NECHADRAFT_74117 [Nectria haematococca mpVI 77-13-4]
  misc_feature (151)..(547): NCBI GI: 169618407 Blast Desc: SNOG_12394 [Phaeosphaeria nodorum SN15] gi|160703611|gb|EAT80207.2| SNOG_12394 [Phaeosphaeria nodorum SN15]
  misc_feature (1)..(551): NCBI GI: 115390130 Blast Desc: [Aspergillus terreus NIH2624] gi|114194966|gb|EAU36666.1| [Aspergillus terreus NIH2624]
  misc_feature (1)..(551): NCBI GI: 238505874 Blast Desc: conserved [Aspergillus flavus NRRL3357] gi|220690253|gb|EED46603.1| conserved [Aspergillus flavus NRRL3357]
  misc_feature (1)..(551): NCBI GI: 242821518 Blast Desc: conserved [Talaromyces stipitatus ATCC 10500] gi|218712618|gb|EED12043.1| conserved [Talaromyces stipitatus ATCC 10500]
  misc_feature (1)..(551): NCBI GI: 154302219 Blast Desc: BC1G_09790 [Botryotinia fuckeliana B05.10] gi|150855564|gb|EDN30756.1| BC1G_09790 [Botryotinia fuckeliana B05.10]
  misc_feature (1)..(551): NCBI GI: 156053534 Blast Desc: SS1G_05613 [Sclerotinia sclerotiorum 1980] gi|154703395|gb|EDO03134.1| SS1G_05613 [Sclerotinia sclerotiorum 1980]
MGAVHSSLKNVLLGIKALLQMQAELQEMLKRANASPGLPVSNPTKPYWLEDPPYPELVNRQSTTLPQKADIIIIGSGITGVAAARSILYDAARKSREGRSSKSDKLSQSSTENEKLASSDLPRVVVLEARSLCSGATGRNGGHIKASPHELFAQLRRMKMSGERAAALGRFQLAHLDVLTSLCEAEGWEAAECRKVETTDMYLTDEDREKAFEQVRNLREWVPELDVKMLDAEEAQEKFKTNTYIKGAISYTAGALWPFRFVSCVWKDLLDRFESNISLETNTPVTKIEASPPLATNQFAYMVSTERGIIRCNQIVHATNGFTTQFVPGLKNKMTGLLAHMSAQRPGKSFPDSNGERSWSVFYNGSFDYVTQRPSHGGKPGDIMLGGGFSRSANDGMSAIGIWDDSRMDALPVAHIGGIFPTIFEPRWGAEAEGGRMKSTWSGIVCATGDLHPFVGKLDPKLTERESSINNQASGPKAGEWVAAGYSGDGMVWAWLSGTAVGLMLNGSENEVVVGQPGMLDGRLYDWFPRELEPTIPRLKKANLENLLELLL

SEQ ID NO: 8537 - DNA, 1590 bp, Muscodor strobelii
  misc_feature: SGI EST ID NO. CUFF.20654.0
  misc_feature: Variant of the nucleotide sequence at SEQ ID NO 8535
cgagcctgtgtgaagccgagggttgggaagctgctgagtgccgaaaggtagaaacaacggacatgtatcttactgatgaagatcgtgaaaaggcttttgaacaggtccgaaatctacgcgaatgggtacccgagctagacgtcaagatgttggatgccgaagaggcacaagagaaattcaaaacaaatacatatatcaaaggcgcgatatcatatacagcaggtgcgctgtggccttttcgattcgttagctgcgtgtggaaagacctacttgatagattcgagagcaacatttccttggaaacgaacacgcctgtaacaaaaattgaagcttctcccccattagcaacgaatcagtttgcctacatggtttcaacggagcgcggcatcatacgctgtaatcagatcgtacacgcgacgaatgggtttacgacgcagtttgtaccaggtttgaaaaacaaaatgaccggccttttagcgcacatgtctgcccagagaccgggtaaatcattcccggatagcaatggtgaacgatcttggtcagtcttctataatggatcgttcgactatgttactcagcgcccatctcatggcggtaagccgggggatattatgctcgggggcggtttctctaggtctgcaaacgatggaatgagcgccatcgggatctgggatgatagcagaatggacgcacttcccgttgcgcacataggcgggatattcccaaccatatttgagcctcgttggggagcggaggctgagggcggcaggatgaaaagcacctggtctggaatagtatgcgctacaggcgacctccacccatttgtcgggaaactagatccgaaattgaccgaacgggagtctagtatcaataatcaagcatccggcccgaaggctggagaatgggtagcggctggatattctggcgacggcatggtatgggcttggctctcgggcacggctgtgggtttaatgctcaacggtagcgaaaacgaagtcgttgtggggcagcctgggatgctcgatggtcgcctgtatgattggttcccaagagaacttgagccaacaataccaagattgaagaaagcaaacctggaaaacctccttgagctgttactttgagtactgacagtagtaagtaacatcgaccggaagtcgaagttgcattatatatatctaactagactcctacgcagagcttactcattgttacttataaaagaaagagcgaaatgtttacagagaagtacagagcctagaagtcttgtcctttttaggtgaatctgaatttcgtcaaagtaacgattggttagatgttctaccctgatgctagtctagctgtaaatcctagataccgaaaattacgcccttgcaggatagggctctcacttgatcgggacacaaacaaacatttactacgtggcgaagggacgtgcattaaccaccactttcctcacatagccctccttgagaaaaacaacaaagcatctcatcaaatgttagtcaaaccgactgaattcatcattccttgatctacgtcgtcgcaccggattttggtgtatgattcttcaatccctttgtatggtcacgg

SEQ ID NO: 8538 - DNA, 459 bp, Muscodor strobelii
  misc_feature: SGI cDNA ID NO. 562633
  misc_feature: Reduced expression when VOC is produced
  misc_feature: Encodes the peptide sequence at SEQ ID NO 8539
atggagccccgcgaccttccaaaggggtccatactagccctccccgaagcgccatccaatggcgataccacagaactcgccgtcggttcttcagtacgcttcgacgctctaggacccgttgtagtgaacgtcgatggctcactaagccgcatcgcaaactgggataagatgtcggcgatagaaaaggaaaatacatatagaatcataggaaaacgcaacgccgcacggcgtgcggtgcttctcgaacgtcaggagaaggagcagaaagagaatgatgcgaggcgtgaagaggctcttaaacttgcctctcatgacagcgaaagcaatgtcgcatctgggcagaccaccaacaaaatatctgaaaagtccgagccggctcaacctacacacacatcagacgccgcagaagcagaaccaaccggcctcgggaaactcgcatccgatatctacaaaaagtaa

SEQ ID NO: 8539 - protein, 152 aa, Muscodor strobelii
  misc_feature: SGI Peptide ID NO. 562633
  misc_feature (2)..(88): NCBI GI: 259482866 Blast Desc: TPA: conserved [Aspergillus nidulans FGSC A4]
  misc_feature (2)..(88): NCBI GI: 67528242 Blast Desc: AN4327.2 [Aspergillus nidulans FGSC A4] gi|40741298|gb|EAA60488.1| AN4327.2 [Aspergillus nidulans FGSC A4]
  misc_feature (12)..(89): NCBI GI: 261357131 Blast Desc: conserved [Verticillium albo-atrum VaMs.102]
  misc_feature (7)..(76): NCBI GI: 70994850 Blast Desc: conserved [Aspergillus fumigatus Af293] gi|66849836|gb|EAL90164.1| conserved [Aspergillus fumigatus Af293] gi|159124885|gb|EDP50002.1| conserved [Aspergillus A1163]
  misc_feature (11)..(76): NCBI GI: 119501276 Blast Desc: NFIA_109920 [Neosartorya fischeri NRRL 181] gi|119415560|gb|EAW25498.1| conserved [Neosartorya fischeri NRRL 181]
  misc_feature (12)..(91): NCBI GI: 169773981 Blast Desc: [Aspergillus oryzae RIB40] gi|83769320|dbj|BAE59457.1| protein product [Aspergillus oryzae]
  misc_feature (12)..(91): NCBI GI: 238492014 Blast Desc: conserved [Aspergillus flavus NRRL3357] gi|220697657|gb|EED53998.1| conserved [Aspergillus flavus NRRL3357]
  misc_feature (12)..(90): NCBI GI: 169619124 Blast Desc: SNOG_12755 [Phaeosphaeria nodorum SN15] gi|111058933|gb|EAT80053.1| SNOG_12755 [Phaeosphaeria nodorum SN15]
  misc_feature (11)..(92): NCBI GI: 145256500 Blast Desc: An04g00520 [Aspergillus niger] gi|134058319|emb|CAK38508.1| protein product [Aspergillus niger]
  misc_feature (12)..(82): NCBI GI: 121706506 Blast Desc: conserved [Aspergillus clavatus NRRL 1] gi|119399663|gb|EAW10089.1| conserved [Aspergillus clavatus NRRL 1]
  misc_feature: Useful for introducing or modulating the production of volatile compounds
MEPRDLPKGSILALPEAPSNGDTTELAVGSSVRFDALGPVVVNVDGSLSRIANWDKMSAIEKENTYRIIGKRNAARRAVLLERQEKEQKENDARREEALKLASHDSESNVASGQTTNKISEKSEPAQPTHTSDAAEAEPTGLGKLASDIYKK

SEQ ID NO: 8540 - DNA, 4312 bp, Muscodor strobelii
  misc_feature: SGI EST ID NO. CUFF.20989.0
  misc_feature: Variant of the nucleotide sequence at SEQ ID NO 8538
cgcaagagttagagatattgaagctacgctataaaaatttatcgtgacaggaaacatacaccattgaactttccttgtagaaccgggttaaagaggtgggtttggaaatggtaacatgagaaactgaaggtatctctcattgcagggattgctggtgaaacacgtgacctcatatcccagtccccaattcgtgaatgaataggtatcttaaattccagacatgataccaattcttcagaactcttgcgaattactcttattacgagaatcctgcaggtgaaatagcaaagggaatgtacatgcgcctatacacggctcactcgacccataacagagcttgggtgctggtgtagccacaggaaaacaagagaaggatccagaacaacctcacttagctcacctctcattcagcctcacaaacaccaatacctcaaccagtcaaacaaaaatgaaagcactgcggaacttaccacaaaacactatcccaagaagactaagaacaaataacactcgcctgccaagcttcaacaccacagcaccgcaacctctcacaggtcggtacgggcacccgaacagtggttcggcagtgaaaccaaacaagaccatggagccccgcgaccttccaaaggggtccatactagccctccccgaagcgccatccaatggcgataccacagaactcgccgtcggttcttcagtacgcttcgacgctctaggacccgttgtagtgaacgtcgatggctcactaagccgcatcgcaaactgggataagatgtcggcgatagaaaaggaaaatacatatagaatcataggaaaacgcaacgccgcacggcgtgcggtgcttctcgaacgtcaggagaaggagcagaaagagaatgatgcgaggcgtgaagaggctcttaaacttgcctctcatgacagcgaaagcaatgtcgcatctgggcagaccaccaacaaaatatctgaaaagtccgagccggctcaacctacacacacatcagacgccgcagaagcagaaccaaccggcctcgggaaactcgcatccgatatctacaaaaagtaacaaacgtgcaacgagcgaaggtaatgggtgtacttcaacaggtcacggccaatagaaatgaacccaaaataatagacagtgcgagctcctagacgcagaactacgaaaccagagtgtgagctaaagtaatagacttctgacttacagccttcttgtacaaataagatgttcgataagctccatgaggatagataaatcacgtattctaccactaaattcgtgctctgcctcttcctctatgtgtataccaacgtgccgaggatggtacctgcatgtgatatcaaagagcgcaggatactagttgactacgatctccacattatgttatcttacatgcataatgaacatacttcgagatgataagggttcaagcagtcggtaatagtaagccctgagccactattcaacccttcgtcgatagtagcctggtggtttgccaacttcaaatcatctgtcatatacatcgatacaaataagtagaccattgtgaggtagtcgcgggcagtatgttgctgccacatactatggtgtagtatatttcaggctcaaaagcctttcacttcagtataacatcaaaacaaatggatataaaacagataatccccgtcccaaatcagcccatccgaggactaggtaagctggtatacgtcccctcaaggcccccttgtaacgccgagtcctttatgatgatcgtgccgcgtaatactctcatatgtgagcattcgtacaaacatttacgtcgatgacggctcggccttagccaacttctcttttgcttctgcagacttttgtttatccaacatggatactattgattcgctcccgccgttcttttccataaccagctcgcgtagccatttgttctcggtttccagggactggacacggctctcgagggaaccaactttgtcactaagctccttctcgcgtttctcgagggcctgctcgcgggccttcttcttcacacggaagcgagcggaagcggcagtgtttcgccgacgcttatcctcttcagcgccaattcgttgctggtcttccaaagacagctggcggcgttggggaacgaagccagcgtcagatggcctcttgtctccagcggattgcatggatgatgcataggggctctgttgacttccagctgagtaacttggcgaggggtggatagggggcaaggtccccaagttgtctgagaagctattcacatttggcgtcggatactgctgaaagtcgaagccattgaagtcgcctgaagtcatgacgcaaggttagaccgccgttatatgatcgattgagaaaacatgaggtaaacgacgctatgaggtatgtactgaggtgctaaagactatcgatgacgacttcgtcggtagtagaaataatggaaagtttaaattcaacggcccgcctcatggcgcagtcgaggttgaacgtgaacatcgttcgtaaagcatatggctgtcaaagtccctgatatggcctatcacctcaagatcacaggcgattgcaccatcaggtcgatggcgcaatagcatgctattctgtcgactgcgactagaccggggtagaccccccacgcgagaacgacgctgaccaatgagcagccgcacgccggggagaggcgcccgctggcttgcggactgagtggagtctgctgataggtggccgccagatggcggatgcagtctcgaaagtgcagaactcaactgaccacgagagccacagtgatgactgcgctgctgcaccgcgtaatctgtcgcaatctctcgccttcgaggcctattctcaaaagagcattgagattcgtccgtccgaggctccactcggctcggatagattgcagagaagaatcagggtcctgtttgtgcagtggcctagtaggagcagaatgatagagttaaggagaagatatagaggggttgcaattggcttgcatcccgtgcaatgtgcagggatctgtcacaggccttgagaccatgactgctcgatgactgcgacattgcgggggatgtaagaagacaagaacgccatgtaagagcatagccaagcgtttcaaaagcaataaaaggtagtgagaaaatacaagcaaggacaattcaacaacataatcgacaaaacaagcttcttgcaacactgacctcccatgttgaagtcgaagttcaactctcctatgccttgttcaccaggcagtcggtctgatggtgatgtggtcagagacgtagtctcgctctcgatgctggtggacggcggatgaacgctactatgcgacatctccaggtcccagtctgtgaattgagtattggtgaacatggccagctcgtcttcgaggtttggcgggttatcatcgcgctgcggtatgggatcaggaattcggttgagatcttgcagcaattgcgacacattcgcgggtcctccccgtcgccccgggtagcccgacatgatggctctgatttctctttctcgagaagatagcgtatttattttaacacgacggtattcgatgccaaccctggtcctattgatgccggcgtggcgattgaacgatcaatctctcgcagtttcgacttcggctccctcaaaaatcggcctttctgtcgatgtgttgttcagcatcaacaccctgattcgatattcggttgatcgcagtccgatttgataaatccggctgtagaattatgttgtggtggcaggtggaatgttgaaaatggtaaaagtcgagtcgtgggcgtgagtggtgaagtcagtgttgtgtgatttgctctggtggtaaagaatagagggggcatcgggttggaggacttggaccggagtgggatgttcaatagaaaatagcgctcagatggtgctaatggaatgcacagtggtgccagtgtctgaccattggttcaatgaaagacttcggtgggacatgcgccagagtgtttctaatcagagagcatgtgcagaccccgcccattttaccggtttttgctcgtatgtggctaagcaggtaccttggcgacgcccgctagaatcgtgggctgaagtggggtggatttacagagtgctgacgcttgccttacgttttctctgctgttgccgattcctatgggatgcatagtgatgtttattcttaggtgcaacgttctcgaatacaaatcctacatacaggctatctattcgttgttttcagattttccattgggagcaagacttcgatgtatttcccatacttgcaaagatgcctctcggaatctactaccgcatgtggcacca

SEQ ID NO: 8541 - DNA, 813 bp, Muscodor strobelii
  misc_feature: SGI cDNA ID NO. 562634
  misc_feature: Encodes the peptide sequence at SEQ ID NO 8542
atgtcgggctacccggggcgacggggaggacccgcgaatgtgtcgcaattgctgcaagatctcaaccgaattcctgatcccataccgcagcgcgatgataacccgccaaacctcgaagacgagctggccatgttcaccaatactcaattcacagactgggacctggagatgtcgcatagtagcgttcatccgccgtccaccagcatcgagagcgagactacgtctctgaccacatcaccatcagaccgactgcctggtgaacaaggcataggagagttgaacttcgacttcaacatgggaggcgacttcaatggcttcgactttcagcagtatccgacgccaaatgtgaatagcttctcagacaacttggggaccttgccccctatccacccctcgccaagttactcagctggaagtcaacagagcccctatgcatcatccatgcaatccgctggagacaagaggccatctgacgctggcttcgttccccaacgccgccagctgtctttggaagaccagcaacgaattggcgctgaagaggataagcgtcggcgaaacactgccgcttccgctcgcttccgtgtgaagaagaaggcccgcgagcaggccctcgagaaacgcgagaaggagcttagtgacaaagttggttccctcgagagccgtgtccagtccctggaaaccgagaacaaatggctacgcgagctggttatggaaaagaacggcgggagcgaatcaatagtatccatgttggataaacaaaagtctgcagaagcaaaagagaagttggctaaggccgagccgtcatcgacgtaa

SEQ ID NO: 8542 - protein, 270 aa, Muscodor strobelii
  misc_feature: SGI Peptide ID NO. 562634
  misc_feature (175)..(228): Pfam Id: PF07716 Pfam Desc: Basic region leucine zipper
  misc_feature (1)..(260): NCBI GI: 171690026 Blast Desc: protein product [Podospora anserina] gi|170944968|emb|CAP71079.1| protein product [Podospora anserina]
  misc_feature (1)..(249): NCBI GI: 256732975 Blast Desc: NECHADRAFT_99958 [Nectria haematococca mpVI 77-13-4]
  misc_feature (1)..(249): NCBI GI: 46121585 Blast Desc: FG05171.1 [Gibberella zeae PH-1]
  misc_feature (3)..(252): NCBI GI: 156043879 Blast Desc: SS1G_10943 [Sclerotinia sclerotiorum 1980] gi|154695330|gb|EDN95068.1| SS1G_10943 [Sclerotinia sclerotiorum 1980]
  misc_feature (10)..(253): NCBI GI: 116200129 Blast Desc: CHGG_08220 [Chaetomium globosum CBS 148.51] gi|88179499|gb|EAQ86967.1| CHGG_08220 [Chaetomium globosum CBS 148.51]
  misc_feature (9)..(250): NCBI GI: 164427476 Blast Desc: NCU03536 [Neurospora crassa OR74A] gi|157071758|gb|EAA27579.2| [Neurospora crassa OR74A]
  misc_feature (1)..(256): NCBI GI: 189196708 Blast Desc: regulatory protein cys-3 [Pyrenophora tritici-repentis Pt-1C-BFP] gi|187980571|gb|EDU47197.1| regulatory protein cys-3 [Pyrenophora tritici-repentis Pt-1C-BFP]
  misc_feature (101)..(250): NCBI GI: 118126 Blast Desc: CYS3_NEUCR RecName: Full=Regulatory protein cys-3 gi|168808|gb|AAA33585.1| cys-3 [Neurospora crassa] gi|9368577|emb|CAB98237.1| regulatory protein cys-3 [Neurospora
  misc_feature (1)..(259): NCBI GI: 169603910 Blast Desc: SNOG_04964 [Phaeosphaeria nodorum SN15] gi|160706476|gb|EAT87355.2| SNOG_04964 [Phaeosphaeria nodorum SN15]
  misc_feature (1)..(243): NCBI GI: 67528326 Blast Desc: AN4361.2 [Aspergillus nidulans FGSC A4] gi|5051964|gb|AAD38380.1|AF148535_1 positive sulphur transcription regulator METR [Emericella nidulans] AN4361.2 FGSC
MSGYPGRRGGPANVSQLLQDLNRIPDPIPQRDDNPPNLEDELAMFTNTQFTDWDLEMSHSSVHPPSTSIESETTSLTTSPSDRLPGEQGIGELNFDFNMGGDFNGFDFQQYPTPNVNSFSDNLGTLPPIHPSPSYSAGSQQSPYASSMQSAGDKRPSDAGFVPQRRQLSLEDQQRIGAEEDKRRRNTAASARFRVKKKAREQALEKREKELSDKVGSLESRVQSLETENKWLRELVMEKNGGSESIVSMLDKQKSAEAKEKLAKAEPSST

SEQ ID NO: 8543 - DNA, 3486 bp, Muscodor strobelii
  misc_feature: SGI EST ID NO. CUFF.20990.1
  misc_feature: Variant of the nucleotide sequence at SEQ ID NO 8541
tggtgccacatgcggtagtagattccgagaggcatctttgcaagtatgggaaatacatcgaagtcttgctcccaatggaaaatctgaaaacaacgaatagatagcctgtatgtaggatttgtattcgagaacgttgcacctaagaataaacatcactatgcatcccataggaatcggcaacagcagagaaaacgtaaggcaagcgtcagcactctgtaaatccaccccacttcagcccacgattctagcgggcgtcgccaaggtacctgcttagccacatacgagcaaaaaccggtaaaatgggcggggtctgcacatgctctctgattagaaacactctggcgcatgtcccaccgaagtctttcattgaaccaatggtcagacactggcaccactgtgcattccattagcaccatctgagcgctattttctattgaacatcccactccggtccaagtcctccaacccgatgccccctctattctttaccaccagagcaaatcacacaacactgacttcaccactcacgcccacgactcgacttttaccattttcaacattccacctgccaccacaacataattctacagccggatttatcaaatcggactgcgatcaaccgaatatcgaatcagggtgttgatgctgaacaacacatcgacagaaaggccgatttttgagggagccgaagtcgaaactgcgagagattgatcgttcaatcgccacgccggcatcaataggaccagggttggcatcgaataccgtcgtgttaaaataaatacgctatcttctcgagaaagagaaatcagagccatcatgtcgggctacccggggcgacggggaggacccgcgaatgtgtcgcaattgctgcaagatctcaaccgaattcctgatcccataccgcagcgcgatgataacccgccaaacctcgaagacgagctggccatgttcaccaatactcaattcacagactgggacctggagatgtcgcatagtagcgttcatccgccgtccaccagcatcgagagcgagactacgtctctgaccacatcaccatcagaccgactgcctggtgaacaaggcataggagagttgaacttcgacttcaacatgggaggcgacttcaatggcttcgactttcagcagtatccgacgccaaatgtgaatagcttctcagacaacttggggaccttgccccctatccacccctcgccaagttactcagctggaagtcaacagagcccctatgcatcatccatgcaatccgctggagacaagaggccatctgacgctggcttcgttccccaacgccgccagctgtctttggaagaccagcaacgaattggcgctgaagaggataagcgtcggcgaaacactgccgcttccgctcgcttccgtgtgaagaagaaggcccgcgagcaggccctcgagaaacgcgagaaggagcttagtgacaaagttggttccctcgagagccgtgtccagtccctggaaaccgagaacaaatggctacgcgagctggttatggaaaagaacggcgggagcgaatcaatagtatccatgttggataaacaaaagtctgcagaagcaaaagagaagttggctaaggccgagccgtcatcgacgtaaatgtttgtacgaatgctcacatatgagagtattacgcggcacgatcatcataaaggactcggcgttacaagggggccttgaggggacgtataccagcttacctagtcctcggatgggctgatttgggacggggattatctgttttatatccatttgttttgatgttatactgaagtgaaaggcttttgagcctgaaatatactacaccatagtatgtggcagcaacatactgcccgcgactacctcacaatggtctacttatttgtatcgatgtatatgacagatgatttgaagttggcaaaccaccaggctactatcgacgaagggttgaatagtggctcagggcttactattaccgactgcttgaacccttatcatctcgaagtatgttcattatgcatgtaagataacataatgtggagatcgtagtcaactagtatcctgcgctctttgatatcacatgcaggtaccatcctcggcacgttggtatacacatagaggaagaggcagagcacgaatttagtggtagaatacgtgatttatctatcctcatggagcttatcgaacatcttatttgtacaagaaggctgtaagtcagaagtctattactttagctcacactctggtttcgtagttctgcgtctaggagctcgcactgtctattattttgggttcatttctattggccgtgacctgttgaagtacacccattaccttcgctcgttgcacgtttgttactttttgtagatatcggatgcgagtttcccgaggccggttggttctgcttctgcggcgtctgatgtgtgtgtaggttgagccggctcggacttttcagatattttgttggtggtctgcccagatgcgacattgctttcgctgtcatgagaggcaagtttaagagcctcttcacgcctcgcatcattctctttctgctccttctcctgacgttcgagaagcaccgcacgccgtgcggcgttgcgttttcctactaagaggttgttagtatagcattggatgagacgagatgagatgagatgtagtgccatactgattctatatgtattttccttttctatcgccgacatcttatcccagtttgcgatgcggcttagtgagccatcgacgttcactacaacgggtcctagagcgtcgaagcgtactgaagaaccgacggcgagttctgtggtatcgccattggatggcgcttcggggagggctagtatggacccctttggaaggtcgcggggctccatggtcttgtttggtttcactgccgaaccactgttcgggtgcccgtaccgacctgtgagaggttgcggtgctgtggtgttgaagcttggcaggcgagtgttatttgttcttagtcttcttgggatagtgttttgtggtaagttccgcagtgctttcatttttgtttgactggttgaggtattggtgtttgtgaggctgaatgagaggtgagctaagtgaggttgttctggatccttctcttgttttcctgtggctacaccagcacccaagctctgttatgggtcgagtgagccgtgtataggcgcatgtacattccctttgctatttcacctgcaggattctcgtaataagagtaattcgcaagagttctgaagaattggtatcatgtctggaatttaagatacctattcattcacgaattggggactgggatatgaggtcacgtgtttcaccagcaatccctgcaatgagagataccttcagtttctcatgttaccatttccaaacccacctctttaacccggttctacaaggaaagttcaatggtgtatgtttcctgtcacgataaatttttatagcgtagcttcaatatctctaactcttgcg

SEQ ID NO: 8544 - DNA, 1269 bp, Muscodor strobelii
  misc_feature: SGI cDNA ID NO. 562635
  misc_feature: Encodes the peptide sequence at SEQ ID NO 8545
atgaaggccaatgctctactcgccttgtcggcgtcactggctggtgcaagtgaactgaacttcgacttcccttacaacgcgaccgcgcctgttccttacgaaatctcggtcaacccaagtattatcgaagaagcgcggctcaaagcgagcctctatcgaccatcgattgatctcaaggatggagatgtggtcaacgcaggatggctagagggccctccacgagagaatatgacggcgcttgcaaaatactgggccgaagactacgattggaacaaagcacaggaagagatcaacggaaatttttctcactttgcagttacccttccttccggcagcgctggcgattataagcatacggttccgttgcacttcattcacgaacgaagcgagtccccagacgcgataccgataatcctccttcatggctggccatccacttctcgcgaatggttcaaagtcatcgagccgctacgagactcaagcacacagcctttccatgtcgttgtccctgacttaccaggcttcggtttcagtcctgcctcaacctactctggcatgaacgctgctgaaatcggcgatgcgatgaatagcctcatgatctccctcggatacgataaatacggcattgcctgcacagacttcggttggttcatcggcctcttcatgggtggccggtccccagacaacgtcctcggtctgttctctgacttctggctcatttcaccgaatgccaccgatctcgagaggcgcgcgaacaatcagacaaccgaggaagagacgttatacacggacgcaattttagatttcgagactaatcattttagttatgcggccgcacatgaacaaactccattagcaatggcacaagcaatgacagatacgccagtaggatttgcaggctggatatggcatttggtgcattgggtttatgatggataccaatacacctttgacgaactcatcaccaacacgttgactctctggattcaaggcacatatggcaacatttattcatataaggaggcgctgccacatgcctcggaaatcatgttcgtcaaggtacccaccggtgcgagcgtatggggcaatacgaatggcccccttaagtctctaggctacgctcaattaactcctcgatcatggatagagcgcatggtgaacttaaccttttactcgaaacatgaacacggcggtcacttcccggcaatgactgagccagagctctggaccgcggacgtagtggaattcttcaagagcttggtgaactga

SEQ ID NO: 8545 - protein, 422 aa, Muscodor strobelii
  misc_feature: SGI Peptide ID NO. 562635
  misc_feature (31)..(154): Pfam Id: PF06441 Pfam Desc: Epoxide hydrolase N terminus
  misc_feature (165)..(236): Pfam Id: PF00561 Pfam Desc: alpha/beta hydrolase fold
  misc_feature (122)..(154): Pfam Id: PF06441 Pfam Desc: Epoxide hydrolase N terminus
  misc_feature (29)..(420): NCBI GI: 46115782 Blast Desc: FG03733.1 [Gibberella zeae PH-1]
  misc_feature (13)..(420): NCBI GI: 46139055 Blast Desc: FG11042.1 [Gibberella zeae PH-1]
  misc_feature (7)..(343): NCBI GI: 169781258 Blast Desc: [Aspergillus oryzae RIB40] gi|83773834|dbj|BAE63959.1| protein product [Aspergillus oryzae]
  misc_feature (7)..(343): NCBI GI: 238501112 Blast Desc: epoxide hydrolase, [Aspergillus flavus NRRL3357] gi|220692027|gb|EED48374.1| epoxide hydrolase, [Aspergillus flavus NRRL3357]
  misc_feature (5)..(416): NCBI GI: 256735680 Blast Desc: NECHADRAFT_75778 [Nectria haematococca mpVI 77-13-4]
  misc_feature (30)..(417): NCBI GI: 256723473 Blast Desc: NECHADRAFT_5165 [Nectria haematococca mpVI 77-13-4]
  misc_feature (65)..(420): NCBI GI: 262201134 Blast Desc: Epoxide hydrolase domain protein [Gordonia bronchialis DSM 43247] gi|262084481|gb|ACY20449.1| Epoxide hydrolase domain protein [Gordonia bronchialis DSM 43247]
  misc_feature (62)..(422): NCBI GI: 271966432 Blast Desc: hydrolase [Streptosporangium roseum DSM 43021] gi|270509607|gb|ACZ87885.1| hydrolase [Streptosporangium roseum DSM 43021]
  misc_feature (65)..(418): NCBI GI: 15894007 Blast Desc: epoxide hydrolase [Clostridium acetobutylicum ATCC 824] gi|15023600|gb|AAK78696.1|AE007587_4 Epoxide hydrolase, similar to eukaryotic [Clostridium acetobutylicum ATCC 824]
  misc_feature (159)..(416): NCBI GI: 156062760 Blast Desc: SS1G_01496 [Sclerotinia sclerotiorum 1980] gi|154696832|gb|EDN96570.1| SS1G_01496 [Sclerotinia sclerotiorum 1980]
  misc_feature (77)..(420): SWISSPROT Homolog: EC 3.3.2.9 Microsomal epoxide hydrolase
MKANALLALSASLAGASELNFDFPYNATAPVPYEISVNPSIIEEARLKASLYRPSIDLKDGDVVNAGWLEGPPRENMTALAKYWAEDYDWNKAQEEINGNFSHFAVTLPSGSAGDYKHTVPLHFIHERSESPDAIPIILLHGWPSTSREWFKVIEPLRDSSTQPFHVVVPDLPGFGFSPASTYSGMNAAEIGDAMNSLMISLGYDKYGIACTDFGWFIGLFMGGRSPDNVLGLFSDFWLISPNATDLERRANNQTTEEETLYTDAILDFETNHFSYAAAHEQTPLAMAQAMTDTPVGFAGWIWHLVHWVYDGYQYTFDELITNTLTLWIQGTYGNIYSYKEALPHASEIMFVKVPTGASVWGNTNGPLKSLGYAQLTPRSWIERMVNLTFYSKHEHGGHFPAMTEPELWTADVVEFFKSLVN

SEQ ID NO: 8546 - DNA, 917 bp, Muscodor strobelii
  misc_feature: SGI EST ID NO. CUFF.20672.0
  misc_feature: Variant of the nucleotide sequence at SEQ ID NO 8544
cgaatggcccccttaagtctctaggctacgctcaattaactcctcgatcatggatagagcgcatggtgaacttaaccttttactcgaaacatgaacacggcggtcacttcccggcaatgactgagccagagctctggaccgcggacgtagtggaattcttcaagagcttggtgaactgaagaacggttggatctcaatgaagaagtagaggttcttttggagtaacatcatcctgataaaccaagactcttctaaatatatatcgtgtatttatctatcaagtgtaattttacatattgttttagtccataggttcaactaacagtactctaaggggcagcatcatacttgcaatttcctcgcttactcgcacttacaaagtggccccggaaaaagaccaaggaatggttaaccacagtgtgtcatgagtccaatgttgaccttcactatagaatcgctcatttcgatgctagatggtactcatcttgagcctgtatatagatatgatatttactcctcatacagatactatctctgcctctggatgtctcacatattgaggttgtcgaggcttacaaagcagtatggttcttttgtgatttgtaacctagacgcttgtacatacagccgtaaattccgacggacttggtctgccgtctcacctaccttagctccatatgcgacccaacagagtattcccagggcacaacagatatcgtgttagctgctatcacgacctattcagaccgtcttaggttaactccagccgagggttccgcgtcccaactcatagggatgcagttagttgcggaagacaacataagctcatatattgcaacagcggtgagcaccagcgtgaataggttaacattggtggttatgataaatccataatgtgatatataggaggtaaaaat

SEQ ID NO: 8547 - DNA, 384 bp, Muscodor strobelii
  misc_feature: SGI cDNA ID NO. 562636
  misc_feature: Encodes the peptide sequence at SEQ ID NO 8548
atgccccttgacgacatcgaagaggcagcaagccaatacgcggccatatcgtctgagcccgagaacattcccaccagtctcgaatttaacgagagtctcagttatatccgactactcgatctcagcgaccaaggaaacggcaaattagagcttactaaacattatctatacgatgtcaagtatcacttcgtggctgtttcgcacagttggaccaaggccacaaaacctgagaatatcggtagtatcggctctttcctcattcctgaagacctacataagctcatacgtcaacttcgagagatacagtccgtcgttgaacaggatctagaaggctatggacttcacttcatgggcttctgggtcgacgcattatgcatcaactag

SEQ ID NO: 8548 - protein, 127 aa, Muscodor strobelii
  misc_feature: SGI Peptide ID NO. 562636
MPLDDIEEAASQYAAISSEPENIPTSLEFNESLSYIRLLDLSDQGNGKLELTKHYLYDVKYHFVAVSHSWTKATKPENIGSIGSFLIPEDLHKLIRQLREIQSVVEQDLEGYGLHFMGFWVDALCIN

SEQ ID NO: 8549 - DNA, 2745 bp, Muscodor strobelii
  misc_feature: SGI cDNA ID NO. 562637
  misc_feature: Encodes the peptide sequence at SEQ ID NO 8550
atgtatgtcaagaagcgtgatggccgccaggagcgcgtccaattcgacaagattactgctcgtgtctcgcgcttatgttacggcctcgaccccgaacatgtcgaccctgttgctatcacccagaaggtgatctctggtgtctatggaggtgtcaccacagtccagctcgacgacttggccgcagagacagctgcatacatgactgtcacccacccagactatgccgtcctggctgcacgtatcgccgtgtccaacctccacaagcagaccaagaagcaatggtcgtctgttgtcagcgatctgtaccactacatcaatcccaagaacaaccgaccgtcgcccatgatcgcccaggacacatacgactgcgtcatgagacacaaggaggagtttgactccgccatcgtctacgatcgcgacttcaactaccagtacttcggcttcaagacgctagagcggtcttacctcctcaagctcaatggcaagatcgtcgagagaccccagcacatgatcatgcgtgttgctgtcggtatctggggcgacaacgtcgagagagtcatcgagacatacaactacatgtccaacaaattcttcacacatgcctcccccacactcttcaacgccggcacgccccaggcccagctgtcctcctgctttttggtcgacatgaaagacgacagtatcgatggcatctacgacaccctgaagacatgcgctatgatctcaaagatggccggtggaattggcttgaacgtccaccgtattcgcgccactggctcctacatcgccggcacgaacggcacctccaatggtatcgttcctatgcttcgtgtcttcaacaacaccgcccgctacgttgaccagggtggcaacaagaggccgggtgcttttgccatctacctcgagccttggcactctgacgtctttgagttcttggatctccgcaagaaccacggaaaggaagaagtccgcgctcgtgatctcttccttgccctgtggatccctgatctattcatgaagcgtgtccaagccaacaccgactggacactcatgtgccccaacgagtgccctggtcttgctgatgtctatggcgatgagttcgaggctctttacaccaagtacgagaaagagggcaaaggacgtgccacgattcgcgcccaaaagctctggtatgccattctcgaagcccagaccgagaccggaaaccccttcatgctctacaaggaccatgccaaccgcaagagcaaccagaagaatctgggcaccatccgcagctccaacctctgtaccgagatcatcgagtactctgcccctgacgaggtcgctgtctgcaacttggcatcattggctctcccgtccttcgttgactacgagaacgagacgtacaacttccagaagttgcacgaggttactcaggtcgttgttcgcaatttgaacaagatcatcgaagtcaactactacccagtcatcgaggcacgaaacagcaacatgcgtcacagacctattggtcttggtgtgcagggtcttgctgatgccttcctcgctcttcgcatgccctttgagtctgagcaggccaagcaattaaacaagcagatcttcgagacaatctaccatgctgctttgactgcatctatggagattgctaaggaccagggaccttacgagacttacaagggctctccggcttcgcagggtattctccagtatgacatgtggaatgtcactcccacagagctttgggactgggcttccctcaaggagcagattgccaagcatggtctccgcaacagtctgttggtcgcccctatgcccacagccagtacctcgcagatcctgggcaacaacgaatgcttcgagccctacacctcgaacatttattcccgtcgtgtccttgctggtgaattccaggttgtcaacccttggcttctgagagacctggtggacatgggactttggtctgacaacatgaagaaccacatcatcgctgctggtggatccatccaaggcattcccagtatccccgatgatatcaaggctctctacaagactgtgtgggaaatctcacagaagaaggtcattgagatggctgctgaccgtggcgctttcatcgatcagtcacaatctctcaacattcacatgagagatcctaccatgggcaagatcactagcatgcacttcgccggctggaaacttggtctcaagacaggcatgtactacttgcgaacgcaagctgcggcccagcccatccagtttactgtcgaccaggaagccctcaaggtcgttgaatcagctaccgctagacccggtacgttgaagaagcgtgctcctccctcaggctctggcggttatgtctcttcatcgtccgttgccgcccctcgaccctacgctaagcgcgaggattctgcacccgcaatcagtgtggcagtcagcgtggcagctggtggagtccccacgcccagcgctactccccctccggttcaagagctcaagcccaaacgacccattgcgcccgcacagttcacagccgatgtagcagagggtgagagcccgaaggcattacctactgaaccggctgaaaagccaaaggacgagcagctcccagaggccgcacttgaggatgagaaggctgctcaagatgaggacaagaaggacgagagtaaatctcgtgagtacgatatatacaatgatgctgttctagcttgcagtatcgagaacccagaggagtgcatcatgtgcagtggttaa

SEQ ID NO: 8550 - protein, 914 aa, Muscodor strobelii
  misc_feature: SGI Peptide ID NO. 562637
  misc_feature (1)..(91): Pfam Id: PF03477 Pfam Desc: ATP cone domain
  misc_feature (215)..(744): Pfam Id: PF02867 Pfam Desc: Ribonucleotide reductase, barrel domain
  misc_feature (141)..(213): Pfam Id: PF00317 Pfam Desc: Ribonucleotide reductase, all-alpha domain
  misc_feature (1)..(914): NCBI GI: 116200095 Blast Desc: ribonucleoside-diphosphate reductase large chain [Chaetomium globosum CBS 148.51] gi|88179482|gb|EAQ86950.1| ribonucleoside-diphosphate reductase large chain [Chaetomium CBS
  misc_feature (1)..(914): NCBI GI: 39978231 Blast Desc: MGG_07000 [Magnaporthe grisea 70-15] gi|145013418|gb|EDJ98059.1| MGG_07000 [Magnaporthe grisea 70-15]
  misc_feature (1)..(914): NCBI GI: 261352974 Blast Desc: ribonucleoside-diphosphate reductase large chain [Verticillium albo-atrum VaMs.102]
  misc_feature (7)..(914): NCBI GI: 171690020 Blast Desc: protein product [Podospora anserina] gi|170944965|emb|CAP71076.1| protein product [Podospora anserina]
  misc_feature (1)..(914): NCBI GI: 256732531 Blast Desc: [Nectria haematococca mpVI 77-13-4]
  misc_feature (1)..(914): NCBI GI: 46121591 Blast Desc: FG05174.1 [Gibberella zeae PH-1]
  misc_feature (1)..(914): NCBI GI: 103488896 Blast Desc: ribonucleotide reductase large subunit [Neurospora crassa]
  misc_feature (1)..(914): NCBI GI: 85081938 Blast Desc: ribonucleoside-diphosphate reductase large chain [Neurospora crassa OR74A] gi|30316299|sp|Q9UW15.2|RIR1_NEUCR RecName: Full=Ribonucleoside-diphosphate reductase large chain; -
  misc_feature (1)..(914): NCBI GI: 5733808 Blast Desc: ribonucleotide reductase large subunit [Neurospora crassa]
  misc_feature (1)..(914): NCBI GI: 156043867 Blast Desc: ribonucleotide reductase large subunit [Sclerotinia sclerotiorum 1980] gi|154695324|gb|EDN95062.1| ribonucleotide reductase large subunit [Sclerotinia sclerotiorum 1980]
  misc_feature (1)..(914): SWISSPROT Homolog: EC 1.17.4.1 Ribonucleoside-diphosphate reductase
MYVKKRDGRQERVQFDKITARVSRLCYGLDPEHVDPVAITQKVISGVYGGVTTVQLDDLAAETAAYMTVTHPDYAVLAARIAVSNLHKQTKKQWSSVVSDLYHYINPKNNRPSPMIAQDTYDCVMRHKEEFDSAIVYDRDFNYQYFGFKTLERSYLLKLNGKIVERPQHMIMRVAVGIWGDNVERVIETYNYMSNKFFTHASPTLFNAGTPQAQLSSCFLVDMKDDSIDGIYDTLKTCAMISKMAGGIGLNVHRIRATGSYIAGTNGTSNGIVPMLRVFNNTARYVDQGGNKRPGAFAIYLEPWHSDVFEFLDLRKNHGKEEVRARDLFLALWIPDLFMKRVQANTDWTLMCPNECPGLADVYGDEFEALYTKYEKEGKGRATIRAQKLWYAILEAQTETGNPFMLYKDHANRKSNQKNLGTIRSSNLCTEIIEYSAPDEVAVCNLASLALPSFVDYENETYNFQKLHEVTQVVVRNLNKIIEVNYYPVIEARNSNMRHRPIGLGVQGLADAFLALRMPFESEQAKQLNKQIFETIYHAALTASMEIAKDQGPYETYKGSPASQGILQYDMWNVTPTELWDWASLKEQIAKHGLRNSLLVAPMPTASTSQILGNNECFEPYTSNIYSRRVLAGEFQVVNPWLLRDLVDMGLWSDNMKNHIIAAGGSIQGIPSIPDDIKALYKTVWEISQKKVIEMAADRGAFIDQSQSLNIHMRDPTMGKITSMHFAGWKLGLKTGMYYLRTQAAAQPIQFTVDQEALKVVESATARPGTLKKRAPPSGSGGYVSSSSVAAPRPYAKREDSAPAISVAVSVAAGGVPTPSATPPPVQELKPKRPIAPAQFTADVAEGESPKALPTEPAEKPKDEQLPEAALEDEKAAQDEDKKDESKSREYDIYNDAVLACSIENPEECIMCSG

SEQ ID NO: 8551 - DNA, 3335 bp, Muscodor strobelii
  misc_feature: SGI EST ID NO. CUFF.20726.0
  misc_feature: Variant of the nucleotide sequence at SEQ ID NO 8549
ggcgaagggtgtcttttgctcaagttctatctcatacatcaccaaccaaccaacgaaacaatcaggtcggcgacaagtcttgccttcttttcttttgatacccccatagctgagactgttggttgtctcgaattgatcactacaatcttcaatagtgccattgtaactgtacaataatccaatttttcaacctcgccgtcttgagtccacatccaccctcctctctctatattccatcgggtcatacaacccacgcgtcaagatgtatgtcaagaagcgtgatggccgccaggagcgcgtccaattcgacaagattactgctcgtgtctcgcgcttatgttacggcctcgaccccgaacatgtcgaccctgttgctatcacccagaaggtgatctctggtgtctatggaggtgtcaccacagtccagctcgacgacttggccgcagagacagctgcatacatgactgtcacccacccagactatgccgtcctggctgcacgtatcgccgtgtccaacctccacaagcagaccaagaagcaatggtcgtctgttgtcagcgatctgtaccactacatcaatcccaagaacaaccgaccgtcgcccatgatcgcccaggacacatacgactgcgtcatgagacacaaggaggagtttgactccgccatcgtctacgatcgcgacttcaactaccagtacttcggcttcaagacgctagagcggtcttacctcctcaagctcaatggcaagatcgtcgagagaccccagcacatgatcatgcgtgttgctgtcggtatctggggcgacaacgtcgagagagtcatcgagacatacaactacatgtccaacaaattcttcacacatgcctcccccacactcttcaacgccggcacgccccaggcccagctgtcctcctgctttttggtcgacatgaaagacgacagtatcgatggcatctacgacaccctgaagacatgcgctatgatctcaaagatggccggtggaattggcttgaacgtccaccgtattcgcgccactggctcctacatcgccggcacgaacggcacctccaatggtatcgttcctatgcttcgtgtcttcaacaacaccgcccgctacgttgaccagggtggcaacaagaggccgggtgcttttgccatctacctcgagccttggcactctgacgtctttgagttcttggatctccgcaagaaccacggaaaggaagaagtccgcgctcgtgatctcttccttgccctgtggatccctgatctattcatgaagcgtgtccaagccaacaccgactggacactcatgtgccccaacgagtgccctggtcttgctgatgtctatggcgatgagttcgaggctctttacaccaagtacgagaaagagggcaaaggacgtgccacgattcgcgcccaaaagctctggtatgccattctcgaagcccagaccgagaccggaaaccccttcatgctctacaaggaccatgccaaccgcaagagcaaccagaagaatctgggcaccatccgcagctccaacctctgtaccgagatcatcgagtactctgcccctgacgaggtcgctgtctgcaacttggcatcattggctctcccgtccttcgttgactacgagaacgagacgtacaacttccagaagttgcacgaggttactcaggtcgttgttcgcaatttgaacaagatcatcgaagtcaactactacccagtcatcgaggcacgaaacagcaacatgcgtcacagacctattggtcttggtgtgcagggtcttgctgatgccttcctcgctcttcgcatgccctttgagtctgagcaggccaagcaattaaacaagcagatcttcgagacaatctaccatgctgctttgactgcatctatggagattgctaaggaccagggaccttacgagacttacaagggctctccggcttcgcagggtattctccagtatgacatgtggaatgtcactcccacagagctttgggactgggcttccctcaaggagcagattgccaagcatggtctccgcaacagtctgttggtcgcccctatgcccacagccagtacctcgcagatcctgggcaacaacgaatgcttcgagccctacacctcgaacatttattcccgtcgtgtccttgctggtgaattccaggttgtcaacccttggcttctgagagacctggtggacatgggactttggtctgacaacatgaagaaccacatcatcgctgctggtggatccatccaaggcattcccagtatccccgatgatatcaaggctctctacaagactgtgtgggaaatctcacagaagaaggtcattgagatggctgctgaccgtggcgctttcatcgatcagtcacaatctctcaacattcacatgagagatcctaccatgggcaagatcactagcatgcacttcgccggctggaaacttggtctcaagacaggcatgtactacttgcgaacgcaagctgcggcccagcccatccagtttactgtcgaccaggaagccctcaaggtcgttgaatcagctaccgctagacccggtacgttgaagaagcgtgctcctccctcaggctctggcggttatgtctcttcatcgtccgttgccgcccctcgaccctacgctaagcgcgaggattctgcacccgcaatcagtgtggcagtcagcgtggcagctggtggagtccccacgcccagcgctactccccctccggttcaagagctcaagcccaaacgacccattgcgcccgcacagttcacagccgatgtagcagagggtgagagcccgaaggcattacctactgaaccggctgaaaagccaaaggacgagcagctcccagaggccgcacttgaggatgagaaggctgctcaagatgaggacaagaaggacgagagtaaatctcgtgagtacgatatatacaatgatgctgttctagcttgcagtatcgagaacccagaggagtgcatcatgtgcagtggttaatgacaatgattagtataagttgcaatgacatgtgatgatgatggattataaatatgtaatgattaaaacaaacaacctgcttgggttaaagagcagacacatggactgccgtgtcgggttcctcaggaggaacgagcgacaactagttctatggcagcggattgtattactttgaggagtactatttaggcatattgctgaatttctttgaaagatcaatgcgtggctttctatttgagtgaagggaaattgaatttagtttttgagtgacgtggtaagtatagggttgaagatcgtggaatgcgagtatagaagtgctattcaagcg

SEQ ID NO: 8552 - DNA, 2061 bp, Muscodor strobelii
  misc_feature: SGI cDNA ID NO. 562638
  misc_feature: Encodes the peptide sequence at SEQ ID NO 8553
atggagcgctcggcgcgcacatggctaagctcttcgggcgcgcgagcctgttccaattgtcaaaagagaaagagccgatgtcttcgagcccatcccggagacacatcttgtatttattgtactaggacacggaagacatgcgttttcgagagcccaccggatcggacccctctcacccgaagaaatctagatgcggcggagctccaagtgaagcaattacggatcttgttgagttctttacatccagatctggatatcgatgctgccattgatcgtctcgggagacgtggtagcagcgagcacccaccgggacagcttgattcatcaccagaagatacggacaagcatacgccacagaagtatgaatggcacgaagaaactttgtctgcagatacggaacccgtagccaatggctctacgtcgaacgatggcatggcgaatctctccaccaaggcaaatgcaggttaccttggaggcagtgctggtacacatctacttgaagagatagcttctgccatctcaataagcagtaaacagagacgggcgtcggaaggccagcctcttcgtccttctccgaagttgacaacagaggcaccatttgaccaattcattgagctgtcgactacggctaggcgcctcattgataactacttcttgcactacaacagctgctatcctattctacacgagaaatcgtttcgtgaaagcatagaagatccaaggcgacgccattcgactgcgccatggcgtgttgtgttctacatggtactcgctattggtgactgggtgtcgaccccggaaaccaagtcgacgctatcgccttattacaacgccgcgagatcatgcctttcattccaaatgttagaatcaggaaccacggagactgttcaagccttcttgctgatgggaaactaccttcagaagagagatcggccaaatacaggctacaattttatcggtctggctctaaagctaggcatcggcctcggtctacacagagaagtggcagataacaatgacatattcgaaaatgaaagacgtaggtcactgttctggatcatgtactgcttcgacaacgggttcagcatcacgactggacggccacccacgttattcgatggattcatagatactcgggtaccccgcaatatcaatgataaagatctctcattcgactctctagtgccactagaacttgaacatccgacgacaaattctgtcatcattgcacaggcacatttaactagagttggagatgccgtctaccaagaatttctgctggctaaaacagcgggcaccaaggtcgaataccgagtggcagagataatggagcgaagatttgatgactggcggcgagacctgcccaaatactttgtctctcccgaagtgccagagtggtttcttgcgccacgaagcatcctactatggagagaacagaatctccggcttctcctctggcgtgggtcccaggaacaccataacttcctacctaataagcaaagtgcagagacgaaatgtcttgatatcgccatgcagactatccatgaagtgtcaagcttctgcgcagactatccatctacgctacactcaggctttacctggtatgctacatacttcgttttccaggcggcactagtaatcgaagcgagttatctccaagatgcgaagcagcagagattggagagcgataacctgggccgtgagcattcgctgttccaggcccgaacatgtctggacacgcttgcgcagttcagcaaatcggctacgagatgcaatgaggttctcagcagcatccacgacagactgcatcagccggctgaaaccttgccgttgaatagcgagactacaattgggcatgatgtcgatgtagctataccccaagcgcccaatccagggtttatgggtggggatagcgactacacatattttggcaacgggtttggaggctttggtgacgacatggttgatccgactctacgaatgttcatcaaccctactacatcaactaatctatttgaggatatgccacttaatatgcttctagataactggatggcatag

SEQ ID NO: 8553 - protein, 686 aa, Muscodor strobelii
  misc_feature: SGI Peptide ID NO. 562638
  misc_feature (292)..(387): Pfam Id: PF04082 Pfam Desc: Fungal specific transcription factor domain
  misc_feature (14)..(610): NCBI GI: 256720798 Blast Desc: NECHADRAFT_85473 [Nectria haematococca mpVI 77-13-4]
  misc_feature (15)..(675): NCBI GI: 145243608 Blast Desc: An11g03220 [Aspergillus niger] gi|134079004|emb|CAL00361.1| protein product [Aspergillus niger]
  misc_feature (15)..(675): NCBI GI: 259484997 Blast Desc: TPA: conserved [Aspergillus nidulans FGSC A4]
  misc_feature (43)..(675): NCBI GI: 67538756 Blast Desc: AN5548.2 [Aspergillus nidulans FGSC A4] gi|40743063|gb|EAA62253.1| AN5548.2 [Aspergillus nidulans FGSC A4]
  misc_feature (16)..(631): NCBI GI: 169765075 Blast Desc: [Aspergillus oryzae RIB40] gi|83764863|dbj|BAE55007.1| protein product [Aspergillus oryzae]
  misc_feature (16)..(546): NCBI GI: 242813017 Blast Desc: C6 transcription factor (Gal4), [Talaromyces stipitatus ATCC 10500] gi|218714419|gb|EED13842.1| C6 transcription factor (Gal4), [Talaromyces stipitatus ATCC 10500]
  misc_feature (16)..(648): NCBI GI: 70995418 Blast Desc: C6 transcription factor [Aspergillus fumigatus Af293] gi|66850100|gb|EAL90427.1| C6 transcription factor, [Aspergillus fumigatus Af293] gi|159131220|gb|EDP56333.1| C6 transcription
  misc_feature (16)..(546): NCBI GI: 212544620 Blast Desc: C6 transcription factor (Gal4), [Penicillium marneffei ATCC 18224] gi|210065433|gb|EEA19527.1| C6 transcription factor (Gal4), [Penicillium marneffei ATCC 18224]
  misc_feature (27)..(610): NCBI GI: 261192021 Blast Desc: fungal specific transcription factor domain-containing protein [Ajellomyces dermatitidis SLH14081] gi|239589734|gb|EEQ72377.1| fungal specific transcription factor
  misc_feature (27)..(610): NCBI GI: 239608530 Blast Desc: fungal specific transcription factor domain-containing protein [Ajellomyces dermatitidis ER-3]
MERSARTWLSSSGARACSNCQKRKSRCLRAHPGDTSCIYCTRTRKTCVFESPPDRTPLTRRNLDAAELQVKQLRILLSSLHPDLDIDAAIDRLGRRGSSEHPPGQLDSSPEDTDKHTPQKYEWHEETLSADTEPVANGSTSNDGMANLSTKANAGYLGGSAGTHLLEEIASAISISSKQRRASEGQPLRPSPKLTTEAPFDQFIELSTTARRLIDNYFLHYNSCYPILHEKSFRESIEDPRRRHSTAPWRVVFYMVLAIGDWVSTPETKSTLSPYYNAARSCLSFQMLESGTTETVQAFLLMGNYLQKRDRPNTGYNFIGLALKLGIGLGLHREVADNNDIFENERRRSLFWIMYCFDNGFSITTGRPPTLFDGFIDTRVPRNINDKDLSFDSLVPLELEHPTTNSVIIAQAHLTRVGDAVYQEFLLAKTAGTKVEYRVAEIMERRFDDWRRDLPKYFVSPEVPEWFLAPRSILLWREQNLRLLLWRGSQEHHNFLPNKQSAETKCLDIAMQTIHEVSSFCADYPSTLHSGFTWYATYFVFQAALVIEASYLQDAKQQRLESDNLGREHSLFQARTCLDTLAQFSKSATRCNEVLSSIHDRLHQPAETLPLNSETTIGHDVDVAIPQAPNPGFMGGDSDYTYFGNGFGGFGDDMVDPTLRMFINPTTSTNLFEDMPLNMLLDNWMA

SEQ ID NO: 8554 - DNA, 205 bp, Muscodor strobelii
  misc_feature: SGI EST ID NO. CUFF.20693.0
  misc_feature: Variant of the nucleotide sequence at SEQ ID NO 8552
cgaaaatgaaagacgtaggtcactgttctggatcatgtactgcttcgacaacgggttcagcatcacgactggacggccacccacgttattcgatggattcatagatactcgggtaccccgcaatatcaatgataaagatctctcattcgactctctagtgccactagaacttgaacatccgacgacaaattctgtcatcattgca

SEQ ID NO: 8555 - DNA, 915 bp, Muscodor strobelii
  misc_feature: SGI cDNA ID NO. 562639
  misc_feature: Encodes the peptide sequence at SEQ ID NO 8556
atggtacctccagcacaagatttgccaggccgagaggctctgacagcacgagtaatcccttcaatgattctatcaaatggctcggcatcgtcaatgactccaccacctcaagtcacagctttacgcgaccccaaagagtcagcaaagcaaagattcttagttcgaggaaatgtgattgtcactggcggtgctggcacgttaggaatcacgggctgcgatgccttgttagaacacggcgcaagtggaattatgatattcgacatgaacccaggcaacgcgcaagatcagatcgatgcactaaagttgaaattccccgaagccaagatcgccgcacagaaggtagatgtcacagacgaggccgctgtagacgctgcggtcgaaattacatcccagacttttggttcagtagatgggctagtgtgcttcgctggagtcgtgggctgtgtcgcgactctagacatgccagtctctcaatggcgaaaggtcctagagataaatacaaccggatgcttcatcagcgctcaagctgttgcccgccgcatggtgaagcaaaaaactggcggtttcatcacattcgtctcgtccatctcagctcatcgtgtcaactacccgcaaccgcaggccgcatacaacgttagcaaatcggcgctcctcagtctgaaaaattgccttgcggctgaatgggccgtgcatggtattcgaacaaatacaattagtccgggctacatggacaccatcctcaatgaaggcgatggtatcgctgggcaccgcaagatatgggcagatcgaaaccctactgggagaatgggaagcccatacgaactgacgggcgctatagttctactggcgagccattcgggaacatacatcaacggcgctgatctagtggtagacggcggcgctaccgtcttttga

SEQ ID NO: 8556 - protein, 304 aa, Muscodor strobelii
  misc_feature: SGI Peptide ID NO. 562639
  misc_feature (56)..(229): Pfam Id: PF00106 Pfam Desc: short chain dehydrogenase
  misc_feature (56)..(246): Pfam Id: PF08659 Pfam Desc: KR domain
  misc_feature (107)..(229): Pfam Id: PF00106 Pfam Desc: short chain dehydrogenase
  misc_feature (56)..(163): Pfam Id: PF08659 Pfam Desc: KR domain
  misc_feature (6)..(304): NCBI GI: 238504518 Blast Desc: oxidoreductase, short chain dehydrogenase/reductase family [Aspergillus flavus NRRL3357] gi|220690961|gb|EED47310.1| oxidoreductase, short chain dehydrogenase/reductase family flavus
  misc_feature (32)..(304): NCBI GI: 256720800 Blast Desc: NECHADRAFT_49913 [Nectria haematococca mpVI 77-13-4]
  misc_feature (32)..(304): NCBI GI: 169764261 Blast Desc: [Aspergillus oryzae RIB40] gi|83764456|dbj|BAE54600.1| protein product [Aspergillus oryzae]
  misc_feature (8)..(304): NCBI GI: 67538756 Blast Desc: AN5548.2 [Aspergillus nidulans FGSC A4] gi|40743063|gb|EAA62253.1| AN5548.2 [Aspergillus nidulans FGSC A4]
  misc_feature (11)..(304): NCBI GI: 154312517 Blast Desc: BC1G_05861 [Botryotinia fuckeliana B05.10] gi|150849962|gb|EDN25155.1| BC1G_05861 [Botryotinia fuckeliana B05.10]
  misc_feature (11)..(304): NCBI GI: 156035505 Blast Desc: SS1G_12956 [Sclerotinia sclerotiorum 1980] gi|154698361|gb|EDN98099.1| SS1G_12956 [Sclerotinia sclerotiorum 1980]
  misc_feature (14)..(304): NCBI GI: 46114944 Blast Desc: FG03314.1 [Gibberella zeae PH-1]
  misc_feature (2)..(304): NCBI GI: 242772193 Blast Desc: oxidoreductase, short chain dehydrogenase/reductase family [Talaromyces stipitatus ATCC 10500] gi|218721610|gb|EED21028.1| oxidoreductase, short chain family
  misc_feature (11)..(304): NCBI GI: 189191000 Blast Desc: 2-deoxy-D-gluconate 3-dehydrogenase [Pyrenophora tritici-repentis Pt-1C-BFP] gi|187973445|gb|EDU40944.1| 2-deoxy-D-gluconate 3-dehydrogenase [Pyrenophora tritici-repentis
  misc_feature (11)..(304): NCBI GI: 169622230 Blast Desc: SNOG_14332 [Phaeosphaeria nodorum SN15] gi|111057083|gb|EAT78203.1| SNOG_14332 [Phaeosphaeria nodorum SN15]
  misc_feature (36)..(303): SWISSPROT Homolog: EC 1.1.1.138 Mannitol 2-dehydrogenase (NADP(+))
MVPPAQDLPGREALTARVIPSMILSNGSASSMTPPPQVTALRDPKESAKQRFLVRGNVIVTGGAGTLGITGCDALLEHGASGIMIFDMNPGNAQDQIDALKLKFPEAKIAAQKVDVTDEAAVDAAVEITSQTFGSVDGLVCFAGVVGCVATLDMPVSQWRKVLEINTTGCFISAQAVARRMVKQKTGGFITFVSSISAHRVNYPQPQAAYNVSKSALLSLKNCLAAEWAVHGIRTNTISPGYMDTILNEGDGIAGHRKIWADRNPTGRMGSPYELTGAIVLLASHSGTYINGADLVVDGGATVF

SEQ ID NO: 8557 - DNA, 387 bp, Muscodor strobelii
  misc_feature: SGI EST ID NO. CUFF.20704.0
  misc_feature: Variant of the nucleotide sequence at SEQ ID NO 8555
tcacgggctgcgatgccttgttagaacacggcgcaagtggaattatgatattcgacatgaacccaggcaacgcgcaagatcagatcgatgcactaaagttgaaattccccgaagccaagatcgccgcacagaaggtagatgtcacagacgaggccgctgtagacgctgcggtcgaaattacatcccagacttttggttcagtagatgggctagtgtgcttcgctggagtcgtgggctgtgtcgcgactctagacatgccagtctctcaatggcgaaaggtcctagagataaatacaaccggatgcttcatcagcgctcaagctgttgcccgccgcatggtgaagcaaaaaactggcggtttcatcacattcgtctcgtccatctcag

SEQ ID NO: 8558 - DNA, 687 bp, Muscodor strobelii
  misc_feature: SGI cDNA ID NO. 562640
  misc_feature: Encodes the peptide sequence at SEQ ID NO 8559
atggaacagatatataactcgctcacagagcgtgttcaggatatccacaaaaatgccacagacaccggccagcgccgtgtcctcatagctttcgccggacctccgggatccggaaagtcaactatcgcggcgcaggtcgtacagcgaacgaatgccttgacgggccgcgttactgcgacgtgtcttccaatggacggctttcattacacaagggcatatcttgacagtctgcctaatcatatcgaggcaaatgcacgccggggtgcagcatggacatttaatgcagaaggggttgtcgatttactcaaaactctttctgcttctcgtcatcatagcgatcccgtcacaatactcgcgccaagctttgatcatgctgccaaggaccctatcgcggatagcataccaattgctccggaaattgaaatcgtcatagttgaaggaaactggcttctccgtgacaagcaaccctggaaccaaatcgcatcgttcgtggacgatacgtggttcgtgggtgtggaggcttcattagcacggcaacgcatcgctgtgagacatctggctgctgggattgaaacgacaatggaagccgctcttcagagagcagacgcgaatgatctagccaacggcgacgagatcagacggcatctaatcgagcctaatgttagagttatgagtatcgaagaatag

SEQ ID NO: 8559 - protein, 228 aa, Muscodor strobelii
  misc_feature: SGI Peptide ID NO. 562640
  misc_feature (1)..(212): NCBI GI: 256723519 Blast Desc: NECHADRAFT_81005 [Nectria haematococca mpVI 77-13-4]
  misc_feature (1)..(228): NCBI GI: 255941266 Blast Desc: Pc16g10960 [Penicillium chrysogenum Wisconsin 54-1255] gi|211586025|emb|CAP93766.1| Pc16g10960 [Penicillium chrysogenum Wisconsin 54-1255]
  misc_feature (9)..(221): NCBI GI: 189199086 Blast Desc: nicotinamide riboside kinase [Pyrenophora tritici-repentis Pt-1C-BFP] gi|187982979|gb|EDU48467.1| nicotinamide riboside kinase [Pyrenophora tritici-repentis
  misc_feature (1)..(228): NCBI GI: 119481717 Blast Desc: NFIA_089470 [Neosartorya fischeri NRRL 181] gi|119409041|gb|EAW18990.1| conserved [Neosartorya fischeri NRRL 181]
  misc_feature (8)..(225): NCBI GI: 202953545 Blast Desc: DEHA2F22924p [Debaryomyces hansenii]
  misc_feature (3)..(223): NCBI GI: 39968421 Blast Desc: MGG_02303 [Magnaporthe grisea 70-15] gi|145014128|gb|EDJ98769.1| MGG_02303 [Magnaporthe grisea 70-15]
  misc_feature (8)..(225): NCBI GI: 50425491 Blast Desc: DEHA0F24365g [Debaryomyces hansenii CBS767]
  misc_feature (1)..(228): NCBI GI: 169772455 Blast Desc: [Aspergillus oryzae RIB40] gi|83768557|dbj|BAE58694.1| protein product [Aspergillus oryzae]
  misc_feature (1)..(228): NCBI GI: 71002166 Blast Desc: phosphoribulokinase/uridine kinase family protein [Aspergillus fumigatus Af293] gi|66853402|gb|EAL93726.1| phosphoribulokinase/uridine kinase family protein [Aspergillus
  misc_feature (25)..(212): NCBI GI: 238838764 Blast Desc: Aim12p [Microsporum canis CBS 113480]
  misc_feature (5)..(221): SWISSPROT Homolog: EC 2.7.1.48 Uridine kinase
MEQIYNSLTERVQDIHKNATDTGQRRVLIAFAGPPGSGKSTIAAQVVQRTNALTGRVTATCLPMDGFHYTRAYLDSLPNHIEANARRGAAWTFNAEGVVDLLKTLSASRHHSDPVTILAPSFDHAAKDPIADSIPIAPEIEIVIVEGNWLLRDKQPWNQIASFVDDTWFVGVEASLARQRIAVRHLAAGIETTMEAALQRADANDLANGDEIRRHLIEPNVRVMSIEE

SEQ ID NO: 8560 - DNA, 1884 bp, Muscodor strobelii
  misc_feature: SGI EST ID NO. CUFF.20710.0
  misc_feature: Variant of the nucleotide sequence at SEQ ID NO 8558
cctgcatttcagcaaattacatacattatcaactttataaagtaaaaatttccagtgtgtatatgaaagttgtcatggagaaggtatacgtcgaactcaacggctagactgtatggaacagatatataactcgctcacagagcgtgttcaggatatccacaaaaatgccacagacaccggccagcgccgtgtcctcatagctttcgccggacctccgggatccggaaagtcaactatcgcggcgcaggtcgtacagcgaacgaatgccttgacgggccgcgttactgcgacgtgtcttccaatggacggctttcattacacaagggcatatcttgacagtctgcctaatcatatcgaggcaaatgcacgccggggtgcagcatggacatttaatgcagaaggggttgtcgatttactcaaaactctttctgcttctcgtcatcatagcgatcccgtcacaatactcgcgccaagctttgatcatgctgccaaggaccctatcgcggatagcataccaattgctccggaaattgaaatcgtcatagttgaaggaaactggcttctccgtgacaagcaaccctggaaccaaatcgcatcgttcgtggacgatacgtggttcgtgggtgtggaggcttcattagcacggcaacgcatcgctgtgagacatctggctgctgggattgaaacgacaatggaagccgctcttcagagagcagacgcgaatgatctagccaacggcgacgagatcagacggcatctaatcgagcctaatgttagagttatgagtatcgaagaatagagcactgtctccagctggggcttcttgcattgatgttggaccagagtttacggattcggcatcgttaccggaggacacagcaccgattccgcggcccccattcgcgcgcttatggtgccgctactacgattaaaaaaaacggggcattataggcgttcattggacactggacagatattggacaacattgttaatggagtcttttttgctctgtttcgttaagaaactgtaatatttcgagacgaatgattcaagatgtcgatgagctttgaagactgcgcggtcgtccggcccgggttcccgaaacccttccccgaaactccagccaatgtcatcgagcagtttaagatgacggggaaggtggtggtagtgaccggtgctgcagatggcattggctacgctgtttcagaggccatggctgaagcaggcgctcatgtagcattatggtataattcaaacgatgctgctattgagaagagcgccgctttggcaaagactcatggtatcaacacaaaggcatacaaagtcgatgtttccaaagtcgacgaggtgcagagtacgatagaaaaggtcgtcgtcgacttcggcaggatagacgttttcgtggccaacgctggcatagcaatatgcaaaccgatcctagagcagactcttgaggagtaccaaaagcagatgtctgtgaacgtggatggcgtggtattcagtgccaagtatgttggtgatatcttcaaacgacagggctcaggaaacctcatcatcacctctagtatgagcggtcatatcgtcaatgcaccaacagaccaacctgtatataatgccacgaaggcctttgtcacacactttggtaagtgcttggcccgtgaatggagggaatttgctcgagtcaatattgtatctcccggctttttcgacacaaatatgggtgcaggtccggagggtttgaacgaggcttatcgaatggctgtattgggaagacaaggtcacacaaaggagatcaaggggttgtacttgtatcttgcaagcgatgcatcaacgtataccacgggcgcagacatcatcattgatgggggatacgttctgcccta

SEQ ID NO: 8561 - DNA, 831 bp, Muscodor strobelii
  misc_feature: SGI cDNA ID NO. 562641
  misc_feature: Encodes the peptide sequence at SEQ ID NO 8562
atgtcgatgagctttgaagactgcgcggtcgtccggcccgggttcccgaaacccttccccgaaactccagccaatgtcatcgagcagtttaagatgacggggaaggtggtggtagtgaccggtgctgcagatggcattggctacgctgtttcagaggccatggctgaagcaggcgctcatgtagcattatggtataattcaaacgatgctgctattgagaagagcgccgctttggcaaagactcatggtatcaacacaaaggcatacaaagtcgatgtttccaaagtcgacgaggtgcagagtacgatagaaaaggtcgtcgtcgacttcggcaggatagacgttttcgtggccaacgctggcatagcaatatgcaaaccgatcctagagcagactcttgaggagtaccaaaagcagatgtctgtgaacgtggatggcgtggtattcagtgccaagtatgttggtgatatcttcaaacgacagggctcaggaaacctcatcatcacctctagtatgagcggtcatatcgtcaatgcaccaacagaccaacctgtatataatgccacgaaggcctttgtcacacactttggtaagtgcttggcccgtgaatggagggaatttgctcgagtcaatattgtatctcccggctttttcgacacaaatatgggtgcaggtccggagggtttgaacgaggcttatcgaatggctgtattgggaagacaaggtcacacaaaggagatcaaggggttgtacttgtatcttgcaagcgatgcatcaacgtataccacgggcgcagacatcatcattgatgggggatacgttctgccctag

SEQ ID NO: 8562 - protein, 276 aa, Muscodor strobelii
  misc_feature: SGI Peptide ID NO. 562641
  misc_feature (35)..(205): Pfam Id: PF00106 Pfam Desc: short chain dehydrogenase
  misc_feature (36)..(207): Pfam Id: PF08659 Pfam Desc: KR domain
  misc_feature (1)..(276): NCBI GI: 256723542 Blast Desc: NECHADRAFT_42069 [Nectria haematococca mpVI 77-13-4]
  misc_feature (1)..(276): NCBI GI: 169764265 Blast Desc: [Aspergillus oryzae RIB40] gi|83764458|dbj|BAE54602.1| protein product [Aspergillus oryzae]
  misc_feature (1)..(276): NCBI GI: 256720611 Blast Desc: [Nectria haematococca mpVI 77-13-4]
  misc_feature (1)..(276): NCBI GI: 238504514 Blast Desc: short-chain dehydrogenase, [Aspergillus flavus NRRL3357] gi|220690959|gb|EED47308.1| short-chain dehydrogenase, [Aspergillus flavus NRRL3357]
  misc_feature (1)..(276): NCBI GI: 46116812 Blast Desc: FG04248.1 [Gibberella zeae PH-1]
  misc_feature (1)..(276): NCBI GI: 145243616 Blast Desc: An11g03260 [Aspergillus niger] gi|134079008|emb|CAL00365.1| protein product [Aspergillus niger]
  misc_feature (1)..(276): NCBI GI: 115390104 Blast Desc: conserved [Aspergillus terreus NIH2624] gi|114194953|gb|EAU36653.1| conserved [Aspergillus terreus NIH2624]
  misc_feature (1)..(275): NCBI GI: 67538754 Blast Desc: AN5547.2 [Aspergillus nidulans FGSC A4] gi|40743062|gb|EAA62252.1| AN5547.2 [Aspergillus nidulans FGSC A4] gi|259484998|tpe|CBF81696.1| TPA: conserved [Aspergillus FGSC
  misc_feature (1)..(276): NCBI GI: 71022339 Blast Desc: UM05252.1 [Ustilago maydis 521] gi|46101268|gb|EAK86501.1| UM05252.1 [Ustilago maydis 521]
  misc_feature (1)..(276): NCBI GI: 255941722 Blast Desc: Pc16g13310 [Penicillium chrysogenum Wisconsin 54-1255] gi|211586253|emb|CAP94001.1| Pc16g13310 [Penicillium chrysogenum Wisconsin 54-1255]
  misc_feature (3)..(276): SWISSPROT Homolog: EC 1.1.1.289 Sorbose reductase
MSMSFEDCAVVRPGFPKPFPETPANVIEQFKMTGKVVVVTGAADGIGYAVSEAMAEAGAHVALWYNSNDAAIEKSAALAKTHGINTKAYKVDVSKVDEVQSTIEKVVVDFGRIDVFVANAGIAICKPILEQTLEEYQKQMSVNVDGVVFSAKYVGDIFKRQGSGNLIITSSMSGHIVNAPTDQPVYNATKAFVTHFGKCLAREWREFARVNIVSPGFFDTNMGAGPEGLNEAYRMAVLGRQGHTKEIKGLYLYLASDASTYTTGADIIIDGGYVLP

SEQ ID NO: 8563 - DNA, 1884 bp, Muscodor strobelii; identical to SEQ ID NO: 8560
  misc_feature: SGI EST ID NO. CUFF.20710.0
  misc_feature: Variant of the nucleotide sequence at SEQ ID NO 8561

SEQ ID NO: 8564 - DNA, 1299 bp, Muscodor strobelii
  misc_feature: SGI cDNA ID NO. 562642
  misc_feature: Encodes the peptide sequence at SEQ ID NO 8565
atggctacagcggcagcaggctctccgcctgccgcccctattaccgatggcgatgctacttataggccgcgatatatcgatattggtatcaacctcgcggatacaatgtaccggggcgtctacaacggcaaagaacgacacccaaatgatctccaagccgtagtatcacgcgcaaaagaagtcggatgtgaaaaactcatagtgaccggctctgacttcccctcctcaagagaagcgcttagcatcgctcaagaatgtcctggaatcgtatacacaacagctggcatccacccttgctcaagcgcaatattcagcacctcacactcaaagaaagacgcaaaagaccatagcttaacaggctatgacccagatccagagaaaccgatatcagaagaagacgaaccagacttagaaaagacagagcaaatcatcgccgacctaagaacactcatcgagtccgcgcataaaactcaccctggtgctctcgtagcattcggggagtttggactagattacgatagactgcactattgctccaagaaaatccaactgcattctttctccgcacaactcgacctcgtactcgccctcgatccgcaaccaccattattccttcactcccgcgcagcacactcagacttcgtctcgctcctgaagtccaaattcggacctaagctcgaaaagttagaacgcggcggcgtagtgcacagtttcaccggcagcgcagaggagatgaaggaactcgcagacttgggtctatacatcgggacgaacggatgtagtttcaagacagaagagaattgcgaggtggtgaagcagataccgctcaatagactcatgttagagaccgacggcccgtggtgcgaaatcaggcctacgcatgcggggtggagatacttactcgaggctcataataaagctaaagaggagtccactccaaatggaggtgataccccggcgtctgagtttacacctgcttcgacggcggctgctacgcctgatatttcgaggacggggacacctagtttacctggtgatgcacagccgaaacctgccagacgaccgaagaaaccgaagagaaaggagccggagattccagagcgttggagagctgtgaaaaaagagaagtgggttgagggctcgatggtcaagggtcgtaatgagccttgtatgatcgagcgtgtgggacaggttgtggcgagtgtgaggagagagtcattgaaagatgtttgtgaggctgcttgggcgaatactgtcaaagtgtttgggctgggtgaggattcgacaaagcgagcataa

SEQ ID NO: 8565 - protein, 432 aa, Muscodor strobelii
  misc_feature: SGI Peptide ID NO. 562642
  misc_feature (26)..(423): Pfam Id: PF01026 Pfam Desc: TatD related DNase
  misc_feature (6)..(422): NCBI GI: 39978229 Blast Desc: MGG_06999 [Magnaporthe grisea 70-15] gi|145013419|gb|EDJ98060.1| MGG_06999 [Magnaporthe grisea 70-15]
  misc_feature (4)..(427): NCBI GI: 256732976 Blast Desc: [Nectria haematococca mpVI 77-13-4]
  misc_feature (21)..(426): NCBI GI: 164427480 Blast Desc: NCU03538 [Neurospora crassa OR74A] gi|16944535|emb|CAD11331.1| conserved [Neurospora crassa] gi|157071760|gb|EAA27581.2| conserved [Neurospora crassa OR74A]
  misc_feature (20)..(423): NCBI GI: 171690022 Blast Desc: protein product [Podospora anserina] gi|170944966|emb|CAP71077.1| protein product [Podospora anserina]
  misc_feature (1)..(400): NCBI GI: 46121589 Blast Desc: FG05173.1 [Gibberella zeae PH-1]
  misc_feature (21)..(286): NCBI GI: 261352975 Blast Desc: deoxyribonuclease tatD [Verticillium albo-atrum VaMs.102]
  misc_feature (1)..(424): NCBI GI: 154297705 Blast Desc: BC1G_12264 [Botryotinia fuckeliana B05.10] gi|150858393|gb|EDN33585.1| BC1G_12264 [Botryotinia fuckeliana B05.10]
  misc_feature (17)..(429): NCBI GI: 169773831 Blast Desc: [Aspergillus oryzae RIB40] gi|83769245|dbj|BAE59382.1| protein product [Aspergillus oryzae]
  misc_feature (22)..(429): NCBI GI: 238491850 Blast Desc: hydrolase, TatD family protein, [Aspergillus flavus NRRL3357] gi|220697575|gb|EED53916.1| hydrolase, TatD family protein, [Aspergillus flavus NRRL3357]
  misc_feature (17)..(426): NCBI GI: 240280077 Blast Desc: hydrolase [Ajellomyces capsulatus H143]
MATAAAGSPPAAPITDGDATYRPRYIDIGINLADTMYRGVYNGKERHPNDLQAVVSRAKEVGCEKLIVTGSDFPSSREALSIAQECPGIVYTTAGIHPCSSAIFSTSHSKKDAKDHSLTGYDPDPEKPISEEDEPDLEKTEQIIADLRTLIESAHKTHPGALVAFGEFGLDYDRLHYCSKKIQLHSFSAQLDLVLALDPQPPLFLHSRAAHSDFVSLLKSKFGPKLEKLERGGVVHSFTGSAEEMKELADLGLYIGTNGCSFKTEENCEVVKQIPLNRLMLETDGPWCEIRPTHAGWRYLLEAHNKAKEESTPNGGDTPASEFTPASTAAATPDISRTGTPSLPGDAQPKPARRPKKPKRKEPEIPERWRAVKKEKWVEGSMVKGRNEPCMIERVGQVVASVRRESLKDVCEAAWANTVKVFGLGEDSTKRA

SEQ ID NO: 8566 - DNA, 3941 bp, Muscodor strobelii
  misc_feature: SGI EST ID NO. CUFF.20713.0
  misc_feature: Variant of the nucleotide sequence at SEQ ID NO 8564
tgtaaagatacgagcgaccattgtgactcattggggaagaattgcctgccaaggatttcttttgatatctgaatgaacgcattataagacgagataactactcgatgatccgaaatagaattgcttctcacttttcgacgataccaaaagccgcacgactatcaatttccaaaccgtttgtgagacctctttcacactcactgccaaccatggctacagcggcagcaggctctccgcctgccgcccctattaccgatggcgatgctacttataggccgcgatatatcgatattggtatcaacctcgcggatacaatgtaccggggcgtctacaacggcaaagaacgacacccaaatgatctccaagccgtagtatcacgcgcaaaagaagtcggatgtgaaaaactcatagtgaccggctctgacttcccctcctcaagagaagcgcttagcatcgctcaagaatgtcctggaatcgtatacacaacagctggcatccacccttgctcaagcgcaatattcagcacctcacactcaaagaaagacgcaaaagaccatagcttaacaggctatgacccagatccagagaaaccgatatcagaagaagacgaaccagacttagaaaagacagagcaaatcatcgccgacctaagaacactcatcgagtccgcgcataaaactcaccctggtgctctcgtagcattcggggagtttggactagattacgatagactgcactattgctccaagaaaatccaactgcattctttctccgcacaactcgacctcgtactcgccctcgatccgcaaccaccattattccttcactcccgcgcagcacactcagacttcgtctcgctcctgaagtccaaattcggacctaagctcgaaaagttagaacgcggcggcgtagtgcacagtttcaccggcagcgcagaggagatgaaggaactcgcagacttgggtctatacatcgggacgaacggatgtagtttcaagacagaagagaattgcgaggtggtgaagcagataccgctcaatagactcatgttagagaccgacggcccgtggtgcgaaatcaggcctacgcatgcggggtggagatacttactcgaggctcataataaagctaaagaggagtccactccaaatggaggtgataccccggcgtctgagtttacacctgcttcgacggcggctgctacgcctgatatttcgaggacggggacacctagtttacctggtgatgcacagccgaaacctgccagacgaccgaagaaaccgaagagaaaggagccggagattccagagcgttggagagctgtgaaaaaagagaagtgggttgagggctcgatggtcaagggtcgtaatgagccttgtatgatcgagcgtgtgggacaggttgtggcgagtgtgaggagagagtcattgaaagatgtttgtgaggctgcttgggcgaatactgtcaaagtgtttgggctgggtgaggattcgacaaagcgagcataagcgccagcggatagaattgttgggagatgttagatattgtagagacaagtgcatgtatacatggttgatagaaacattccatcatgggctgcaaagacagatcacaatcaacagatagaactaggcctacacgaagtgatcaaaacttcatgcttcatcattcattcaatactcatgaattagctcagatctctttttcattatctcacaaacccgcaccccgatgtcctttcaccctgccatgtcttacagcagccatcgtgataccctcttcacccgtcatccatccaggcatgcgctcaccatcaataatcccagcctcaactagttgacgtataccagcaaagacgtgcggaccgtgaaaggcaagacgagggttggggcgccatgcccatttctcgttatccctctctttcgacagcccctgcctggtagtatctcgagttggatttctattgtctgcaccaccatctccatcataatctctggtctccccatcatcgtcctcttcgtcttcgcctccctctgcctcttgtaacaggctagcatcaacggcgctgccgccgaccctttgccttgcgtcctcgtgtaggtgcaggatgatcttcatctccctgactttcatctacagctttggggaagggatcttcgagcaggacatctagtctctcgataccttttccgtcatctatctttgctgaatcgccgaaccgggcctgcgcaacaagacgagcgcgcttgtacctcttctcttcccggatctcatcaggatctcgtatcctttttctcttctcctgaccatcgccctcgtcagccttgtcctccgcgacaagctcgtcagatagtggtggtgagggtaacatggggttgagggggctgtgagtcattgcatcggcggacttatcaccagcatacacgctccaaccccccgcagccgaattgcttcgcccagcaccccgaagactcaacattgcttccaggttcttggtctgtaagttgacacttgtgagtgtatatcgctcgcgtggccttgacaatgccttgggcacaccctcgaccacgagctggcgcagcgatcgtgtgtcgcccgtggtagttggccctatgctctgtgatttgctcacgtagacgtatggagatgcatcagggaaggcgatgtatatagtgcgggaggagtcgaaactcgtggtggtgcgaagcattgcagatgtgaatgtgaatgtggatcccaatgccgagctcatagctaggtctgtgttgtatggcgagtcgaggacaaatatcctgaggagaaggaggggcatgcctttcggccggtcaaagctatagtgtgccttaacgtcgggcaacacctcggcctggaggttctggaggaatgtgcttgggtggaatcggggcacattgagtacggttctatcgggtctgtcgtggctgttgtctgcttctacgtcgtcctcgtgggccggggcttggaggcgctggatcttgtagcatgcccatttgagacttcctgggtgatcgtggagatactgctgatctgccatggcaagctggtacaggctcagaccgtcgcgccagtcgccttcgaggatacggtctacgacttctcgacgtccgcccttgcgctcctgcatgtccatgtatagctcctgcagcgcagcgagggatcgcgcgggcgggtagaggtcactggcaaaggcgtcctcatcttcgtcttcttcttcctcctctagtcggcgtagtaacggcgggcatagagagacattcttgacatcaagccaatctagaacgagcgagagcagcgaggggcgtgagagtcggttcagcgccttaaccacggctgcattggaggggctgacacggagcgatggtggcagacgggccgcagtcggcagcgagagcggcggcgccatcgttgcgcgccagggtatgagggtgtcagcaatcgctgtttcgtgtttaactatatcaattgacagtatgtgtattgatcaagacattgacttagttcggctgagtacgccaattaatctgtgacgtaggcgcggcgtgggtttgcactttccacttcgttaatggtttctgttgacgcgtcgcgtctcaacggctgcgacagaagatgcagtcagtgtacctaggtaagatacccacgaacatatgctcctctagtgtaagaatttggtgtggcaaacactcgttttgttgtcgcgaatgaccttgctgcctcttggattgtcgttcacattatgattagcagaagtcacttgtatatcgtcctcgtctacatgatcactcacgcgccatgtctatcatgacctcgactgtcttgcgactactatgcgatgggcgggtatctgacagtggggataagctgttcccaggtaagctgagacaggcataaaaatcgttggatcatggaccagtggcctgccg

SEQ ID NO: 8567 - DNA, 876 bp, Muscodor strobelii
  misc_feature: SGI cDNA ID NO. 562643
  misc_feature: Reduced expression when VOC is produced
  misc_feature: Encodes the peptide sequence at SEQ ID NO 8568
atgaagactaccactgttctcatgggctgcttcggcgtccttgccagcgccaccatcagcatccctcccaacttccctgagtgcggtaatgtctgtgtcggcaacctggtcggtctggcctctagcttcggttgcaaggccggttccgatagcaacggcgccgactacgtctgcctgtgcaaggaccccaacttctcgtacggaatccgcgactgtgccaacgagtcttgcccccctagcgacgctggaaccgtcatccagtatggcgtcgacgtctgtgctggcgctggtatctatgtctctggcattggcccttctcctaattccgcctctgctactgccatcagcaccacggtcctcgctactgcctctggcactggatctgctgctccctcgagctctgcctccgactcccagagcgccagcgcttccgaggttgttatcacgaccaccaacagcgatggctccaccatcacttccactgtaacctctactggagctgagggttcgggcagtgtcagtgagactgccatcgccgtcaccactgttcctgtcaccgccactgtcaccggtaccgatggcagcgagtcggttagcactggagagagcaccgttttctcgacttctcaggtgtctggcagcgagaccggttccgaggctccctccagcactaccgttgagtcgacgatcacctccaacggctcatcctccgttgccacgttcaccacttcggtcgacagcaccagtactgccggtgcatccaactccgagggtgcttcgtcggctaccagcagctcgtcatccggctttgcccccatgcagaccgtcgctccggccggtctcatcgctgccggtcttgcagctatcatcctctaa

SEQ ID NO: 8568 - protein, 291 aa, Muscodor strobelii
  misc_feature: SGI Peptide ID NO. 562643
  misc_feature (21)..(94): Pfam Id: PF05730 Pfam Desc: CFEM domain
  misc_feature (1)..(200): NCBI GI: 256732532 Blast Desc: NECHADRAFT_99959 [Nectria haematococca mpVI 77-13-4]
  misc_feature (25)..(291): NCBI GI: 39978241 Blast Desc: [Magnaporthe grisea 70-15] gi|145013413|gb|EDJ98054.1| [Magnaporthe grisea 70-15]
  misc_feature (1)..(135): NCBI GI: 67538374 Blast Desc: AN5357.2 [Aspergillus nidulans FGSC A4] gi|40743327|gb|EAA62517.1| AN5357.2 [Aspergillus nidulans FGSC A4] gi|259485199|tpe|CBF82042.1| TPA: CFEM domain protein FGSC
  misc_feature (24)..(252): NCBI GI: 156043865 Blast Desc: [Sclerotinia sclerotiorum 1980] gi|154695323|gb|EDN95061.1| [Sclerotinia sclerotiorum 1980]
  misc_feature (15)..(95): NCBI GI: 255946662 Blast Desc: Pc22g00530 [Penicillium chrysogenum Wisconsin 54-1255] gi|211591115|emb|CAP97341.1| Pc22g00530 [Penicillium chrysogenum Wisconsin 54-1255]
  misc_feature (24)..(232): NCBI GI: 258569333 Blast Desc: [Uncinocarpus reesii 1704] gi|237903740|gb|EEP78141.1| [Uncinocarpus reesii 1704]
  misc_feature (27)..(165): NCBI GI: 225555547 Blast Desc: chitinase [Ajellomyces capsulatus G186AR]
  misc_feature (13)..(208): NCBI GI: 238507786 Blast Desc: CFEM domain protein [Aspergillus flavus NRRL3357] gi|220688613|gb|EED44965.1| CFEM domain protein [Aspergillus flavus NRRL3357]
  misc_feature (27)..(165): NCBI GI: 154270873 Blast Desc: [Ajellomyces capsulatus NAm1] gi|150409513|gb|EDN04957.1| [Ajellomyces capsulatus NAm1]
  misc_feature (1)..(94): NCBI GI: 154297735 Blast Desc: [Botryotinia fuckeliana B05.10] gi|150858408|gb|EDN33600.1| [Botryotinia fuckeliana B05.10]
  misc_feature: Useful for introducing or modulating the production of volatile compounds
MKTTTVLMGCFGVLASATISIPPNFPECGNVCVGNLVGLASSFGCKAGSDSNGADYVCLCKDPNFSYGIRDCANESCPPSDAGTVIQYGVDVCAGAGIYVSGIGPSPNSASATAISTTVLATASGTGSAAPSSSASDSQSASASEVVITTTNSDGSTITSTVTSTGAEGSGSVSETAIAVTTVPVTATVTGTDGSESVSTGESTVFSTSQVSGSETGSEAPSSTTVESTITSNGSSSVATFTTSVDSTSTAGASNSEGASSATSSSSSGFAPMQTVAPAGLIAAGLAAIIL

SEQ ID NO: 8569 - DNA, 2184 bp, Muscodor strobelii
  misc_feature: SGI EST ID NO. CUFF.20855.4
  misc_feature: Variant of the nucleotide sequence at SEQ ID NO 8567
cgtcctcgcgcgtctaacttgacggaaacagcaccgcatttaagaactcttcagcttcagtctacgaaaggtacgttctgggtgcaagccacatctcgccctgttgactctttcaatttctgtatcccttccgcaccagcacgaaacattgcagcacaagcacgcgtcttcaaaccgacgcacaccacaagccccaaccgttctgctcccatctgatcatcactaccctcttcgtcacgtatcgtcattttctgtgaactgcgcttcacactgctctgttgcatcaagtcaaaacatcatctgtgaacaccaaggtatatacattcacacatgcgtcacgattcccttacatcgctctttcatctgcgggatccaatatctctgatctcatagtcactgctttgagcggcgctcgtcactcccctccgtcatccaaacagtcgttcgggtcgcacactcaaaattgcacatcacacacacgagaacgcgcttgtctgttccagctctcttcattccattgccctagccgcttccttatgagtttctgtcgtctgtaccacttgcagcatcgtgacgttgagaatctggtaatgcacactgtttgtcagcggattccagagactcacccacgctctgacccctgtcgccgcgcaccttcccctgacggcgttcttgccttcgtcgccgttccttcctccaccgaatactgaatcacaggtcaccgttccttctctgccggcgatacacatcagctcaggcaaacaactctatttctcccctctctcccattctgcacttctccctctcttcttctcttcaccaacaacattcccccatcaacagattccagtccacaattgcattgccatcaaagcatcacagcactccaatcaaaactcactacctccatcatcagcttttttgcacgctttttgagcatccgttttctggaacagaaattcttaccagctcccttgacagacagatctccaatcgccaagatgaagactaccactgttctcatgggctgcttcggcgtccttgccagcgccaccatcagcatccctcccaacttccctgagtgcggtaatgtctgtgtcggcaacctggtcggtctggcctctagcttcggttgcaaggccggttccgatagcaacggcgccgactacgtctgcctgtgcaaggaccccaacttctcgtacggaatccgcgactgtgccaacgagtcttgcccccctagcgacgctggaaccgtcatccagtatggcgtcgacgtctgtgctggcgctggtatctatgtctctggcattggcccttctcctaattccgcctctgctactgccatcagcaccacggtcctcgctactgcctctggcactggatctgctgctccctcgagctctgcctccgactcccagagcgccagcgcttccgaggttgttatcacgaccaccaacagcgatggctccaccatcacttccactgtaacctctactggagctgagggttcgggcagtgtcagtgagactgccatcgccgtcaccactgttcctgtcaccgccactgtcaccggtaccgatggcagcgagtcggttagcactggagagagcaccgttttctcgacttctcaggtgtctggcagcgagaccggttccgaggctccctccagcactaccgttgagtcgacgatcacctccaacggctcatcctccgttgccacgttcaccacttcggtcgacagcaccagtactgccggtgcatccaactccgagggtgcttcgtcggctaccagcagctcgtcatccggctttgcccccatgcagaccgtcgctccggccggtctcatcgctgccggtcttgcagctatcatcctctaattgacacggctgttcattggctgaggattgagttgtagggtcacataatgtggaggttgcagcttggggatgactaatacgtgaccggaaaagttacgaaaggttctcttacgatgtataaacgactggagttttgtcatgaccgggactgataataccgtacgtgagatacccttcgcgctaggcgttggtgtttgttctcgatttgactacggactctaatcaataaaattgattattacacacaaagagatgttgtgaagttaggaccgtgaagttgaagtcgtgctgccacgatgatatgccg

SEQ ID NO: 8570 - DNA, 1497 bp, Muscodor strobelii
  misc_feature: SGI cDNA ID NO. 562644
  misc_feature: Elevated expression when VOC is produced
  misc_feature: Encodes the peptide sequence at SEQ ID NO 8571
atgccgagcataagacttgcgaccgcgtcgcctgcgacgaagagctcgaggaaggagacgttggagcagatggagggtcttgcgagagcggcgggggggatgaatgcggattttctcgtcttgcctgaggcctacctcggtggatatccacgggggaaggacttcgggtgtaaggtgggcgataggacggcggagggacgggaggagtttagggagtattttaaagccgctgttgatctgggggatactgttaatggtggggcgggtgctggggagaagtgggttaggagggcgcttggggatgaagaggagtggcaggagagagattcgtggggggagaaagagaagaaggttagaggggatgggacgagagaggagattgagaggattgcgagggagacgggggtttttgttgtggttggtgttgtggaacgtgctgggggtagcttgtattgtgccgtgctgtatgtttgtccccgcaagggcgttattgggaagaggaggaaggttatgcctacgggtatggagagacttatttgggctcaagggagtcctgcgacgcttaaggctgttagtacgacgatacgtgggattcgagttaatctggcggcggcaatttgttgggagaattatatgccgcttttgaggcagagtctttatcagcagaacatcaacctttatcttgctcctactgctgatggacgagatacttggcttcctctcatgcgaaccatcgccctcgaaggccggtgttttgtcgtaagctcaaacatgtgcgttcgcgactgcgagcacgaaaacggaaacggaaagattcgaagttacagtcatgtcgggcacacacccacagtgcaattcaacgggaacccattccacgactcgccaaaaagacgacgaaactcctgcatgacggaagaaggcttcgagattgcgctccctactacgccgtcgttaaggatctcacaatcccacccacgccgacgctcaatcttcgatgagcagggtaacgagatcatcgtcccgggatctgagaacagagcagtggactacacgagacgacgaagtatcttcgatgaacaaggaaacgaaatcgtcatccctggcgcggatccgaagccagcaaatctttttgtccctccgtcccctatcgcgacgagtgctgtgatcgaagaccatcatgacgatgtggcgccggatttcgtgcccccgaaatggggcgtgaagtggagtcctggtaagacgatgggtgaggcgaggggagtgagagaggagaagaagttccgctcgagaggtggctcttgtatcgttgctccgaatggcgatgtgcttgccggcccccagtgggaggacgataggagtattgtttatgcggatgtggatcttgaggattgcgttaggggacgactggatcttgatgcggcggggagttattctcgaaacgactccttcaagttctccgtcgaggggctgaatcttgaccctctaccctattattaa

SEQ ID NO: 8571 - protein, 498 aa, Muscodor strobelii
  misc_feature: SGI Peptide ID NO. 562644
  misc_feature (5)..(232): Pfam Id: PF00795 Pfam Desc: Carbon-nitrogen hydrolase
  misc_feature (127)..(232): Pfam Id: PF00795 Pfam Desc: Carbon-nitrogen hydrolase
  misc_feature (5)..(80): Pfam Id: PF00795 Pfam Desc: Carbon-nitrogen hydrolase
  misc_feature (2)..(497): NCBI GI: 85110024 Blast Desc: NCU05387 [Neurospora crassa OR74A] gi|11595710|emb|CAC18136.1| conserved [Neurospora crassa] gi|28924868|gb|EAA33964.1| conserved [Neurospora crassa OR74A]
  misc_feature (3)..(497): NCBI GI: 171689704 Blast Desc: protein product [Podospora anserina] gi|170944814|emb|CAP70926.1| protein product [Podospora anserina]
  misc_feature (3)..(497): NCBI GI: 256730715 Blast Desc: [Nectria haematococca mpVI 77-13-4]
  misc_feature (4)..(497): NCBI GI: 46109632 Blast Desc: FG01698.1 [Gibberella zeae PH-1]
  misc_feature (3)..(497): NCBI GI: 116205255 Blast Desc: CHGG_10511 [Chaetomium globosum CBS 148.51] gi|88176639|gb|EAQ84107.1| CHGG_10511 [Chaetomium globosum CBS 148.51]
  misc_feature (1)..(496): NCBI GI: 261196127 Blast Desc: hydrolase [Ajellomyces dermatitidis SLH14081] gi|239587600|gb|EEQ70243.1| hydrolase [Ajellomyces dermatitidis SLH14081] gi|239614556|gb|EEQ91543.1| hydrolase [Ajellomyces
  misc_feature (1)..(496): NCBI GI: 169599128 Blast Desc: SNOG_02380 [Phaeosphaeria nodorum SN15] gi|111069472|gb|EAT90592.1| SNOG_02380 [Phaeosphaeria nodorum SN15]
  misc_feature (1)..(497): NCBI GI: 225683910 Blast Desc: nitrilase/cyanide hydratase and apolipoprotein N-acyltransferase [Paracoccidioides brasiliensis Pb03]
  misc_feature (1)..(496): NCBI GI: 225560962 Blast Desc: hydrolase [Ajellomyces capsulatus G186AR]
  misc_feature (43)..(496): NCBI GI: 154277744 Blast Desc: conserved [Ajellomyces capsulatus NAm1] gi|150413292|gb|EDN08675.1| conserved [Ajellomyces capsulatus NAm1]
  misc_feature: Useful for introducing or modulating the production of volatile compounds
MPSIRLATASPATKSSRKETLEQMEGLARAAGGMNADFLVLPEAYLGGYPRGKDFGCKVGDRTAEGREEFREYFKAAVDLGDTVNGGAGAGEKWVRRALGDEEEWQERDSWGEKEKKVRGDGTREEIERIARETGVFVVVGVVERAGGSLYCAVLYVCPRKGVIGKRRKVMPTGMERLIWAQGSPATLKAVSTTIRGIRVNLAAAICWENYMPLLRQSLYQQNINLYLAPTADGRDTWLPLMRTIALEGRCFVVSSNMCVRDCEHENGNGKIRSYSHVGHTPTVQFNGNPFHDSPKRRRNSCMTEEGFEIALPTTPSLRISQSHPRRRSIFDEQGNEIIVPGSENRAVDYTRRRSIFDEQGNEIVIPGADPKPANLFVPPSPIATSAVIEDHHDDVAPDFVPPKWGVKWSPGKTMGEARGVREEKKFRSRGGSCIVAPNGDVLAGPQWEDDRSIVYADVDLEDCVRGRLDLDAAGSYSRNDSFKFSVEGLNLDPLPYY

SEQ ID NO: 8572 - DNA, 4690 bp, Muscodor strobelii
  misc_feature: SGI EST ID NO. CUFF.20976.0
  misc_feature: Variant of the nucleotide sequence at SEQ ID NO 8570
ctacatccgtgtagatgtatgctgcgccgctcctgcggggtacctcctgttcctccaggccggccggcgtcgcctgtcacggtcgctgaacttggccgtgacatcacatcacggttactattcagctaataatagcttcggcaaatcaaatcaaatcaaatcaaatggcgacaaccattccatccagcttgtcaaattgatgcttgcacacgtcgtaaacgcgtgtagatcctgacacggctgttggaattgctgtaattatttgggggatttggggtcagccgaggtggaattgaactacctacctacatacctagtcactgacctgctttcaaagtttcctcttcctccactttgatataatcttacctactggtattgacgagtatcatttacgatattcgaaacggaatttgaagtattcggagcttctagaccatttgaagggtctacacataagtggtacaaggacgatagagttctgagaggtacgacgaacctacgccgaacgccctgactgcgccgattacgtgagattcttatatcgacgccaagacatcacattcggacgcgacaacgacaaatagaggaacgaaacaccagaactgttgagatttttgggactgtgagcacgatgccgagcataagacttgcgaccgcgtcgcctgcgacgaagagctcgaggaaggagacgttggagcagatggagggtcttgcgagagcggcgggggggatgaatgcggattttctcgtcttgcctgaggcctacctcggtggatatccacgggggaaggacttcgggtgtaaggtgggcgataggacggcggagggacgggaggagtttagggagtattttaaagccgctgttgatctgggggatactgttaatggtggggcgggtgctggggagaagtgggttaggagggcgcttggggatgaagaggagtggcaggagagagattcgtggggggagaaagagaagaaggttagaggggatgggacgagagaggagattgagaggattgcgagggagacgggggtttttgttgtggttggtgttgtggaacgtgctgggggtagcttgtattgtgccgtgctgtatgtttgtccccgcaagggcgttattgggaagaggaggaaggttatgcctacgggtatggagagacttatttgggctcaagggagtcctgcgacgcttaaggctgttagtacgacgatacgtgggattcgagttaatctggcggcggcaatttgttgggagaattatatgccgcttttgaggcagagtctttatcagcagaacatcaacctttatcttgctcctactgctgatggacgagatacttggcttcctctcatgcgaaccatcgccctcgaaggccggtgttttgtcgtaagctcaaacatgtgcgttcgcgactgcgagcacgaaaacggaaacggaaagattcgaagttacagtcatgtcgggcacacacccacagtgcaattcaacgggaacccattccacgactcgccaaaaagacgacgaaactcctgcatgacggaagaaggcttcgagattgcgctccctactacgccgtcgttaaggatctcacaatcccacccacgccgacgctcaatcttcgatgagcagggtaacgagatcatcgtcccgggatctgagaacagagcagtggactacacgagacgacgaagtatcttcgatgaacaaggaaacgaaatcgtcatccctggcgcggatccgaagccagcaaatctttttgtccctccgtcccctatcgcgacgagtgctgtgatcgaagaccatcatgacgatgtggcgccggatttcgtgcccccgaaatggggcgtgaagtggagtcctggtaagacgatgggtgaggcgaggggagtgagagaggagaagaagttccgctcgagaggtggctcttgtatcgttgctccgaatggcgatgtgcttgccggcccccagtgggaggacgataggagtattgtttatgcggatgtggatcttgaggattgcgttaggggacgactggatcttgatgcggcggggagttattctcgaaacgactccttcaagttctccgtcgaggggctgaatcttgaccctctaccctattattaagctcagagttatgctgttcatttggctgaactcgctcggaatcgattgaatgttaggaggactggaagacggtcattacagatatgggtatacgaacatattggaaagcctgctaggagttggatggaagcaagtacgtgcatttagatatggatatggatgtgggtgtaaatactgtaccagattgatctacataaaccgtttgcatcgcttggagtcattcattttcgttcaacccatcgattattaccgcacttttacttctgatctcgcattgctaccccatttcatgttgcatctggttcatcctcctgttctgcgcaaaagcagtacctcgtgacattacacctcagcgcaaccgacctcagaactcctggcagctcatactgcagatatgggaaaagcaaacggaattcgggtatcttataaaagcgatctgccatccactcgcccgaaaagccaaccaaacgctcccgccagccctccagccctccagcccatgcctatccatccaggctgtccataataccgctaaatcgaacactcagacaaatctcacctcctcaccctagcaataagcatcgtatgctttctcataatcaacgacgcgattccctagaaggccgaagacccacacccgttcttcactcattgtccttctctttctccttggaagaggccggcttctcagccttctcctctgatgtattctcagagacctctttggggctggagagaggactggtgacaacaccggctacgctgccagtgatactatcggcgcggccatgtccaaagagaccactgcggatactggcaccgtcgccttgcatgctctgtttgccagcgtagagactgttgcggtcgccggcgagggctggggcaataccagttgttgagtagatgcttgttcgctcgtttcctacgagtcttgacgttgactggtgaaggccgggagtcggcggtacatcgcgggagccgtccatgttggcactgagcacactaagcggtagactctcgcggctacctccccagacggacgatggagcaagagctcgtactgaggcgtctgtgtccatggagcgtctacggcgtctcttgctggaagaggcgagagtgaggatggaggcattgtcggtcaacaagttgttggcggtcgcggtgttgtaggtggacggcgggccgtggggtgcgaggtgtggagggattgccgaagcgggcgagttcgttgggaagggctgagagaaggtgatggtctggttgtgttggttgtggccgccggtgtgatttccgttcgtgccattgggcgccatggactggattgtggtaagggtagtggtcagagatcgaaccgagggagcgggcgacgagaaggtgctgtcgccgcctttgcgcgagtcgaagccaccgccggctgtcctgctcgtgccagccaccgaggacgccatgtgtgagggtgcatgtatggaatgtgtagtgtcctggtccgtggactgggtgcgagcggcggactgggcaccggtggcggggtgtgaagcgccgtcgacggaggagcgcatcgagatgcggctatggctcatggagctgcgggcgcccatgccggttctcgaggtcgacatggacgggttgctgtgggtgctcaagggagcagcggggacgcggccggactgggggtagggattgttgttcttggtgcgtttcttgaacgcagcctcgcgcttgaagtggccattccggttgctgccgccgttggacgagctgctgttcttgaagttggcgagcttcttgacccacgtggcgaagggccgtcggcgacccgtgcgctcctggcgatctgaaagtagccctgttagatacttgcgcttgaggggcatggtgacggcgtacgatgtcgaggcagagaactcgtggatcagataggaaagtgtcgataatcaggaaagagagacacagagcagggtagctttgcttaccgtcaggcaggggagcagcagtctcagtcatggccattggagcgcagcagaacagatgccaaagtgctatgcacaccttggacgtgtggtgggtgacgattaggtttgccgtgacagagacgatgacgacgtgtcgtagcagcggcgagctgatgtaagtacgatgttcggacgtgctagtggtggcactctcgaacaggtaatggatctgaatctgtgccgttggaacaatgcactctgggggtattggattatttcctgggaggcgaggatgacgagggagacgaagtctaagtcagagcgtcggcacgtgaaagttaatctgtacaggttctgcttcctgcaacccaagcgcgtgaaagggggaaaagattgtaggtatctaggttttcagagagtgatgatatgatgttggaatgtgtttgcgccgtagtgagtgtgactgccgactttgttgatggaatgggtttacctaagtgtgtcattaggaaagggaaggctctgggtcgatattgagtgcatctctatccgatttcagtaaacagccaacaactttaggcctaatctcagcctagtccgatgcctg

SEQ ID NO: 8573 - DNA, 435 bp, Muscodor strobelii
  misc_feature: SGI cDNA ID NO. 562645
  misc_feature: Reduced expression when VOC is produced
  misc_feature: Encodes the peptide sequence at SEQ ID NO 8574
atggacacagacgcctcagtacgagctcttgctccatcgtccgtctggggaggtagccgcgagagtctaccgcttagtgtgctcagtgccaacatggacggctcccgcgatgtaccgccgactcccggccttcaccagtcaacgtcaagactcgtaggaaacgagcgaacaagcatctactcaacaactggtattgccccagccctcgccggcgaccgcaacagtctctacgctggcaaacagagcatgcaaggcgacggtgccagtatccgcagtggtctctttggacatggccgcgccgatagtatcactggcagcgtagccggtgttgtcaccagtcctctctccagccccaaagaggtctctgagaatacatcagaggagaaggctgagaagccggcctcttccaaggagaaagagaaggacaatgagtga

SEQ ID NO: 8574 - protein, 144 aa, Muscodor strobelii
  misc_feature: SGI Peptide ID NO. 562645
  misc_feature (1)..(140): NCBI GI: 46109462 Blast Desc: FG01613.1 [Gibberella zeae PH-1]
  misc_feature (1)..(132): NCBI GI: 256730532 Blast Desc: NECHADRAFT_89674 [Nectria haematococca mpVI 77-13-4]
  misc_feature (1)..(120): NCBI GI: 154316935 Blast Desc: BC1G_03885 [Botryotinia fuckeliana B05.10] gi|150845497|gb|EDN20690.1| BC1G_03885 [Botryotinia fuckeliana B05.10]
  misc_feature (1)..(140): NCBI GI: 116205253 Blast Desc: CHGG_10510 [Chaetomium globosum CBS 148.51] gi|88176638|gb|EAQ84106.1| CHGG_10510 [Chaetomium globosum CBS 148.51]
  misc_feature (1)..(125): NCBI GI: 156043739 Blast Desc: SS1G_10873 [Sclerotinia sclerotiorum 1980] gi|154695260|gb|EDN94998.1| SS1G_10873 [Sclerotinia sclerotiorum 1980]
  misc_feature (1)..(131): NCBI GI: 39942410 Blast Desc: MGG_03285 [Magnaporthe grisea 70-15] gi|145015710|gb|EDK00200.1| MGG_03285 [Magnaporthe grisea 70-15]
  misc_feature (1)..(121): NCBI GI: 171689702 Blast Desc: protein product [Podospora anserina] gi|170944813|emb|CAP70925.1| protein product [Podospora anserina]
  misc_feature (1)..(142): NCBI GI: 169603730 Blast Desc: SNOG_04873 [Phaeosphaeria nodorum SN15] gi|160706446|gb|EAT87264.2| SNOG_04873 [Phaeosphaeria nodorum SN15]
  misc_feature (1)..(120): NCBI GI: 189196582 Blast Desc: conserved [Pyrenophora tritici-repentis Pt-1C-BFP] gi|187980508|gb|EDU47134.1| conserved [Pyrenophora tritici-repentis Pt-1C-BFP]
  misc_feature (1)..(113): NCBI GI: 85110022 Blast Desc: NCU05386 [Neurospora crassa OR74A] gi|11595711|emb|CAC18137.1| [Neurospora crassa] gi|28924867|gb|EAA33963.1| [Neurospora crassa OR74A]
  misc_feature: Useful for introducing or modulating the production of volatile compounds
MDTDASVRALAPSSVWGGSRESLPLSVLSANMDGSRDVPPTPGLHQSTSRLVGNERTSIYSTTGIAPALAGDRNSLYAGKQSMQGDGASIRSGLFGHGRADSITGSVAGVVTSPLSSPKEVSENTSEEKAEKPASSKEKEKDNE

SEQ ID NO: 8575 - DNA, 3296 bp, Muscodor strobelii
  misc_feature: SGI EST ID NO. CUFF.20977.2
  misc_feature: Variant of the nucleotide sequence at SEQ ID NO 8573
cgggcatctctgggtgccgctgtcaggcatcggactaggctgagattaggcctaaagttgttggctgtttactgaaatcggatagagatgcactcaatatcgacccagagccttccctttcctaatgacacacttaggtaaacccattccatcaacaaagtcggcagtcacactcactacggcgcaaacacattccaacatcatatcatcactctctgaaaacctagatacctacaatcttttccccctttcacgcgcttgggttgcaggaagcagaacctgtacagattaactttcacgtgccgacgctctgacttagacttcgtctccctcgtcatcctcgcctcccaggaaataatccaatacccccagagtgcattgttccaacggcacagattcagatccattacctgttcgagagtgccaccactagcacgtccgaacatcgtacttacatcagctcgccgctgctacgacacgtcgtcatcgtctctgtcacggcaaacctaatcgtcacccaccacacgtccaaggtgtgcatagcactttggcatctgttctgctgcgctccaatggccatgactgagactgctgctcccctgcctgacgatcgccaggagcgcacgggtcgccgacggcccttcgccacgtgggtcaagaagctcgccaacttcaagaacagcagctcgtccaacggcggcagcaaccggaatggccacttcaagcgcgaggctgcgttcaagaaacgcaccaagaacaacaatccctacccccagtccggccgcgtccccgctgctcccttgagcacccacagcaacccgtccatgtcgacctcgagaaccggcatgggcgcccgcagctccatgagccatagccgcatctcgatgcgctcctccgtcgacggcgcttcacaccccgccaccggtgcccagtccgccgctcgcacccagtccacggaccaggacactacacattccatacatgcaccctcacacatggcgtcctcggtggctggcacgagcaggacagccggcggtggcttcgactcgcgcaaaggcggcgacagcaccttctcgtcgcccgctccctcggttcgatctctgaccactacccttaccacaatccagtccatggcgcccaatggcacgaacggaaatcacaccggcggccacaaccaacacaaccagaccatcaccttctctcagcccttcccaacgaactcgcccgcttcggcaatccctccacacctcgcaccccacggcccgccgtccacctacaacaccgcgaccgccaacaacttgttgaccgacaatgcctccatcctcactctcgcctcttccagcaagagacgccgtagacgctccatggacacagacgcctcagtacgagctcttgctccatcgtccgtctggggaggtagccgcgagagtctaccgcttagtgtgctcagtgccaacatggacggctcccgcgatgtaccgccgactcccggccttcaccagtcaacgtcaagactcgtaggaaacgagcgaacaagcatctactcaacaactggtattgccccagccctcgccggcgaccgcaacagtctctacgctggcaaacagagcatgcaaggcgacggtgccagtatccgcagtggtctctttggacatggccgcgccgatagtatcactggcagcgtagccggtgttgtcaccagtcctctctccagccccaaagaggtctctgagaatacatcagaggagaaggctgagaagccggcctcttccaaggagaaagagaaggacaatgagtgaagaacgggtgtgggtcttcggccttctagggaatcgcgtcgttgattatgagaaagcatacgatgcttattgctagggtgaggaggtgagatttgtctgagtgttcgatttagcggtattatggacagcctggatggataggcatgggctggagggctggagggctggcgggagcgtttggttggcttttcgggcgagtggatggcagatcgcttttataagatacccgaattccgtttgcttttcccatatctgcagtatgagctgccaggagttctgaggtcggttgcgctgaggtgtaatgtcacgaggtactgcttttgcgcagaacaggaggatgaaccagatgcaacatgaaatggggtagcaatgcgagatcagaagtaaaagtgcggtaataatcgatgggttgaacgaaaatgaatgactccaagcgatgcaaacggtttatgtagatcaatctggtacagtatttacacccacatccatatccatatctaaatgcacgtacttgcttccatccaactcctagcaggctttccaatatgttcgtatacccatatctgtaatgaccgtcttccagtcctcctaacattcaatcgattccgagcgagttcagccaaatgaacagcataactctgagcttaataatagggtagagggtcaagattcagcccctcgacggagaacttgaaggagtcgtttctgtacatcaacgtcagtaaatgtatacggaaagcacataatagaaacctgacagaggagagaaaagaaggacaaactcaccgagaataactccccgccgcatcaagatccagtcgtcccctaacgcaatcctcaagatccacatccgcataaacaatactcctatcgtcctcccactgggggccggcaagcacatcgccattcggagcaacgatacaagagccacctctcgagcggaacttcttctcctctctcactcccctcgcctcacccatcgtcttaccaggactccacttcacgccccatttcgggggcacgaaatccggcgccacatcgtcatgatggtcttcgatcacagcactcgtcgcgataggggacggagggacaaaaagatttgctggcttcggatccgcgccagggatgacgatttcgtttccttgttcatcgaagatacttcgtcgtctcgtgtagtccactgctctgttctcagatcccgggacgatgatctcgttaccctgctcatcgaagattgagcgtcggcgtgggtgggattgtgagatccttaacgacggcgtagtagggagcgcaatctcgaagccttcttccgtcatgcaggagtttcgtcgtctttttggcgagtcgtggaatgggttcccgttgaattgcactgtgggtgtgtgcccgacatgactgtaacttcgaatctttccgtttccgttttcgtgctcgcagtcgcgaacgcacatgtttgagcttacgacaaaacaccggccttcgagggcgatggttcgc

SEQ ID NO: 8576 - DNA, 2967 bp, Muscodor strobelii
  misc_feature: SGI cDNA ID NO. 562646
  misc_feature: Encodes the peptide sequence at SEQ ID NO 8577
atgtctatccggccgttgccagatgatgttattgcccagatcaagtcatcgacagctatcacaagcctcaatggcgccatcagcggcctgcttcgaaatagtctggatgctggagcgaccaaggtgacgatatctgtagactacttgcgtggtggttgctctattgaagatgatggcattggaatttctcctgtcgagtttcgacctgaagggggtttggcgaaaccgcatttcacatcgaagtacccttcgaaggagaccgttcacggaaaatatgggatgtttatagcatcattagcatcattgtccttgttgtctatcacatcccaccaccgcgagtatttatctcataattccctgcaagtccataattccgaggttctggcccgtcatacaccttcaccccctgatatgagagtactcagcttctctcatggtacaagagtgactgtccgagatctttttggattgatgcccgtcagagtgaaacagagagcgcttgaagtggagagaggcgcacatagcaaaagttgggagctcctcaagcgatcgatggtcgggctgctcttatcgtggcccaaatcaatatcgctacgcataagagagtcatcgagtcaatggagtctcagcttcagaagcaatgaactagcctcgatatctgaagactctcaggcgacgaggctccagcttgcttcgcgtgtgtccaagattctacagcaagcacaattatccgaggacaacggttcggagtcttgggtccctttaagagcttctgcgggaaagttaagcatcataggcgtcgtgtcattagacccgatctcgaacaagcgaactcagtacatcagtataggcatcctgcccgtacctaatgagtacggtacgaatatcctgtatgaagaagtcaatcgactattctcaagctctagtttcggtgtcgaggaagatacacgcattattgacgatgatgaacgggaaagaagagggaaagatggtcgctacaaaacagacgggttcacgggccaggagctgaaaggccgtaaaggtgtagatcgttggccaatgttctacatcaggattgagatggataagacgaatggaaattcatcgtcctatgaaatcaatgatatactcgatgaggagcgtggaagcctcaagatcatacttgatcttctcaaagccatgctttacgagtttctgaagaaatatcatttccggcccaggcgcatcagacgcacaggagacgacaaggccggtgaacattcgaaacaagcctctccaatcccaaggatgtcgagaaactctagttcaagatcaaactcgcgtactgcaataaggaggcagcccacaagtgacctgtcaaccacacggcttgccatacgagctgatcgcgatcctcgtcaacgacccgaatctccattcgacctatggtcaagaatcaagtcaggtccagaccaaccgcttcatgataagtcattcaaagatgggagcagtaagaatacatcggctacgagtcttacttttcctgggaacgtaccaattgcgaatgtaggggactgttcgtttccaccactctttggagaagatggcaatttaattcggccgccattcgctgatctgaatatccccattgacgattatactgcgcatggagagactcaccacgatactcggactccagatcaggctgtcactacggatttcggcgaaggtatacagtggatcaatccaattaccaaagagacattgatcatcaaccccagaacaggatttgctacggcgccacacttcgagactggcccatctaaggaacagacacgtggactacgagcaaaggtgatatcgaacaagaagcttcggctacacagcttacccaatccgaagacagataggagcgaatggctagagaatatactttcatcatgggataatcccatcttcaaaacaacagagccacgaattcccagtgcgttcaatgaagaatacaatcaagcagacttgcaagctttcggttgtaaagcccggttccaagacgggtcatccatagacccttcagtccagggaagagtgtcaaaagcagctttacgaaacgctaagttcatcgcacaagtcgatcgcaaattcatctttgtaaaagtgcccttgctcaataacgctggtggctccaacgagacgttacagcttacatcatctcttttactcattgtcgatcagcatgctgccgatgaacgatgccgagtggaagagctcatgagagactactttaccacgaccaaaaatggtactccagcagcacccgcttcagactctgcgtcgacactgctgaacgtggttgctgcgacggaactcctggagaagccaatcatgttcgacgtgtcggtagcagatgcccgacaactcgaacggacgaggaagtgcttcgcatactgggggatacactttgaatgcctctcaatgtcgccgccaacaggacaagcaaaagtgagccgagtaaaggtcacaagactgccgcctagtatcactgaaaggtgccgactggaaccacgtttgcttattgagcttatgagaaaggagacctggaaaatggatgagcatggctatagtggtctgcccggcacaacacaaggagctgccgtggaagagagcaatggctcagagtcacactggatcggaagcatgcatggatgtcctcaagggattctggacatgattaattcccgcgcatgccgaagctctatcatgttcaatgaccccctccccaaggatgaatgcatggatctattgaggcgcttagcagactgcgcattcccattccaatgtgcgcatggtcggccgtctatggtgcctcttgtggatgtgggcgatagccgagcaagtattcgggataattgggaaagtccaaagatgtcctttggtagggcatttaaacaatggaaagagggagagtctatgatgaaggaccgtgaatga

SEQ ID NO: 8577 - protein, 988 aa, Muscodor strobelii
  misc_feature: SGI Peptide ID NO. 562646
  misc_feature (18)..(72): Pfam Id: PF02518 Pfam Desc: Histidine kinase-, DNA gyrase B-, and HSP90-like ATPase
  misc_feature (732)..(753): Pfam Id: PF08676 Pfam Desc: MutL C terminal dimerisation domain
  misc_feature (1)..(979): NCBI GI: 46109464 Blast Desc: FG01614.1 [Gibberella zeae PH-1]
  misc_feature (1)..(955): NCBI GI: 171689700 Blast Desc: protein product [Podospora anserina] gi|170944812|emb|CAP70924.1| protein product [Podospora anserina]
  misc_feature (2)..(979): NCBI GI: 189196580 Blast Desc: DNA mismatch repair protein [Pyrenophora tritici-repentis Pt-1C-BFP] gi|187980507|gb|EDU47133.1| DNA mismatch repair protein [Pyrenophora tritici-repentis Pt-1C-BFP]
  misc_feature (1)..(899): NCBI GI: 85110020 Blast Desc: NCU05385 [Neurospora crassa OR74A] gi|16944472|emb|CAC18267.2| related to dna mismatch repair homologue (hpms2) [Neurospora crassa] gi|28924866|gb|EAA33962.1|
  misc_feature (2)..(953): NCBI GI: 226277741 Blast Desc: DNA mismatch repair protein [Paracoccidioides brasiliensis Pb01]
  misc_feature (2)..(953): NCBI GI: 226293032 Blast Desc: DNA mismatch repair protein [Paracoccidioides brasiliensis Pb18]
  misc_feature (2)..(953): NCBI GI: 239606597 Blast Desc: DNA mismatch repair protein [Ajellomyces dermatitidis ER-3]
  misc_feature (2)..(931): NCBI GI: 261197159 Blast Desc: DNA mismatch repair protein [Ajellomyces dermatitidis SLH14081] gi|239595612|gb|EEQ78193.1| DNA mismatch repair protein [Ajellomyces dermatitidis SLH14081]
  misc_feature (3)..(952): NCBI GI: 255949788 Blast Desc: Pc22g17480 [Penicillium chrysogenum Wisconsin 54-1255] gi|211592678|emb|CAP99036.1| Pc22g17480 [Penicillium chrysogenum Wisconsin 54-1255]
  misc_feature (2)..(953): NCBI GI: 119188093 Blast Desc: CIMG_04094 [Coccidioides immitis RS]
MSIRPLPDDVIAQIKSSTAITSLNGAISGLLRNSLDAGATKVTISVDYLRGGCSIEDDGIGISPVEFRPEGGLAKPHFTSKYPSKETVHGKYGMFIASLASLSLLSITSHHREYLSHNSLQVHNSEVLARHTPSPPDMRVLSFSHGTRVTVRDLFGLMPVRVKQRALEVERGAHSKSWELLKRSMVGLLLSWPKSISLRIRESSSQWSLSFRSNELASISEDSQATRLQLASRVSKILQQAQLSEDNGSESWVPLRASAGKLSIIGVVSLDPISNKRTQYISIGILPVPNEYGTNILYEEVNRLFSSSSFGVEEDTRIIDDDERERRGKDGRYKTDGFTGQELKGRKGVDRWPMFYIRIEMDKTNGNSSSYEINDILDEERGSLKIILDLLKAMLYEFLKKYHFRPRRIRRTGDDKAGEHSKQASPIPRMSRNSSSRSNSRTAIRRQPTSDLSTTRLAIRADRDPRQRPESPFDLWSRIKSGPDQPLHDKSFKDGSSKNTSATSLTFPGNVPIANVGDCSFPPLFGEDGNLIRPPFADLNIPIDDYTAHGETHHDTRTPDQAVTTDFGEGIQWINPITKETLIINPRTGFATAPHFETGPSKEQTRGLRAKVISNKKLRLHSLPNPKTDRSEWLENILSSWDNPIFKTTEPRIPSAFNEEYNQADLQAFGCKARFQDGSSIDPSVQGRVSKAALRNAKFIAQVDRKFIFVKVPLLNNAGGSNETLQLTSSLLLIVDQHAADERCRVEELMRDYFTTTKNGTPAAPASDSASTLLNVVAATELLEKPIMFDVSVADARQLERTRKCFAYWGIHFECLSMSPPTGQAKVSRVKVTRLPPSITERCRLEPRLLIELMRKETWKMDEHGYSGLPGTTQGAAVEESNGSESHWIGSMHGCPQGILDMINSRACRSSIMFNDPLPKDECMDLLRRLADCAFPFQCAHGRPSMVPLVDVGDSRASIRDNWESPKMSFGRAFKQWKEGESMMKDRE

SEQ ID NO: 8578 - DNA, 3456 bp, Muscodor strobelii
  misc_feature: SGI EST ID NO. CUFF.20728.0
  misc_feature: Variant of the nucleotide sequence at SEQ ID NO 8576
ccaccacatatgctgtcaaaagccctggcttaatattggcaacgatcattcaccatcagtagcgaaaccgaggctgtcatacatccgaactaggctcactgatgctcactgggcccaacgtctgcgcatgaccatcataaattaccaccgtcacgaagcgtctgtcacttgacccaagccagaggcaatatactactctccaacgccagtcagcatcaatgaataacaacgaagacaatactgcacaaccgtcagggtaaacaagcgtcatgtggactctcgactacgatttaacatagggatgtctatccggccgttgccagatgatgttattgcccagatcaagtcatcgacagctatcacaagcctcaatggcgccatcagcggcctgcttcgaaatagtctggatgctggagcgaccaaggtgacgatatctgtagactacttgcgtggtggttgctctattgaagatgatggcattggaatttctcctgtcgagtttcgacctgaagggggtttggcgaaaccgcatttcacatcgaagtacccttcgaaggagaccgttcacggaaaatatgggatgtttatagcatcattagcatcattgtccttgttgtctatcacatcccaccaccgcgagtatttatctcataattccctgcaagtccataattccgaggttctggcccgtcatacaccttcaccccctgatatgagagtactcagcttctctcatggtacaagagtgactgtccgagatctttttggattgatgcccgtcagagtgaaacagagagcgcttgaagtggagagaggcgcacatagcaaaagttgggagctcctcaagcgatcgatggtcgggctgctcttatcgtggcccaaatcaatatcgctacgcataagagagtcatcgagtcaatggagtctcagcttcagaagcaatgaactagcctcgatatctgaagactctcaggcgacgaggctccagcttgcttcgcgtgtgtccaagattctacagcaagcacaattatccgaggacaacggttcggagtcttgggtccctttaagagcttctgcgggaaagttaagcatcataggcgtcgtgtcattagacccgatctcgaacaagcgaactcagtacatcagtataggcatcctgcccgtacctaatgagtacggtacgaatatcctgtatgaagaagtcaatcgactattctcaagctctagtttcggtgtcgaggaagatacacgcattattgacgatgatgaacgggaaagaagagggaaagatggtcgctacaaaacagacgggttcacgggccaggagctgaaaggccgtaaaggtgtagatcgttggccaatgttctacatcaggattgagatggataagacgaatggaaattcatcgtcctatgaaatcaatgatatactcgatgaggagcgtggaagcctcaagatcatacttgatcttctcaaagccatgctttacgagtttctgaagaaatatcatttccggcccaggcgcatcagacgcacaggagacgacaaggccggtgaacattcgaaacaagcctctccaatcccaaggatgtcgagaaactctagttcaagatcaaactcgcgtactgcaataaggaggcagcccacaagtgacctgtcaaccacacggcttgccatacgagctgatcgcgatcctcgtcaacgacccgaatctccattcgacctatggtcaagaatcaagtcaggtccagaccaaccgcttcatgataagtcattcaaagatgggagcagtaagaatacatcggctacgagtcttacttttcctgggaacgtaccaattgcgaatgtaggggactgttcgtttccaccactctttggagaagatggcaatttaattcggccgccattcgctgatctgaatatccccattgacgattatactgcgcatggagagactcaccacgatactcggactccagatcaggctgtcactacggatttcggcgaaggtatacagtggatcaatccaattaccaaagagacattgatcatcaaccccagaacaggatttgctacggcgccacacttcgagactggcccatctaaggaacagacacgtggactacgagcaaaggtgatatcgaacaagaagcttcggctacacagcttacccaatccgaagacagataggagcgaatggctagagaatatactttcatcatgggataatcccatcttcaaaacaacagagccacgaattcccagtgcgttcaatgaagaatacaatcaagcagacttgcaagctttcggttgtaaagcccggttccaagacgggtcatccatagacccttcagtccagggaagagtgtcaaaagcagctttacgaaacgctaagttcatcgcacaagtcgatcgcaaattcatctttgtaaaagtgcccttgctcaataacgctggtggctccaacgagacgttacagcttacatcatctcttttactcattgtcgatcagcatgctgccgatgaacgatgccgagtggaagagctcatgagagactactttaccacgaccaaaaatggtactccagcagcacccgcttcagactctgcgtcgacactgctgaacgtggttgctgcgacggaactcctggagaagccaatcatgttcgacgtgtcggtagcagatgcccgacaactcgaacggacgaggaagtgcttcgcatactgggggatacactttgaatgcctctcaatgtcgccgccaacaggacaagcaaaagtgagccgagtaaaggtcacaagactgccgcctagtatcactgaaaggtgccgactggaaccacgtttgcttattgagcttatgagaaaggagacctggaaaatggatgagcatggctatagtggtctgcccggcacaacacaaggagctgccgtggaagagagcaatggctcagagtcacactggatcggaagcatgcatggatgtcctcaagggattctggacatgattaattcccgcgcatgccgaagctctatcatgttcaatgaccccctccccaaggatgaatgcatggatctattgaggcgcttagcagactgcgcattcccattccaatgtgcgcatggtcggccgtctatggtgcctcttgtggatgtgggcgatagccgagcaagtattcgggataattgggaaagtccaaagatgtcctttggtagggcatttaaacaatggaaagagggagagtctatgatgaaggaccgtgaatgatagtaatttagcattaggcattagctttatggctagtatggatagatatatgctttttgtagtagagatacctgacaacagtcaagtttatcaaatgactatacatgattgattggcctcgacttccacgctgtcttagaggattataggtctattggggttcattcatacccattctcgtagcaaac

SEQ ID NO: 8579 - DNA, 2943 bp, Muscodor strobelii
  misc_feature: SGI cDNA ID NO. 562647
  misc_feature: Encodes the peptide sequence at SEQ ID NO 8580
atggctttgctgttgtggaaagcattcgacttcttcgaggtcagccaggtcaagctcggtgacgacgaaacccgatccttcttcgagaacaacgagatatcgagcgtctgttcgggctccgagagcctattccttggcagcgataatggatatgtccggatcatcggtcccagctggaaggtcatccgcagcttccaggcgcatgagacggggcgcatcacacatatgcgccaggtcgagggcaccagcttgttgatcaccgtatccgaggatttgagcagcgagcctgtgctgaaggtttgggcgcttgacaagccggtgaagaagacgggtctgccgacgtgtttgagcactatcagtatcaacaacggacggaagcagttcccgatctcggcattcactgcgcttgatgatctatcgcagctagcagtgggcttcgcaaatggggcggtcactgtcatacgaggcgaccttatccacgatcgaggcaccaaacagcggattgtatacgaatccgaagagcctgttaccgggatagaatttgtctcagacccgaaacatactacactgttcgtcgcgactacttcgaagcttctgaagctgataatatcgggtcgaggacatggacaaccaccgaggacagtggaagactctggatgcgctgcgggatgtatgacgcttaataagaaaaccggcgatataatagtggtccgggaggatgctgtgtactattacaccctggacggaagagggctctgcttcgctaacgatggggctacgacacttgtcgaaacgtatcaagactatgttgcccttgtatcaccaccttcgagctcaagagatggagataatatccgaaggcgatttggtggcgctagcacggagtcgctgtttaatgctgcgactttcacaatggtagatccgcaacttcagatcgttgctcataccgaaactctcatatcgcaagtcaaggcactcttccagatctggggagatctgttcatcttgacacaagatggaaaggtcaatcgctaccatgagaaatcattacaacagagactcgaactactgtatcaacgtaacctttacccccttgccatcaatcttgcccagaaatcgggaatggacggccaacaacagaacataatctacagaaaatacggtgaccacctatatcagaagggcgactatgacagtgctatgtcgcagtacatcaaagcaattgacagcacagagccttcgcaggtcattcgcaagtttcttgacacccagagaatacacaacctcattgagtacttagaggagttgcatgagcaccacaaagccacagctgatcacacaaccttattacttaattgctatgcgaagctgaaagatgttcagaaactcgaaaattttatcaaatccgaaggcgacctgaagttcgacgtggacacggccatcgccatgtgccggcagggtggttattttgaacaagcagcttacctcgctaccaagcatggagagagcgatttagtcgttgacattcttattgaggattcgaagggttattctgaggcgctggagttcatctggcatcttgacgttgaagttgcatacccttgcttgatgaaatatgctcgggttctattggagcattgccctgaggacacgacgaaattctttgttgattactacacgggcaaatacaaacccaaagtatacactgctacgaccataaccgaagcgccagcatctactgggaatcgcttggctgctggcgttgttggagctgccactggagccgctacggctgtaacaaacctaaccagtttgctgccgttgccatatatgggagcctcctcctcgcctgcgacaccggggcagactcgacctgatgcagctgcagaaacagccatacagttagaagatgacaatgttccgaactatactccaccgccacctcgatccgcattctcgtcattcatagaccaccctgatgagttcatcgtatttctcgaagcatgtctagcatcagactcgctagaagacgagaacaaagcagatatatacacaacccttttcgagatgtatctccacaaggccaaagaaggcaaaagcgtacaaaaggaagaatgggagctgaaagccaagaagctcatcgaaggacacgatcttcccatcgagaactcgaacgttctgcttctttctcatctctccgacttccgcgacggcacgacactcgtcaaagagcagtcaggtcttctcttcgacatcttccgctcttacacatcagccaaagatacccacggtgccattagagcactgagaaaatacggacccagggagcctcaactatatcccgctgcgttagcatattttacttcagatgcacgcatactggatgaagcgggaccggaagaactgtcaagtgtattgaagaagatagacgccgacggtctcatggcaccgctccaagtcatacaaacactaggttccaacgcagtagcgacaatgggcatgataaaaccctacctgcacgaaaccatcacgcgggagcgtcgcgaaatttcttccaataaaaggcagataaagtccttccgtacggaaacagagcagaaacgcctcgagataaccgagttaggctctaaaccggcggtgttccaagctcaacgttgtccagggtgtggtgcaccactggatttgcccgtggtgcattttttgtgtaaacatagttttcatcagaggtgtttgaagggtggtgcggatgggggggatgcggaatgtccggtttgtgcggcgaataatgccgcggttagggctatgaagagggggcaggaggagaggagtgagaggcatgatttgtttaaagatgcgctggagaagggggatgagaggtttaaggttgttgcgcagtggtttgggcagggggttatggaggggggtggtgttgagggtcgatga

SEQ ID NO: 8580 - protein, 980 aa, Muscodor strobelii
  misc_feature: SGI Peptide ID NO. 562647
  misc_feature (4)..(972): NCBI GI: 145608204 Blast Desc: MGG_03283 [Magnaporthe grisea 70-15] gi|145015712|gb|EDK00202.1| MGG_03283 [Magnaporthe grisea 70-15]
  misc_feature (6)..(976): NCBI GI: 171689698 Blast Desc: protein product [Podospora anserina] gi|170944811|emb|CAP70923.1| protein product [Podospora anserina]
  misc_feature (4)..(978): NCBI GI: 16416079 Blast Desc: related to PEP5 protein [Neurospora crassa]
  misc_feature (6)..(978): NCBI GI: 256730533 Blast Desc: [Nectria haematococca mpVI 77-13-4]
  misc_feature (1)..(978): NCBI GI: 189189850 Blast Desc: PTRG_00931 [Pyrenophora tritici-repentis Pt-1C-BFP] gi|187972870|gb|EDU40369.1| PTRG_00931 [Pyrenophora tritici-repentis Pt-1C-BFP]
  misc_feature (6)..(978): NCBI GI: 46109460 Blast Desc: FG01612.1 [Gibberella zeae PH-1]
  misc_feature (4)..(978): NCBI GI: 164424831 Blast Desc: NCU05422 [Neurospora crassa OR74A] gi|157070680|gb|EAA34009.2| NCU05422 [Neurospora crassa OR74A]
  misc_feature (6)..(969): NCBI GI: 169607727 Blast Desc: SNOG_06922 [Phaeosphaeria nodorum SN15] gi|160701479|gb|EAT85573.2| SNOG_06922 [Phaeosphaeria nodorum SN15]
  misc_feature (1)..(978): NCBI GI: 242819083 Blast Desc: vacuolar protein sorting protein (VPS11), [Talaromyces stipitatus ATCC 10500] gi|218713707|gb|EED13131.1| vacuolar protein sorting protein (VPS11), [Talaromyces stipitatus ATCC
  misc_feature (1)..(978): NCBI GI: 240108822 Blast Desc: vacuolar membrane protein pep11, [Coccidioides posadasii C735 delta SOWgp]
MALLLWKAFDFFEVSQVKLGDDETRSFFENNEISSVCSGSESLFLGSDNGYVRIIGPSWKVIRSFQAHETGRITHMRQVEGTSLLITVSEDLSSEPVLKVWALDKPVKKTGLPTCLSTISINNGRKQFPISAFTALDDLSQLAVGFANGAVTVIRGDLIHDRGTKQRIVYESEEPVTGIEFVSDPKHTTLFVATTSKLLKLIISGRGHGQPPRTVEDSGCAAGCMTLNKKTGDIIVVREDAVYYYTLDGRGLCFANDGATTLVETYQDYVALVSPPSSSRDGDNIRRRFGGASTESLFNAATFTMVDPQLQIVAHTETLISQVKALFQIWGDLFILTQDGKVNRYHEKSLQQRLELLYQRNLYPLAINLAQKSGMDGQQQNIIYRKYGDHLYQKGDYDSAMSQYIKAIDSTEPSQVIRKFLDTQRIHNLIEYLEELHEHHKATADHTTLLLNCYAKLKDVQKLENFIKSEGDLKFDVDTAIAMCRQGGYFEQAAYLATKHGESDLVVDILIEDSKGYSEALEFIWHLDVEVAYPCLMKYARVLLEHCPEDTTKFFVDYYTGKYKPKVYTATTITEAPASTGNRLAAGVVGAATGAATAVTNLTSLLPLPYMGASSSPATPGQTRPDAAAETAIQLEDDNVPNYTPPPPRSAFSSFIDHPDEFIVFLEACLASDSLEDENKADIYTTLFEMYLHKAKEGKSVQKEEWELKAKKLIEGHDLPIENSNVLLLSHLSDFRDGTTLVKEQSGLLFDIFRSYTSAKDTHGAIRALRKYGPREPQLYPAALAYFTSDARILDEAGPEELSSVLKKIDADGLMAPLQVIQTLGSNAVATMGMIKPYLHETITRERREISSNKRQIKSFRTETEQKRLEITELGSKPAVFQAQRCPGCGAPLDLPVVHFLCKHSFHQRCLKGGADGGDAECPVCAANNAAVRAMKRGQEERSERHDLFKDALEKGDERFKVVAQWFGQGVMEGGGVEGR

SEQ ID NO: 8581 - DNA, 3648 bp, Muscodor strobelii
  misc_feature: SGI EST ID NO. CUFF.20881.0
  misc_feature: Variant of the nucleotide sequence at SEQ ID NO 8579
cgctagtatctgtagacatgatcagagagaagccaatgccacagttatagctgtcgcacgcgcacatgggtatgcaccatggctttgctgttgtggaaagcattcgacttcttcgaggtcagccaggtcaagctcggtgacgacgaaacccgatccttcttcgagaacaacgagatatcgagcgtctgttcgggctccgagagcctattccttggcagcgataatggatatgtccggatcatcggtcccagctggaaggtcatccgcagcttccaggcgcatgagacggggcgcatcacacatatgcgccaggtcgagggcaccagcttgttgatcaccgtatccgaggatttgagcagcgagcctgtgctgaaggtttgggcgcttgacaagccggtgaagaagacgggtctgccgacgtgtttgagcactatcagtatcaacaacggacggaagcagttcccgatctcggcattcactgcgcttgatgatctatcgcagctagcagtgggcttcgcaaatggggcggtcactgtcatacgaggcgaccttatccacgatcgaggcaccaaacagcggattgtatacgaatccgaagagcctgttaccgggatagaatttgtctcagacccgaaacatactacactgttcgtcgcgactacttcgaagcttctgaagctgataatatcgggtcgaggacatggacaaccaccgaggacagtggaagactctggatgcgctgcgggatgtatgacgcttaataagaaaaccggcgatataatagtggtccgggaggatgctgtgtactattacaccctggacggaagagggctctgcttcgctaacgatggggctacgacacttgtcgaaacgtatcaagactatgttgcccttgtatcaccaccttcgagctcaagagatggagataatatccgaaggcgatttggtggcgctagcacggagtcgctgtttaatgctgcgactttcacaatggtagatccgcaacttcagatcgttgctcataccgaaactctcatatcgcaagtcaaggcactcttccagatctggggagatctgttcatcttgacacaagatggaaaggtcaatcgctaccatgagaaatcattacaacagagactcgaactactgtatcaacgtaacctttacccccttgccatcaatcttgcccagaaatcgggaatggacggccaacaacagaacataatctacagaaaatacggtgaccacctatatcagaagggcgactatgacagtgctatgtcgcagtacatcaaagcaattgacagcacagagccttcgcaggtcattcgcaagtttcttgacacccagagaatacacaacctcattgagtacttagaggagttgcatgagcaccacaaagccacagctgatcacacaaccttattacttaattgctatgcgaagctgaaagatgttcagaaactcgaaaattttatcaaatccgaaggcgacctgaagttcgacgtggacacggccatcgccatgtgccggcagggtggttattttgaacaagcagcttacctcgctaccaagcatggagagagcgatttagtcgttgacattcttattgaggattcgaagggttattctgaggcgctggagttcatctggcatcttgacgttgaagttgcatacccttgcttgatgaaatatgctcgggttctattggagcattgccctgaggacacgacgaaattctttgttgattactacacgggcaaatacaaacccaaagtatacactgctacgaccataaccgaagcgccagcatctactgggaatcgcttggctgctggcgttgttggagctgccactggagccgctacggctgtaacaaacctaaccagtttgctgccgttgccatatatgggagcctcctcctcgcctgcgacaccggggcagactcgacctgatgcagctgcagaaacagccatacagttagaagatgacaatgttccgaactatactccaccgccacctcgatccgcattctcgtcattcatagaccaccctgatgagttcatcgtatttctcgaagcatgtctagcatcagactcgctagaagacgagaacaaagcagatatatacacaacccttttcgagatgtatctccacaaggccaaagaaggcaaaagcgtacaaaaggaagaatgggagctgaaagccaagaagctcatcgaaggacacgatcttcccatcgagaactcgaacgttctgcttctttctcatctctccgacttccgcgacggcacgacactcgtcaaagagcagtcaggtcttctcttcgacatcttccgctcttacacatcagccaaagatacccacggtgccattagagcactgagaaaatacggacccagggagcctcaactatatcccgctgcgttagcatattttacttcagatgcacgcatactggatgaagcgggaccggaagaactgtcaagtgtattgaagaagatagacgccgacggtctcatggcaccgctccaagtcatacaaacactaggttccaacgcagtagcgacaatgggcatgataaaaccctacctgcacgaaaccatcacgcgggagcgtcgcgaaatttcttccaataaaaggcagataaagtccttccgtacggaaacagagcagaaacgcctcgagataaccgagttaggctctaaaccggcggtgttccaagctcaacgttgtccagggtgtggtgcaccactggatttgcccgtggtgcattttttgtgtaaacatagttttcatcagaggtgtttgaagggtggtgcggatgggggggatgcggaatgtccggtttgtgcggcgaataatgccgcggttagggctatgaagagggggcaggaggagaggagtgagaggcatgatttgtttaaagatgcgctggagaagggggatgagaggtttaaggttgttgcgcagtggtttgggcagggggttatggaggggggtggtgttgagggtcgatgagactgaatggaaatatagcgggattgtgagaattggcaatgaatgattgtgagacatgattgtgatggttggttgtgcttgtgatatttatgtctgtggtcgagctgactccatatattggctatcttggccggcttgttacttttgtgtgggttggtattctatcagatcgctggtggtacgtaatatggtacagagtaagttacatgtagtgctacagttcttcatgttttctctaagtatatcgtctattctaattactcctctttcctctattattcatttcttcacatccccaccaacaccaaatagtccattcaaccagcgtccaatactctcgttttcactcccaagttgagagcgccagtcattgatgtgatctagatgctgtccttttaacggacttgataagtctatagatgatgtgatgtcggtgatttctgcgtgtcgaacggtcatgtgtataccttgtggctcttcagggcgcagatgggggatttccagggcatggtcagtgaacgaatctgggaggtcggggggaaaaattggacgtaggcgaggatcttcggatgttgggtgggttgagaatgtgaataggggggtttgggcgtatatccattttcgtga

SEQ ID NO: 8582 - DNA, 1329 bp, Muscodor strobelii
  misc_feature: SGI cDNA ID NO. 562648
  misc_feature: Reduced expression when VOC is produced
  misc_feature: Encodes the peptide sequence at SEQ ID NO 8583
atggccctcaacggcacgacccggctcagcagcagcataagacagctgctcacaaaccagcacgtccatcgcaccacatctcataccctcaaaagccgccgataccatcgctcaaccccaagaaccccaaacttctcaccagaatcaatctcctccccctcaaacccagttcaaatctacatatcccgcacaacagatccctaccttaacctctcaatcgagcacttcctgctccaaaaatcgcacccggactccgtcatcctactcctctacacaaaccgcccctgcatagtcataggccggaaccaaaatccctggctcgaagtaaacctcgggctcatcaaccaaccgggaatattatcccgcctgcgcaccaatcctaacccaagccatgaatggctcgtgaggagcgaagggagagacgacgtcctcctcgtgcgtcgtcgctcaggcggcggaaccgtgttccacgatttcggaaatgtgaactacagcgtcatatgtccgcccgcgtcttttgacaggaacagacacgctgagatggttgttcgtgctctccggggtctcgacatcaagcatcaggtccgcgtcaatgagcggcatgacatcgtgctcgacgtcgctggcgaaaatcctggcgataagacgaagacgtttaagatttctggctcggcgtataaacttactcgcaccagatctctccaccacgggacatgtctgctttcctcgcctcacttaggtattcttggaaagttgttaagatcacccgctgagccgtatatcaaggggcgtggcgttgaaagtgtaaggtcgtctgtgaggaatgtcggtgccatgaatgatgagtttgtatgggccgttactcatgagttcttcggcatgtatgaaaaagccggtagtaagaacatagaggttaaatgggttgatgcggacgacgttgcggagattcctgagatacaggcgggtgtcaaagagttacggtcacgaaaatggatatacgcccaaacccccctattcacattctcaacccacccaacatccgaagatcctcgcctacgtccaatttttccccccgacctcccagattcgttcactgaccatgccctggaaatcccccatctgcgccctgaagagccacaaggtatacacatgaccgttcgacacgcagaaatcaccgacatcacatcatctatagacttatcaagtccgttaaaaggacagcatctagatcacatcaatgactggcgctctcaacttgggagtgaaaacgagagtattggacgctggttgaatggactatttggtgttggtggggatgtgaagaaatga

SEQ ID NO: 8583 - protein, 442 aa, Muscodor strobelii
  misc_feature: SGI Peptide ID NO. 562648
  misc_feature (123)..(206): Pfam Id: PF03099 Pfam Desc: Biotin/lipoate A/B protein ligase family
  misc_feature (57)..(434): NCBI GI: 16416080 Blast Desc: related to lipoyltransferase [Neurospora crassa]
  misc_feature (30)..(436): NCBI GI: 46109520 Blast Desc: FG01642.1 [Gibberella zeae PH-1]
  misc_feature (48)..(435): NCBI GI: 256730512 Blast Desc: NECHADRAFT_30038 [Nectria haematococca mpVI 77-13-4]
  misc_feature (55)..(435): NCBI GI: 145608206 Blast Desc: lipoate-protein ligase A, [Magnaporthe grisea 70-15] gi|145015713|gb|EDK00203.1| lipoate-protein ligase A, [Magnaporthe grisea 70-15]
  misc_feature (35)..(327): NCBI GI: 261357223 Blast Desc: lipoyltransferase [Verticillium albo-atrum VaMs.102]
  misc_feature (57)..(326): NCBI GI: 164424829 Blast Desc: NCU05421 [Neurospora crassa OR74A] gi|157070679|gb|EAA34008.2| conserved [Neurospora crassa OR74A]
  misc_feature (57)..(326): NCBI GI: 11359562 Blast Desc: NCU05421 [Neurospora crassa OR74A] gi|157070679|gb|EAA34008.2| conserved [Neurospora crassa OR74A]
  misc_feature (58)..(363): NCBI GI: 121702399 Blast Desc: lipoyltransferase and lipoate-protein ligase, [Aspergillus clavatus NRRL 1] gi|119397607|gb|EAW08038.1| lipoyltransferase and lipoate-protein ligase, [Aspergillus NRRL
  misc_feature (58)..(363): NCBI GI: 70991190 Blast Desc: lipoyltransferase and lipoate-protein ligase [Aspergillus fumigatus Af293] gi|66848076|gb|EAL88406.1| lipoyltransferase and lipoate-protein ligase, [Aspergillus Af293]
  misc_feature (51)..(353): NCBI GI: 67539124 Blast Desc: AN5732.2 [Aspergillus nidulans FGSC A4] gi|40743635|gb|EAA62825.1| AN5732.2 [Aspergillus nidulans FGSC A4] gi|259484791|tpe|CBF81314.1| TPA: lipoyltransferase and FGSC
  misc_feature (58)..(339): SWISSPROT Homolog: EC 2.7.7.63 Lipoate--protein ligase
  misc_feature: Useful for introducing or modulating the production of volatile compounds
MALNGTTRLSSSIRQLLTNQHVHRTTSHTLKSRRYHRSTPRTPNFSPESISSPSNPVQIYISRTTDPYLNLSIEHFLLQKSHPDSVILLLYTNRPCIVIGRNQNPWLEVNLGLINQPGILSRLRTNPNPSHEWLVRSEGRDDVLLVRRRSGGGTVFHDFGNVNYSVICPPASFDRNRHAEMVVRALRGLDIKHQVRVNERHDIVLDVAGENPGDKTKTFKISGSAYKLTRTRSLHHGTCLLSSPHLGILGKLLRSPAEPYIKGRGVESVRSSVRNVGAMNDEFVWAVTHEFFGMYEKAGSKNIEVKWVDADDVAEIPEIQAGVKELRSRKWIYAQTPLFTFSTHPTSEDPRLRPIFPPDLPDSFTDHALEIPHLRPEEPQGIHMTVRHAEITDITSSIDLSSPLKGQHLDHINDWRSQLGSENESIGRWLNGLFGVGGDVKK

SEQ ID NO: 8584 - DNA, 3745 bp, Muscodor strobelii
  misc_feature: SGI EST ID NO. CUFF.20882.1
  misc_feature: Variant of the nucleotide sequence at SEQ ID NO 8582
ctgaagagagcaggctgaatattttcaacagcctcactcatccactatctcaatatatcaaaaccatgatcctcgtaacccattcttaatggaccgtaatctttgcaattgaacacaatgtatcatacataatacacctaaaccgtttctctcacacgctactctccacatggccctcaacggcacgacccggctcagcagcagcataagacagctgctcacaaaccagcacgtccatcgcaccacatctcataccctcaaaagccgccgataccatcgctcaaccccaagaaccccaaacttctcaccagaatcaatctcctccccctcaaacccagttcaaatctacatatcccgcacaacagatccctaccttaacctctcaatcgagcacttcctgctccaaaaatcgcacccggactccgtcatcctactcctctacacaaaccgcccctgcatagtcataggccggaaccaaaatccctggctcgaagtaaacctcgggctcatcaaccaaccgggaatattatcccgcctgcgcaccaatcctaacccaagccatgaatggctcgtgaggagcgaagggagagacgacgtcctcctcgtgcgtcgtcgctcaggcggcggaaccgtgttccacgatttcggaaatgtgaactacagcgtcatatgtccgcccgcgtcttttgacaggaacagacacgctgagatggttgttcgtgctctccggggtctcgacatcaagcatcaggtccgcgtcaatgagcggcatgacatcgtgctcgacgtcgctggcgaaaatcctggcgataagacgaagacgtttaagatttctggctcggcgtataaacttactcgcaccagatctctccaccacgggacatgtctgctttcctcgcctcacttaggtattcttggaaagttgttaagatcacccgctgagccgtatatcaaggggcgtggcgttgaaagtgtaaggtcgtctgtgaggaatgtcggtgccatgaatgatgagtttgtatgggccgttactcatgagttcttcggcatgtatgaaaaagccggtagtaagaacatagaggttaaatgggttgatgcggacgacgttgcggagattcctgagatacaggcgggtgtcaaagagttacggtcacgaaaatggatatacgcccaaacccccctattcacattctcaacccacccaacatccgaagatcctcgcctacgtccaatttttccccccgacctcccagattcgttcactgaccatgccctggaaatcccccatctgcgccctgaagagccacaaggtatacacatgaccgttcgacacgcagaaatcaccgacatcacatcatctatagacttatcaagtccgttaaaaggacagcatctagatcacatcaatgactggcgctctcaacttgggagtgaaaacgagagtattggacgctggttgaatggactatttggtgttggtggggatgtgaagaaatgaataatagaggaaagaggagtaattagaatagacgatatacttagagaaaacatgaagaactgtagcactacatgtaacttactctgtaccatattacgtaccaccagcgatctgatagaataccaacccacacaaaagtaacaagccggccaagatagccaatatatggagtcagctcgaccacagacataaatatcacaagcacaaccaaccatcacaatcatgtctcacaatcattcattgccaattctcacaatcccgctatatttccattcagtctcatcgaccctcaacaccacccccctccataaccccctgcccaaaccactgcgcaacaaccttaaacctctcatcccccttctccagcgcatctttaaacaaatcatgcctctcactcctctcctcctgccccctcttcatagccctaaccgcggcattattcgccgcacaaaccggacattccgcatcccccccatccgcaccacccttcaaacacctctgatgaaaactatgtttacacaaaaaatgcaccacgggcaaatccagtggtgcaccacaccctggacaacgttgagcttggaacaccgccggtttagagcctaactcggttatctcgaggcgtttctgctctgtttccgtacggaaggactttatctgccttttattggaagaaatttcgcgacgctcccgcgtgatggtttcgtgcaggtagggttttatcatgcccattgtcgctactgcgttggaacctagtgtttgtatgacttggagcggtgccatgagaccgtcggcgtctatcttcttcaatacacttgacagttcttccggtcccgcttcatccagtatgcgtgcatctgaagtaaaatatgctaacgcagcgggatatagttgaggctccctgggtccgtattttctcagtgctctaatggcaccgtgggtatctttggctgatgtgtaagagcggaagatgtcgaagagaagacctgactgctctttgacgagtgtcgtgccgtcgcggaagtcggagagatgagaaagaagcagaacgttcgagttctcgatgggaagatcgtgtccttcgatgagcttcttggctttcagctcccattcttccttttgtacgcttttgccttctttggccttgtggagatacatctcgaaaagggttgtgtatatatctgctttgttctcgtcttctagcgagtctgatgctagacatgcttcgagaaatacgatgaactcatcagggtggtctatgaatgacgagaatgcggatcgaggtggcggtggagtatagttcggaacattgtcatcttctaactgtatggctgtttctgcagctgcatcaggtcgagtctgccccggtgtcgcaggcgaggaggaggctcccatatatggcaacggcagcaaactggttaggtttgttacagccgtagcggctccagtggcagctccaacaacgccagcagccaagcgattcccagtagatgctggcgcttcggttatggtcgtagcagtgtatactttgggtttgtatttgcccgtgtagtaatcaacaaagaatttcgtcgtgtcctcagggcaatgctccaatagaacccgagcatatttcatcaagcaagggtatgcctaagattttgttaacattgaacgaaacgcaaggaatgagtcaaaacgcacaacttcaacgtcaagatgccagatgaactccagcgcctcagaataacccttcgaatcctcaataagaatgtcaacgactaaatcgctctctccatgcttggtagcgaggtaagctgcttgttcaaaataaccaccctgccggcacatggcgatggccgtgtccacgtcgaacttcaggtcgccttcggatttgataaaattttcgagtttctgaacatctttcagcttcgcatagcaattaagtaataaggttgtgtgatcagctgtggctttgtggtgctcatgcaactcctctaagtactcaatgaggttgtgtattctctgggtgtcaagaaacttgcgaatgacctgcgaaggctctgtgctgtcaattgctttgatgtactgcgacatagcactgtcatagtcgcccttctgatataggtggtcaccgtattttctgtagattatgttctgttgttggccgtccattcccgatttctgggcaagattgatggcaagggggtaaaggttacgttgatacagtagttcgagtctctgttgtaatgatttctcatggtagcgatt

SEQ ID NO: 8585 - DNA, 1248 bp, Muscodor strobelii
  misc_feature: SGI cDNA ID NO. 562649
  misc_feature: Reduced expression when VOC is produced
  misc_feature: Encodes the peptide sequence at SEQ ID NO 8586
atgtcgactttcggaaaggcatttcgggtcaccacctatggcgaatcccactgccggtccgttggctgcatcgtcgacggatgccctcccggtatgcagctgaccgaagacgatattcagcctcagatgacccgtcgaagacctggccaaagtgccatcactaccccacgaaacgagaaagatagagtcatgatccaatccggtaccgaatttggaatcaccctcggcaccccaatcggactcatagttatgaacgaggaccaaagaccaaaggactacggagacaagaccatcgacctctaccctcgccctagtcacgccgactggacctacctcgagaaatacggtgtcaaggcaagcagtggcggaggccgaagctctgcccgtgagacaatcggaagagtcgcggctggtgccatcgccgagaagtatctgaagctggcatacggcattgagatcacggcatttgtatcgtctgttggcaaaattcacatgtttccgcccaccgccgaacaccccacaccgagccagaacccagatttcatggatctgttgcagaccgtcaaccgcgaaaccgttgataagtttttgccagtacggtgtccggaagcgaaagccaataagaagatggaagattatataggcgaagtcagagatgcgcatgatagtatcggtggaacagtcacttgtgtcatcagaaacgtaccaagtggtcttggtgagccctgctttgacaagatggaggcagagctcgcccatgccatgttgagcatcccggcgaccaaggggtttgagattggctctggatttggtggctgtgaagtccccggctcaattcacaatgacccctttgtcaaagcagaagaggaccccgcagacgcgacgagaagtggaatcccgagatctaaactcacgacgaagacaaataactcgggaggtatacaaggtggaatcacaaacggcgctcccatctacttccgggtggctttcaagcccccggccactattagccaggcccagacgactgctacctatgatggcgagtctgagggtgtactggcagccaagggacgccatgatccgtgtgtcgtccctagagccgtgcccattgttgaggctatgtcttcgctggttataatggataacttgatgcaacagttggcgagacatgaggctcggagacatttgcctcctctaaagcaaactaccacgccagcggagaatggcgtctcgatggagactagttag

SEQ ID NO: 8586 - protein, 415 aa, Muscodor strobelii
  misc_feature: SGI Peptide ID NO. 562649
  misc_feature (8)..(387): Pfam Id: PF01264 Pfam Desc: Chorismate synthase
  misc_feature (1)..(411): NCBI GI: 85074621 Blast Desc: chorismate synthase [Neurospora crassa OR74A] gi|30316376|sp|Q12640.2|AROC_NEUCR RecName: Full=Chorismate synthase; AltName: Full=5-enolpyruvylshikimate-3-phosphate -
  misc_feature (1)..(411): NCBI GI: 116205243 Blast Desc: CHGG_10505 [Chaetomium globosum CBS 148.51] gi|88176633|gb|EAQ84101.1| CHGG_10505 [Chaetomium globosum CBS 148.51]
  misc_feature (1)..(411): NCBI GI: 976375 Blast Desc: chorismate synthase [Neurospora crassa] gi|1583263|prf||2120340A chorismate synthase/flavin reductase
  misc_feature (1)..(401): NCBI GI: 154315776 Blast Desc: BC1G_04460 [Botryotinia fuckeliana B05.10] gi|150846856|gb|EDN22049.1| BC1G_04460 [Botryotinia fuckeliana B05.10]
  misc_feature (1)..(411): NCBI GI: 39942402 Blast Desc: MGG_03281 [Magnaporthe grisea 70-15] gi|145015714|gb|EDK00204.1| MGG_03281 [Magnaporthe grisea 70-15]
  misc_feature (1)..(401): NCBI GI: 156059748 Blast Desc: SS1G_03887 [Sclerotinia sclerotiorum 1980] gi|154701673|gb|EDO01412.1| SS1G_03887 [Sclerotinia sclerotiorum 1980]
  misc_feature (1)..(403): NCBI GI: 225560577 Blast Desc: chorismate synthase [Ajellomyces capsulatus G186AR]
  misc_feature (1)..(402): NCBI GI: 261206328 Blast Desc: chorismate synthase [Ajellomyces dermatitidis SLH14081] gi|239592960|gb|EEQ75541.1| chorismate synthase [Ajellomyces dermatitidis SLH14081] gi|239610864|gb|EEQ87851.1|
  misc_feature (1)..(401): NCBI GI: 258678618 Blast Desc: chorismate synthase [Verticillium dahliae var. longisporum]
  misc_feature (1)..(403): NCBI GI: 154278531 Blast Desc: chorismate synthase [Ajellomyces capsulatus NAm1] gi|150413664|gb|EDN09047.1| chorismate synthase [Ajellomyces capsulatus NAm1]
  misc_feature (1)..(411): SWISSPROT Homolog: EC 4.2.3.5 Chorismate synthase
  misc_feature: Useful for introducing or modulating the production of volatile compounds
MSTFGKAFRVTTYGESHCRSVGCIVDGCPPGMQLTEDDIQPQMTRRRPGQSAITTPRNEKDRVMIQSGTEFGITLGTPIGLIVMNEDQRPKDYGDKTIDLYPRPSHADWTYLEKYGVKASSGGGRSSARETIGRVAAGAIAEKYLKLAYGIEITAFVSSVGKIHMFPPTAEHPTPSQNPDFMDLLQTVNRETVDKFLPVRCPEAKANKKMEDYIGEVRDAHDSIGGTVTCVIRNVPSGLGEPCFDKMEAELAHAMLSIPATKGFEIGSGFGGCEVPGSIHNDPFVKAEEDPADATRSGIPRSKLTTKTNNSGGIQGGITNGAPIYFRVAFKPPATISQAQTTATYDGESEGVLAAKGRHDPCVVPRAVPIVEAMSSLVIMDNLMQQLARHEARRHLPPLKQTTTPAENGVSMETS

SEQ ID NO: 8587 - DNA, 1583 bp, Muscodor strobelii
  misc_feature: SGI EST ID NO. CUFF.20744.0
  misc_feature: Variant of the nucleotide sequence at SEQ ID NO 8585
tgacaggttcaattaattaccgacactgaccctacgattgcgatcttagctataattcttagagactcagttgagggtgattaaagaactatttagttcatagattatcttcaattgggacctaacttccacactctcggattgacgcaacgggacggatttctctaggtgctcaacatagactacctctacgatgtcgactttcggaaaggcatttcgggtcaccacctatggcgaatcccactgccggtccgttggctgcatcgtcgacggatgccctcccggtatgcagctgaccgaagacgatattcagcctcagatgacccgtcgaagacctggccaaagtgccatcactaccccacgaaacgagaaagatagagtcatgatccaatccggtaccgaatttggaatcaccctcggcaccccaatcggactcatagttatgaacgaggaccaaagaccaaaggactacggagacaagaccatcgacctctaccctcgccctagtcacgccgactggacctacctcgagaaatacggtgtcaaggcaagcagtggcggaggccgaagctctgcccgtgagacaatcggaagagtcgcggctggtgccatcgccgagaagtatctgaagctggcatacggcattgagatcacggcatttgtatcgtctgttggcaaaattcacatgtttccgcccaccgccgaacaccccacaccgagccagaacccagatttcatggatctgttgcagaccgtcaaccgcgaaaccgttgataagtttttgccagtacggtgtccggaagcgaaagccaataagaagatggaagattatataggcgaagtcagagatgcgcatgatagtatcggtggaacagtcacttgtgtcatcagaaacgtaccaagtggtcttggtgagccctgctttgacaagatggaggcagagctcgcccatgccatgttgagcatcccggcgaccaaggggtttgagattggctctggatttggtggctgtgaagtccccggctcaattcacaatgacccctttgtcaaagcagaagaggaccccgcagacgcgacgagaagtggaatcccgagatctaaactcacgacgaagacaaataactcgggaggtatacaaggtggaatcacaaacggcgctcccatctacttccgggtggctttcaagcccccggccactattagccaggcccagacgactgctacctatgatggcgagtctgagggtgtactggcagccaagggacgccatgatccgtgtgtcgtccctagagccgtgcccattgttgaggctatgtcttcgctggttataatggataacttgatgcaacagttggcgagacatgaggctcggagacatttgcctcctctaaagcaaactaccacgccagcggagaatggcgtctcgatggagactagttagttagagtacggtgtaggcaacataaaaatcaaaaggcaaaaaacggcgctagggcattttgtttagaatagcattgaacctcttaacaggttcaaaaggagtacgaaaatagcatgattgttctataagacttgtaaagaaa

SEQ ID NO: 8588 - DNA, 2199 bp, Muscodor strobelii
  misc_feature: SGI cDNA ID NO. 562650
  misc_feature: Encodes the peptide sequence at SEQ ID NO 8589
atggagtcgtctcctctgggagagctccaaacggcagagcagcgccgaatcctggacgccatcacccagctgcgcaaatgcggtctcgataccatcctatcgctgccccagctggttgcatgtggtgatcaatctgccggaaagagttcgctcttgacggcattgacggacattccattccctaaaaacgatagcctatgcaccagattcgctacggagatcaatctccgttgcgaaccaattgagaaattcacagtcaaggtcgtttttcccagtcatgaaccgaaagacaaagagcaaagtatcaaacgcttctctaaatctgtctcaaatttggaagacttggcgacaatcgtggagtctgctaaggaagttatgggcatctctgagaaagaaccggcctccgggtcagcattttcaaaagctgttctcagaatcgacgttgaagggccctcgagaccgcaccttactctagtcgatattccaggcttaatccagtctaccaccaagggcgtcactgaggacgacatcgatacagtggccgaaatcactgattattacattcgtcaaccaagaactatctgtctggctgttatttcggcccgaaacgacccggccaatcaaggaatactccaaagagttcggaaatttgaccctacaggagagagaacgctgggcatcatcacgaagccggacactctgaagtctgggtccaagtcggaagccgggttcttggaacttgccaagaatgaaaatgtctccctggggctgggctggcatgtcgtaaccaatcgaggttacgaggaacatgggttcactcctggataccgtgacctttccgagcagacctttttccgcgactcgatctgggcggaattgacccaagatcgtgttggtattgacaacttgcgtgtgcgactaagtcatctgcttttagagcatggcaaggccgaacttcctcgcctcagcgaggacgtcgaaagattcctccagaaagacaagaacgcgatgtctctcttaggaaaacctcgcgcgacaattctggaatgccgcacctacctgactcaactgagcatgatctgctacgatatatgcaaagcgggtatccaaggattctacgaggacggttttttcaggtttgatcgtgaagaggaattctccttggaatctcaatccgcgactcgtcgcttgcgtgcggtggttcagtttttgaataatgacttcgcacgcgatctcagaacaaaggggcacaagtataacatcaatcttgatcgcggcaaaacagagagggatggctcgtatgagaatgatcaagatgtcgatgaagtcgctgcttgctccgaaatatctataggaagcaagagtccaattgaactctcgagaaaaagaacattgacttgggtacacaatcaaatccgtaaatccaggggcaaggagttagttgggactttcaatcccaatgtcatcgctgagttgttttgggaacaatcggagtcatgggaagggctcgcgaagtcccatattgagcaggttcttcgattctgcgaaaagtttatcagcgatattttggctactaatgcaacagcggacgtaaaggaaagattttggcgcatcctcctggcagacgaattgcggaagcagcgctcctccgcgtacgacgagttagatcaacttctccgagaaaacagagattaccctataaattacaatcactacttcaccgacaatctacagaagcgacgtctggcgagaatgaagggtcagcttcaaggagttttgtctgagcctcccacggcgacgaagtgtagcgagggcgatcattatccgcgatacgacgttgataacgcgctcaaagagattatccaggcttgtaaccagaagtccaccttggacatggatgaatttgcctgcgaggaagcaattgcgaccgtgagttcaatttacaaagtccagaggaaagtcttccttgcaaacgtaacgacacaagtcattgagcgtcacctaatgaagaagcttatggagattttctcccctctaaacatcctcaacctccctgacgacaagatcgagtcgattgtagcggaaccctcatcaacataccgacaacgattactcctactggatcgcatcgagaagttagagcggggacggcagatcttccgttatgcgatcggatcatctcctagtggcgccagatga

SEQ ID NO: 8589 - protein, 732 aa, Muscodor strobelii
  misc_feature: SGI Peptide ID NO. 562650
  misc_feature (38)..(231): Pfam Id: PF00350 Pfam Desc: Dynamin family
  misc_feature (3)..(727): NCBI GI: 154302316 Blast Desc: BC1G_09942 [Botryotinia fuckeliana B05.10] gi|150855430|gb|EDN30622.1| BC1G_09942 [Botryotinia fuckeliana B05.10]
  misc_feature (6)..(721): NCBI GI: 212543163 Blast Desc: conserved [Penicillium marneffei ATCC 18224] gi|210066643|gb|EEA20736.1| conserved [Penicillium marneffei ATCC 18224]
  misc_feature (3)..(727): NCBI GI: 156055924 Blast Desc: SS1G_05314 [Sclerotinia sclerotiorum 1980] gi|154703098|gb|EDO02837.1| SS1G_05314 [Sclerotinia sclerotiorum 1980]
  misc_feature (4)..(561): NCBI GI: 145616494 Blast Desc: MGG_10640 [Magnaporthe grisea 70-15] gi|145010055|gb|EDJ94711.1| MGG_10640 [Magnaporthe grisea 70-15]
  misc_feature (1)..(725): NCBI GI: 240108795 Blast Desc: Dynamin family protein [Coccidioides posadasii C735 delta SOWgp]
  misc_feature (1)..(725): NCBI GI: 119176043 Blast Desc: CIMG_09774 [Coccidioides immitis RS]
  misc_feature (6)..(725): NCBI GI: 189199272 Blast Desc: GTP-binding protein [Pyrenophora tritici-repentis Pt-1C-BFP] gi|187983072|gb|EDU48560.1| GTP-binding protein [Pyrenophora tritici-repentis Pt-1C-BFP]
  misc_feature (3)..(725): NCBI GI: 169608522 Blast Desc: SNOG_07342 [Phaeosphaeria nodorum SN15] gi|111063688|gb|EAT84808.1| SNOG_07342 [Phaeosphaeria nodorum SN15]
  misc_feature (6)..(725): NCBI GI: 238845798 Blast Desc: dynamin family protein [Microsporum canis CBS 113480]
  misc_feature (118)..(724): NCBI GI: 238841821 Blast Desc: dynamin family protein [Microsporum canis CBS 113480]
MESSPLGELQTAEQRRILDAITQLRKCGLDTILSLPQLVACGDQSAGKSSLLTALTDIPFPKNDSLCTRFATEINLRCEPIEKFTVKVVFPSHEPKDKEQSIKRFSKSVSNLEDLATIVESAKEVMGISEKEPASGSAFSKAVLRIDVEGPSRPHLTLVDIPGLIQSTTKGVTEDDIDTVAEITDYYIRQPRTICLAVISARNDPANQGILQRVRKFDPTGERTLGIITKPDTLKSGSKSEAGFLELAKNENVSLGLGWHVVTNRGYEEHGFTPGYRDLSEQTFFRDSIWAELTQDRVGIDNLRVRLSHLLLEHGKAELPRLSEDVERFLQKDKNAMSLLGKPRATILECRTYLTQLSMICYDICKAGIQGFYEDGFFRFDREEEFSLESQSATRRLRAVVQFLNNDFARDLRTKGHKYNINLDRGKTERDGSYENDQDVDEVAACSEISIGSKSPIELSRKRTLTWVHNQIRKSRGKELVGTFNPNVIAELFWEQSESWEGLAKSHIEQVLRFCEKFISDILATNATADVKERFWRILLADELRKQRSSAYDELDQLLRENRDYPINYNHYFTDNLQKRRLARMKGQLQGVLSEPPTATKCSEGDHYPRYDVDNALKEIIQACNQKSTLDMDEFACEEAIATVSSIYKVQRKVFLANVTTQVIERHLMKKLMEIFSPLNILNLPDDKIESIVAEPSSTYRQRLLLLDRIEKLERGRQIFRYAIGSSPSGAR

SEQ ID NO: 8590 - DNA, 169 bp, Muscodor strobelii
  misc_feature: SGI EST ID NO. CUFF.20756.0
  misc_feature: Variant of the nucleotide sequence at SEQ ID NO 8588
cgcgctcaaagagattatccaggcttgtaaccagaagtccaccttggacatggatgaatttgcctgcgaggaagcaattgcgaccgtgagttcaatttacaaagtccagaggaaagtcttccttgcaaacgtaacgacacaagtcattgagcgtcacctaatgaagaag

SEQ ID NO: 8591 - DNA, 1161 bp, Muscodor strobelii
  misc_feature: SGI cDNA ID NO. 562651
  misc_feature: Elevated expression when VOC is produced
  misc_feature: Encodes the peptide sequence at SEQ ID NO 8592
atgtcacgatccgtgtttccaagcaggttggcgcttctactactcggcattctcttcatcgcctcttcatcagcggccttgacgaaccagttccagcacttttatcaccagcacgcccctcaatatgagttcattctacacaacaactgcagtcagcagtttcaaaattatctcacagggcgactcgaggacttcccagtagactggcttggaggtggtggcccaacaagtgttctagtacagcctgtcgtcacttgtcttctcgatacggtatccgaatacatcaaagccgcgtcgtcatccgcacaagttctcctcggcgtaacaccgcccatcttagccaccttgggcgccagcaccgatgagttagcgatggtgaacgtggtcggccggcgtccgctccttgcactcttgatttccgttggaagtcccagcgtatacctggacaggatcttcgacttccgagaaccgtccaagatgcttcagagcaagcacggacaacaccggccctacaaaccgagctcgactaagaagcagatattgatgacggccatgcagtataccattgctggtcttgctgctgcgaacattgcgattctgaattggcaactgggcttgggaacagtatgctcgtggtggtcgaatactgtctacggtccgctggtctggggagttttaagcatccccatccactttggcggcacattcgcgctccgtctccgtgtacgtcgtatttacagcaatagcgaaaaggaagatcgagtcggattcggcagatggtggcgattgatgcctcagaggctttacggatatgcgaagaccgagttcgtgccggccgcgttccgagaggaagtgatcagaatagtgtcatttgatgagcgaaagatctttgtggcctggtcctggttcctatcaaccgcaactgtcattcatattctattcgggtcactattgttttccggcctcttgttcatcggtccccaggatgcgctcctggtcattttcagatacatcctatccgtgttggcatgccgaatcctcgtcatatacgaacttgcgggcatgcgtcaaaaatatcgacctgaagctgatgatgactctgcggatggatacgaacttgaccccaggatgatcagaattggccatgagccacggaagtaa

SEQ ID NO: 8592 - protein, 386 aa, Muscodor strobelii
  misc_feature: SGI Peptide ID NO. 562651
  misc_feature (7)..(357): NCBI GI: 171686992 Blast Desc: protein product [Podospora anserina] gi|170943457|emb|CAP69110.1| protein product [Podospora anserina]
  misc_feature (24)..(357): NCBI GI: 256726714 Blast Desc: NECHADRAFT_25871 [Nectria haematococca mpVI 77-13-4]
  misc_feature (25)..(368): NCBI GI: 256722868 Blast Desc: NECHADRAFT_52892 [Nectria haematococca mpVI 77-13-4]
  misc_feature (29)..(357): NCBI GI: 238490752 Blast Desc: conserved [Aspergillus flavus NRRL3357] gi|220697026|gb|EED53367.1| conserved [Aspergillus flavus NRRL3357]
  misc_feature (29)..(357): NCBI GI: 169772847 Blast Desc: [Aspergillus oryzae RIB40] gi|83768753|dbj|BAE58890.1| protein product [Aspergillus oryzae]
  misc_feature (21)..(377): NCBI GI: 116199195 Blast Desc: CHGG_07753 [Chaetomium globosum CBS 148.51] gi|88179032|gb|EAQ86500.1| CHGG_07753 [Chaetomium globosum CBS 148.51]
  misc_feature (17)..(357): NCBI GI: 46127805 Blast Desc: FG08280.1 [Gibberella zeae PH-1]
  misc_feature (83)..(357): NCBI GI: 256732899 Blast Desc: NECHADRAFT_5957 [Nectria haematococca mpVI 77-13-4]
  misc_feature (96)..(369): NCBI GI: 145609221 Blast Desc: MGG_07429 [Magnaporthe grisea 70-15] gi|145016612|gb|EDK01042.1| MGG_07429 [Magnaporthe grisea 70-15]
  misc_feature (3)..(370): NCBI GI: 116203777 Blast Desc: CHGG_09772 [Chaetomium globosum CBS 148.51] gi|88175900|gb|EAQ83368.1| CHGG_09772 [Chaetomium globosum CBS 148.51]
  misc_feature: Useful for introducing or modulating the production of volatile compounds
MSRSVFPSRLALLLLGILFIASSSAALTNQFQHFYHQHAPQYEFILHNNCSQQFQNYLTGRLEDFPVDWLGGGGPTSVLVQPVVTCLLDTVSEYIKAASSSAQVLLGVTPPILATLGASTDELAMVNVVGRRPLLALLISVGSPSVYLDRIFDFREPSKMLQSKHGQHRPYKPSSTKKQILMTAMQYTIAGLAAANIAILNWQLGLGTVCSWWSNTVYGPLVWGVLSIPIHFGGTFALRLRVRRIYSNSEKEDRVGFGRWWRLMPQRLYGYAKTEFVPAAFREEVIRIVSFDERKIFVAWSWFLSTATVIHILFGSLLFSGLLFIGPQDALLVIFRYILSVLACRILVIYELAGMRQKYRPEADDDSADGYELDPRMIRIGHEPRK

SEQ ID NO: 8593 - DNA, 2326 bp, Muscodor strobelii
  misc_feature: SGI EST ID NO. CUFF.20763.0
  misc_feature: Variant of the nucleotide sequence at SEQ ID NO 8591
ttgaacaataatcacgataccctgttattgagtataatcgaattgctaatgacatcgcagggtttgagcacctcccagctcgaggatatctcccaaatagtacctagaagtgggccaaccagctcagctctttgctgtccaatatgccaccgccacccacgtcggatcccagtgattctgttatattcaccaggcaccgaatggctctgaagtcgagcttacgaaataacttactgtgacctcatgtgcatttggtagcactgcagacgagttaatggatatcagcagcagtcagatctctatttcccttcacattacatacaccagatcttggcgtgttgagctgagcttctcgctccggacccttaaccggatttgtgagagtccaagagacataaccgccgaaaatctacaataagaatcctacgaccttggcgcgacgatgcgtacgtagaagtaaatgccaatggacgagagaaattttggaggatggttcaatacggatactatcttatttgtactcgggtccgacacaacccagtctttttcgaattgggggccaaaacatgggacctgttctcggacatgtatcacgtatggtttagggctgacaacctttcctctggatttaatgcagctaagaaagagccatgcagcctcaatgggtagcggaagcgcaggacccttgtcctatgtctctgatctgcaagaagctccaagtatgtgtggtacgcgacgtggctatctcgggtacgtcaggcgggaccggcacatcgaggctctggcgcacagggattatgaaaaggatggtgtgtatacccgatgagaggctgcgagtagtgttaagaggggaaagctctttctcctcttgaactctttatgtgccgtctgtaaaattctcaacacatgcgtgtactacagccctgaaaacctacgttctggactaacgacgcagacatcctggaaaaaatgtcacgatccgtgtttccaagcaggttggcgcttctactactcggcattctcttcatcgcctcttcatcagcggccttgacgaaccagttccagcacttttatcaccagcacgcccctcaatatgagttcattctacacaacaactgcagtcagcagtttcaaaattatctcacagggcgactcgaggacttcccagtagactggcttggaggtggtggcccaacaagtgttctagtacagcctgtcgtcacttgtcttctcgatacggtatccgaatacatcaaagccgcgtcgtcatccgcacaagttctcctcggcgtaacaccgcccatcttagccaccttgggcgccagcaccgatgagttagcgatggtgaacgtggtcggccggcgtccgctccttgcactcttgatttccgttggaagtcccagcgtatacctggacaggatcttcgacttccgagaaccgtccaagatgcttcagagcaagcacggacaacaccggccctacaaaccgagctcgactaagaagcagatattgatgacggccatgcagtataccattgctggtcttgctgctgcgaacattgcgattctgaattggcaactgggcttgggaacagtatgctcgtggtggtcgaatactgtctacggtccgctggtctggggagttttaagcatccccatccactttggcggcacattcgcgctccgtctccgtgtacgtcgtatttacagcaatagcgaaaaggaagatcgagtcggattcggcagatggtggcgattgatgcctcagaggctttacggatatgcgaagaccgagttcgtgccggccgcgttccgagaggaagtgatcagaatagtgtcatttgatgagcgaaagatctttgtggcctggtcctggttcctatcaaccgcaactgtcattcatattctattcgggtcactattgttttccggcctcttgttcatcggtccccaggatgcgctcctggtcattttcagatacatcctatccgtgttggcatgccgaatcctcgtcatatacgaacttgcgggcatgcgtcaaaaatatcgacctgaagctgatgatgactctgcggatggatacgaacttgaccccaggatgatcagaattggccatgagccacggaagtaatatggaattattcatacatggaatgctgtaatgtaggcggacgtatgggcgcataatgaaatggctgcgtactgggaacggtgagtgatgtgtttagcgagaagtgatcgatgcagtcagatacctaattactcctatgatacccctatttctgcccaaaactgaacgtcagaatcggctcatcgatgcaaaatag

SEQ ID NO: 8594 - DNA, 2355 bp, Muscodor strobelii
  misc_feature: SGI cDNA ID NO. 562652
  misc_feature: Encodes the peptide sequence at SEQ ID NO 8595
atgttcggcaatatgacctactacacagacctttctaagctcgttgacacctatgaaggcaagatgcatccaatttatggcaatttgactcaatcgacacaaatgttgtgcgtcccacaatatgctataaataaagtcgaagtgacgcggaatgggacacatgtcaaatcagtcaaacgcctacaggaggctccaagtcggacgcttcataacattagcgcttgggatatagtcgacgcacagttcgcatccgatcctgtaggattcttaaaggccggacttgtgaattatgggcgcaacgtcaatatttctggagtggacgtggacgtagatgatttggcatggactgcgctgcacaatttggtcacgcctgacctccaagcttctgctttctttgatcctaactttcttggcaaggcaacgaagagctatttccagaaatcggctgcggtcattgccaagtcatgcttgttgaaagcagcaacgatagaagttgatgggaaaggcacgatcctggaaagtcgtctccatgctcagtttcatgttgatgagattgaagatgtgaagttcggttccctaggcgtggcaggtttgatcgcaactctagagcttctactgcagaaatcaaatatggaagatggactcggagatgctggcaacgagcagtatttacattacacgtggactgccattccggcgctggtgtttggaggactgtccatggtcttctctctgatagactttcaagtcaggattttggctccatcaatggcattgaaacagtctatttcaacgaaacaattttcacaacttgactttctgaatatgactattccggcagcaatcttccgggagattcgtttgagagtactgtgggctctgagtttaactactgcgttccttcttgcatcattattcactactttctcagcgtccctgtttcaagtttccaacataccggtcgcaaacttcatgacacttaaagtaaacgaatcgtttctaatttcggatgcgacgcagttcgagctgtcgggctcttacgacactcccgccgaaataagttcgttgatacttgcaaccaactattcttttccacgatatacttatcaggatctggctttcccatccctgttacctgcatcgtccgaaatccccatcaatggctccaacgtttcaacacacgctgtgatacccgcactgcgtggaaagatggactgtcgtctgtacaattcttctagtgttcactacaacttaagcttggaagcagagcatcctttgatcgttcaaattgaacaggagcactgcggatatagcaagtggattgactacaatttcgatttcaaggtctttcacaatacaacctactttggccagtcatcaacaagctggggttcctcgtgtcatcttctgacatatgtgtggggacaccttgacactgatgtcgaacccgctgctcttagccatatttctgcaatgggttgcgatctgagggtcgaagcagtcgatgtcaatgcaacatttaacagcattgaccttgatctagacgttcaaaacccgccacaggttcttcttaacacggttcgagactcgactgccatcaacaacgccgaccgatttggttatgttctaaattatgattccctggtcaccatacagtccagccctgctgtcttagatcaatttttctctctcctggtaacctctccttgggcaatacctatagtcgctttgaaggatccgtcgatggatgcaaatgtgtcagctgcaatccaatttcagagcaacatgatacttgctcaaaggcttcgtgcatatctagctccggcaaacgaaacaaacgcaacgcttgcagagcccatcaaagccggcgatagtgatgctcgacctacatataacgctaccgtgatcgatagaacgggtaggcgccgagttatccaagatgccctagccacacacatacttgcaggtcttctggccgctacgctcgtgctattcattgtcggttggattgcgagtccgccgaccgatgtgttgccgcgtagtccaacatctattgcttcaaatttgacactcgtgacaggcgggaatatcatggaaaaggtacgggctcgggcgcctttcaaaactctagaagagatgatagaagcattcgacgaagcagatacgcgtgtctatatgggatggggaacgatggcggatgaggaggggatgtcgtacggtgggaccatcgaaggtaggatcgttcaatttggcattttcgttgtcagaaaagaggatctggagcgttcattagacacagagagctcaggctcgacatacagttatctggtaaatcagtctgatgacagcctttaa

SEQ ID NO: 8595 - protein, 784 aa, Muscodor strobelii
  misc_feature: SGI Peptide ID NO. 562652
  misc_feature (199)..(619): NCBI GI: 116201293 Blast Desc: CHGG_08531 [Chaetomium globosum CBS 148.51] gi|88177049|gb|EAQ84517.1| CHGG_08531 [Chaetomium globosum CBS 148.51]
  misc_feature (193)..(728): NCBI GI: 46116660 Blast Desc: FG04172.1 [Gibberella zeae PH-1]
  misc_feature (195)..(728): NCBI GI: 256725614 Blast Desc: NECHADRAFT_43867 [Nectria haematococca mpVI 77-13-4]
  misc_feature (195)..(623): NCBI GI: 261359933 Blast Desc: conserved [Verticillium albo-atrum VaMs.102]
  misc_feature (186)..(770): NCBI GI: 255944265 Blast Desc: Pc20g03490 [Penicillium chrysogenum Wisconsin 54-1255] gi|211587635|emb|CAP85678.1| Pc20g03490 [Penicillium chrysogenum Wisconsin 54-1255]
  misc_feature (198)..(761): NCBI GI: 171682580 Blast Desc: protein product [Podospora anserina] gi|170941249|emb|CAP66899.1| protein product [Podospora anserina]
  misc_feature (193)..(643): NCBI GI: 116205848 Blast Desc: CHGG_02217 [Chaetomium globosum CBS 148.51] gi|88182814|gb|EAQ90282.1| CHGG_02217 [Chaetomium globosum CBS 148.51]
  misc_feature (1)..(176): NCBI GI: 116201293 Blast Desc: CHGG_08531 [Chaetomium globosum CBS 148.51] gi|88177049|gb|EAQ84517.1| CHGG_08531 [Chaetomium globosum CBS 148.51]
  misc_feature (198)..(699): NCBI GI: 145248079 Blast Desc: An13g01490 [Aspergillus niger] gi|134081037|emb|CAK41549.1| protein product [Aspergillus niger]
  misc_feature (137)..(759): NCBI GI: 238845466 Blast Desc: conserved [Microsporum canis CBS 113480]
MFGNMTYYTDLSKLVDTYEGKMHPIYGNLTQSTQMLCVPQYAINKVEVTRNGTHVKSVKRLQEAPSRTLHNISAWDIVDAQFASDPVGFLKAGLVNYGRNVNISGVDVDVDDLAWTALHNLVTPDLQASAFFDPNFLGKATKSYFQKSAAVIAKSCLLKAATIEVDGKGTILESRLHAQFHVDEIEDVKFGSLGVAGLIATLELLLQKSNMEDGLGDAGNEQYLHYTWTAIPALVFGGLSMVFSLIDFQVRILAPSMALKQSISTKQFSQLDFLNMTIPAAIFREIRLRVLWALSLTTAFLLASLFTTFSASLFQVSNIPVANFMTLKVNESFLISDATQFELSGSYDTPAEISSLILATNYSFPRYTYQDLAFPSLLPASSEIPINGSNVSTHAVIPALRGKMDCRLYNSSSVHYNLSLEAEHPLIVQIEQEHCGYSKWIDYNFDFKVFHNTTYFGQSSTSWGSSCHLLTYVWGHLDTDVEPAALSHISAMGCDLRVEAVDVNATFNSIDLDLDVQNPPQVLLNTVRDSTAINNADRFGYVLNYDSLVTIQSSPAVLDQFFSLLVTSPWAIPIVALKDPSMDANVSAAIQFQSNMILAQRLRAYLAPANETNATLAEPIKAGDSDARPTYNATVIDRTGRRRVIQDALATHILAGLLAATLVLFIVGWIASPPTDVLPRSPTSIASNLTLVTGGNIMEKVRARAPFKTLEEMIEAFDEADTRVYMGWGTMADEEGMSYGGTIEGRIVQFGIFVVRKEDLERSLDTESSGSTYSYLVNQSDDSL

SEQ ID NO: 8596 - DNA, 2628 bp, Muscodor strobelii
  misc_feature: SGI EST ID NO. CUFF.20768.0
  misc_feature: Variant of the nucleotide sequence at SEQ ID NO 8594
ctcagatcaacgttggaccaacacacttcaaaccagcctcatgatcgcttttataatgccacccagactctgtccggcggtcttcgcgcggacaggctggttcggctcatctgttaactcagagagcaccaaattcacgaagtgaacttcgaaatggcatcagcttggctggatgaagctcagaaagaccaagaatacatttcaatcaacttgaatgaggtgcataaagactttgagcaaccacgtcatacgagtagtcccgctgccccttcaatgcaatggaggccgttttggctacgccgaacggtgttattcggctttgtcttggtgtttcttttgatcatcaccgcagtccatattcttctcgccctatcaaatcgatacaatggaatatcaacaagctccgtttccacccgctatctatggacttacgggccgacagcacttttgacactcctagccggcctttggggacggactgagtatcagagcaagttggcagctccttggcttcgtttgtcgcaaggtccatctcctggttctcgaacgcttctgctcgactatatttcgccgtctcaaccttcagcactcctggcatctttgcgcaatggtgactttgctgtttcaatcggtattgtgacttcggtttttgtcaaaatattgatcgtcgtctcgactggcctgataacgctttcgccaactattgtcaatcaagaatctcaaccgatggtgcttcaaaacaaattcgtcgaggacgctgaatgccttaaaactccaggaaatctcgcggcgtacatcttggaaagcttgaactcgaagaatctgacgttgcctgacggtttatcccacgaatacgcattccaatctgtacacacgaatttactagacacggcagaaacacaagttacagtcgaaggattaaggaactcgctatcttgtaaaccagttcaactcaaattgatacaggcaattcctccccagccccagattcagcaaccgacaatgaacatctctttatcatcggcggactgtgatgtgccactgctcactttcgaaaagggtccggcatatgttagaaattagacgtcctttttgagatttcagcgcgtccagtgcaaggggtctgatggtgatcctgaaagacggatattgactatgttcggcaatatgacctactacacagacctttctaagctcgttgacacctatgaaggcaagatgcatccaatttatggcaatttgactcaatcgacacaaatgttgtgcgtcccacaatatgctataaataaagtcgaagtgacgcggaatgggacacatgtcaaatcagtcaaacgcctacaggaggctccaagtcggacgcttcataacattagcgcttgggatatagtcgacgcacagttcgcatccgatcctgtaggattcttaaaggccggacttgtgaattatgggcgcaacgtcaatatttctggagtggacgtggacgtagatgatttggcatggactgcgctgcacaatttggtcacgcctgacctccaagcttctgctttctttgatcctaactttcttggcaaggcaacgaagagctatttccagaaatcggctgcggtcattgccaagtcatgcttgttgaaagcagcaacgatagaagttgatgggaaaggcacgatcctggaaagtcgtctccatgtaagtggctggacggcttggttcatgatcgcaataacagctacgtgcggacttcttacaacattcgcgcttttcactgttccgaaggcaaaaatactaccatgcagccctagcacatttcttgagctggcttttcttttttctaacagccagaacctttcagcgaagttacgcgcctttggtgcatctagcaaaaagtcgctcgcccatcaccttgaagcatcgtcatttcagtccgtttttagtcatggtctcttctctgaccaggctcagtttcatgttgatgagattgaagatgtgaagttcggttccctaggtatatcgcctcaaaccacacccaaattttcccaccctttcgtgcttaatccgatttctcgtctcgcgctttgcttaggcgtggcaggtttgatcgcaactctagagcttctactgcagaaatcaaatatggaagatggactcggagatgctggcaacgagcagtatttacattacacgtggactgccattccggcgctggtgtttggaggactgtccatggtcttctctctgatagactttcaagtcaggattttggctccatcaatggcattgaaacagtctatttcaacgaaacaattttcacaacttgactttctgaatatgactattccggcagcaatcttccgggagattcgtttgagagtactgtgggctctgagtttaactactgcgttccttcttgcatcattattcactactttctcagcgtccctgtttcaagtttccaacataccggtcgcaaacttcatgacacttaaagtaaacgaatcgtttctaatttcggatgcgacgcagttcgagctgtcgggctcttacgacactcccgccgaaataagttcgttgatacttgcaaccaactattcttttccacgatatacttatcaggatctggctttcccatcc

SEQ ID NO: 8597 - DNA, 7830 bp, Muscodor strobelii
  misc_feature: SGI cDNA ID NO. 562653
  misc_feature: Encodes the peptide sequence at SEQ ID NO 8598
atggtggcggcaaaagtttccgtcgctggcgatgccggcgagcatcatgacaatctgtacgaacaagctaattggtgcttcggcttagagcgcgatgaaatcgagagcataagattgtgttcgcctttacaactcgatgttattgcttgcgcggctaacgataggcgaggagctgctggccatgtcgtctacgaaattccaggaaatgtcgaccttgaccgtttggcaacagcttggaaggaagttgtgcgccaaacaacggaattacggacttgtatactaacatcaaaagctgaggactcttatcagattgtgttgcgccaaagctttccgtggacacatacaatagttttcgacactaaaaagtcggtgatgcaagatgaggcggctgctgctataaggggacctcgttccaaccgatttgtcattcttgaggaccgagacaaggaaaagacacttctcatctggacatttaaccatgccctcgtcgataagactctccgagagcgctcgcttcgacgggttcagtcggtatacgatggcgggaaaatacaatattcctaccacatagcaaagcaaggagaatatcacgacatgccaattgagaacgcaacgacgttttggcagcaacacttcgatggattgagtgcttccgtatttccaactctgcctcctcaagtgactatacctcgtcccgaagaggagttacaacaccagatcgtatttcagggtcccgcacggcagacgtggtctggcacaactatctgccgagccgcactcgcaatactcttggctcgctcgacgttttcctccgaggcgctcttcggtgtcatcacagatatatctcaagaacactccatcgacggcctggcacgaacactggcaccaatgcgttgccattgtgcgcctgatcagtcggtgtcagatgtcatggaagcgataactgcatacgacaatgctatgcgtaattttgcaacaatagggctacgcaaaatcggccagagtggagatgacgcatcggctgcttccggattccagaccactctgctcgttaccactagcgatgcatcgcacgcgccacttagtctgaggcttcatcgaaccgtggaagaaccggaccaatttgcgcctttcactgaccgcgcccttctgctacactgtcacatgttcgacggctctgcttcaatgactgcaagatatgataatagggtgatcgactccctccaaatggcccgttttctgaggcagttgggttgtgttattcaacaacttcaaagaccagataccgagcggcttttggtgagacaaatagaccctattacgcaagaagacagggcagagatcgcaaactggaactctgagagtccgatagttaaaaatgacctcatccatgatttatttgcaaggagtgcgactgcagtaccagggaaaatcgcagtgtctgcttgcgacggagattggacttatgctgagctggaagatgtgtcctcgcgactcgctgcacatattcaagctctcgatttggcccaagagcaagcgattgtaccactttgctttgagaagtcgaaatgggttccggttgcaatgcttgctgtcctcaaagctggtcacgcatttacgctcgttgacccatccctacccagagctaggatcgctcagatatgtcggcagacttctgctacctttgctctctcgtctaaaattcacgttaacaccatgagcgccgtgatggatcactgccttatggttgatgagggtgtcctgcggtcatttccttgcagagaaagatggaatcagcccacaatgccaagagacctggcttatattctctttacgtctggcagtactggtgagcccaaaggggccatgattgaacatcaggcattcacgtcgcgagtcttcgaatgcggtctcgcgctcggtatcaacagcgacactcgatctctccaatttgcgtcgtactcgttcggttcattcatgttggagatcgtggcgactctgattcacggtggttgtgtttgcattccttctgaggatgaacgtatgaacaatatcgcggagttcgtgagaaggaaggaagtcaattgggctctgctaaccccgtctttcattgggacacttgacccagactgtgttccagggctccagactttagcggcagccggagaacttatttccgcatcacttagggacacatgggcgccgcgacttcagcttttgaatgcatacgggttgagcgagatctcgatactttgtagtgcgacgaagctgagtgcgcggtcttctatgccgagtaacgtttgccaggcactaggcgctcgcttctgggttgttgatccaaatgaactcgaccgccttgctccaattggctgcgttggtgagttggtcgtcgaaagcccgggagtcgcgcgtggatatctcgtttcttctccggacggcaattctcgtttcctctcaacaattccggcatggtatccttcagaacaactacatgacggtgtcaaactctacaggaccggagatctcgtctgttatcagtctgatggtagcttgatatacctcgggcgcggagacttgcaggtcaagatccgaggccaacgcatagaaataggtgaagtggaaactcgcctgcaacaacactcaccaagccatatacccgtggttgaggccatcaaacgctcaggctcattggccgatacacacttgattgcgttcttagtcgaaacctccgaggctgcctcagacatacacgcccaaattgtcgacagcaatattgccacagctctgaatgcaaaactagagcaggttcttcctcgtcattgcattccagccttgtatattcgtgtgagcaatcttccacatactgtcacagggaaaacagaccgacgaaagtttcgatcaattgccaataagcttttagacgaagctgctcagtctgtgatgacccagtcgtcgcagacactcggttccacattgcctggtcagaaagcaaaattaagggagctctggtttgagtgcttgggtgtggctactgacgccgatagccaaaaggcaaacttctttgaacttggcggaaattctatcatagccatgaaaatggtgaataaggcgaggtcctccgacattcccatcagagttgccgatatattcgacaatcctacacttgatgatctcgttggtacactcttcccaggctcatccgcttacactccaatccagacgacaacgtacgatggacctgttgaacagtcatttgcgcaggggaggctatggttcctggaccagttggaattcgggtcatcctcgtacctaattcccttcgctatgcgcatgcgtggtaaaatccacatcaatgcccttaatgcagcccttttagcgctggaacatagacatgaaacgctacgcacgacgtttgaggaaagggatggtgtaggaatgcaggtgattcatgcgacttgtatcaaggagttgaaaatgattgacatatccaacaatagcaacgaatatctccggttgttgcagcaagagcagacatcaacttttaatctggcttctgaggcgggctggagagtatccctgctttgtttaggagaagacgaccatgtcatatctattgtcatgcatcacattatttcagatgggtggtctgttgacatattatgccgcgagcttagccaattctatagggcagctttacaaggtcacgaccccctttcggttgcgaaaccgcttctcatcaactatcgggacttttcggtgtggcagaaacaggcgaaacagattgtcgagcatcaaggccagctcgagtattgggcaaatcagctgttgcacagctctcctgcaacgttcctcgccgatttccctcgaccgagcagattatccggccaagcaggctccgttccagtgagaattgaaggcgatctataccacaagcttttggagttctgcaacacacacaatattactcaatttgcagtattgctggcggtctttcgtgcgactcattatcgtttcactggcgccgaagacgcgtccataggcgcccctaatgccaatcgcaatcgacctgaactagaggacatgattggattcttcgttaatactcaatgtatgagaattactgtctcaagtagcgacacgcttgagagcctagttcgtcaggtccgctcgacaatgtcagcagcgtttgagcatcaggacgtcccatttgaccgtgtcgtatcaacagttctacccggctcgagagatatgtcccgaaatccgttggttcaacttgtcttcgctatgcatgctcaaaaggaactgggcaagtttgatctggagggcctcgaaggagagcctctgatcagcccagtgacgaccaggttcgacgcagagtttcatctatttcaagaagctgacaagctgagcggccaaatgatttttgcgactgatattttcaagctcgcaagtatccagaaagtggttcaagtttttgacatgattttgtgtcaaggactcgaccaccctcatctaccaatcgcaactctaccacttaatgatgagaagtccggcctcggtgccaacattgagatgacggactatccacgggaatcaagtattgtcgacatcttccgcgagcaagtagctgcagatccatatgctcccgcggtcacggattcttccacacgtctcacatacatcgaacttgatcgtcaatcggacaggattgcaaagtggcttcgtcgacagaatatgattgccgagacactgattggagtgttagcgccacggtcatgtcaaacaatcgctgtattgctcggtatcctaaaggcgaaccttgcctatctgccgcttgacgtcaacgctcccgtcggccgcttagaaacgattatgtctgcgttgcgagggcgatgtccaatgttgctctgttcagatataattgccccagaaatacagctcactggcatagaaattgcacgaatacgagatattttagagcacggcgacacggaaaatgtgaacggcgaagtcggtgagcctgtgagtccttcggcagcaagccttgcgcatataatcttcacgtctggatcgaccggaaacccaaaaggcgtcatgatcgagcatcgcaatatagtacgacttgtgaaggaaagtactgtcatacctagcttcccgtctgcagtaaaggttgctcatttatccaacattgcctttgatgccgcaacctgggagatatatgcagcgctcctcaatggagggaccattgtctgcatcgactacatgactgttttagatagcatagagcttggcgccgtgttttcgaaggagcatatcaacgcggcgttgctcacaccggcgctccttaagcagtgcctagcccataaccctaatatgctgcgacgcctggatatactcgttagtggtggtgaccgacttgatagccaagatgcaattatggcacaaggccttgttaggactggtctctataacgcgtatggcccgactgaaaatggggtcattagtacagtttataaagttgatgaaaaagactcctttgccaatggagttccaattgggaggcctatcagcaactctggagcgtacatcatggatccgaatcagcagcttctccctgcaggcgttgtaggagagctcattgtcactggagatggactagcccggggatacacagacccggcattcgatgtagaccgcttcatccaggtcattataagtggcgaactcgtaagggcatatcgaacaggtgaccgagcacgatatagaccagatgacaatcaaatcgagtttttcgggcgcatagatcagcagatcaaaattcgaggtcatcgcattgagccagcggaagtggagcgggctattcttggttacgacgcagttcgcgatgccgtagtcgtcgtcattcagcaccaagacagccattggccggagatggtcgggtacgtcactacacatggaggttctccgacggggcaaaatggtgaaggctttcaccgtagtcgactcgcatcagacatccgtgagcagttggaagtatcgcttccatcatatatggtcccgtctcgcatcgttgtgatcgaccagatgcctctcaatgctagcggcaaggtcgaccgaaaagagctcattcgccagggcgcagaagtggtcttagagccgtcgccgtcgtcgtcgtcacccacgccccaaactttgcctgataagattgaaaccatgctatgtgaggaatttgcagctgtgttaggcgttgacgtcgacatcactggtaattttttcaaacttggcgggcattctctcatggctactaaactcgctgcccatatcgcccatcggcttgacgctcgcgtcactgtgaaagacattttcgaccatccagtccctggccaactcgcggagaaattgaagctcgctcgctctgagaaatgtaacggggtcagcagcgtacagactgcagataatactttgtttcggcttcttgctttagacgacccgcacaactttgtgcgacgagaaatcaattcgcagcttggacactgtaacagcgagattctcgatatctatcccgctacgcgactgcaaaagcgatatcttcattatcctttaacaggacgcccatggcccttggctcctttcagcattgatttcccgccgaagtctgacctgggtaccttgatcagggcctgcaaggatctggtcgagtattttgatgtctttagaaccgttttccggccagctgcaggagagctttaccaggttgtactgaaacattttgatctgcctgtcgaaataatacaatccgaggagagtatcgatgacgctacgcgtgcattcttggagaaagccgttaagcataccgtcaatctggatgttcccatgatacgaatttctattttgaggaagaaaggctcatacctacgcgtaatacttcgactaaatcacgcgtgctatgatgctttgagcttagaacatatgctgcaagccctccatgcgctgtatcttggcaatggtccctccatggtggcagcaccggccggatttgttcagtacatgcaacattcagccaacagtcgcaaggacggatatcaattctggcgttcggttcttaaaacttcttctatgacgactatggaagatgttagcaaaaataaaacccaaagtgccacgcctgttattggtacttactacgctgcaaagacaattacagttcctctcaaagctggagcggacagtggcatcacacaggcaacggtctttaccactgcatgtgctttcatgctgtcaaaagaaactggattgaaggatatcctatttggtcgtcttgtgtccgggcgacagggtttgccaatcgcttaccaaaacctcgtcggcccatgtactaatcagattcctgtgcgagtccgtatcgacagggccgcaaataccaaagaactgctcacccagatgcaagcacagtatattaacagcataccattcgagactctagggttcgatgagatcaaggacaattgcacaagctggccagcctcggttacaaactacagctgtaatgtcgcatatcagagcttcaacgcccaccctgaaagtgacattgagggtcatcgagtgcagatgggagttttgccgcagctcgagaacttggtggaacaaggattgattcacgacgtgaacataattggagatatcgatatcgaaacatcccgacttcatataatgatcttcgtgtgcaagcgagtttgcgagtccgagggaagggcggaaagcatgctcgaagaactttgcgaaaagatcttgacgttgaaccaggccctgcagaatcaaaatatcgaataa

SEQ ID NO: 8598 - protein, 2609 aa, Muscodor strobelii
  misc_feature: SGI Peptide ID NO. 562653
  misc_feature (1559)..(1965): Pfam Id: PF00501 Pfam Desc: AMP-binding enzyme
  misc_feature (488)..(888): Pfam Id: PF00501 Pfam Desc: AMP-binding enzyme
  misc_feature (1077)..(1376): Pfam Id: PF00668 Pfam Desc: Condensation domain
  misc_feature (2183)..(2469): Pfam Id: PF00668 Pfam Desc: Condensation domain
  misc_feature (2071)..(2134): Pfam Id: PF00550 Pfam Desc: Phosphopantetheine attachment site
  misc_feature (997)..(1062): Pfam Id: PF00550 Pfam Desc: Phosphopantetheine attachment site
  misc_feature (2183)..(2334): Pfam Id: PF00668 Pfam Desc: Condensation domain
  misc_feature (2408)..(2469): Pfam Id: PF00668 Pfam Desc: Condensation domain
  misc_feature (452)..(1987): NCBI GI: 145242914 Blast Desc: An11g00050 [Aspergillus niger] gi|134078676|emb|CAK48238.1| protein product [Aspergillus niger]
  misc_feature (1069)..(2354): NCBI GI: 145242914 Blast Desc: An11g00050 [Aspergillus niger] gi|134078676|emb|CAK48238.1| protein product [Aspergillus niger]
  misc_feature (462)..(1983): NCBI GI: 145247054 Blast Desc: An12g07230 [Aspergillus niger] gi|134080503|emb|CAK46351.1| protein product [Aspergillus niger]
  misc_feature (1259)..(2135): NCBI GI: 238841518 Blast Desc: peptolide synthetase [Microsporum canis CBS 113480]
  misc_feature (1265)..(2494): NCBI GI: 145248381 Blast Desc: An13g03040 [Aspergillus niger] gi|134081191|emb|CAK41700.1| protein product [Aspergillus niger]
  misc_feature (340)..(2469): NCBI GI: 37526561 Blast Desc: plu2670 [Photorhabdus luminescens subsp. laumondii TTO1] gi|36785993|emb|CAE15044.1| protein product [Photorhabdus luminescens subsp. laumondii TTO1]
  misc_feature (434)..(2469): NCBI GI: 37526561 Blast Desc: plu2670 [Photorhabdus luminescens subsp. laumondii TTO1] gi|36785993|emb|CAE15044.1| protein product [Photorhabdus luminescens subsp. laumondii TTO1]
  misc_feature (379)..(2472): NCBI GI: 37526561 Blast Desc: plu2670 [Photorhabdus luminescens subsp. laumondii TTO1] gi|36785993|emb|CAE15044.1| protein product [Photorhabdus luminescens subsp. laumondii TTO1]
  misc_feature (425)..(2472): NCBI GI: 37526561 Blast Desc: plu2670 [Photorhabdus luminescens subsp. laumondii TTO1] gi|36785993|emb|CAE15044.1| protein product [Photorhabdus luminescens subsp. laumondii TTO1]
  misc_feature (443)..(2469): NCBI GI: 37526561 Blast Desc: plu2670 [Photorhabdus luminescens subsp. laumondii TTO1] gi|36785993|emb|CAE15044.1| protein product [Photorhabdus luminescens subsp. laumondii TTO1]
  misc_feature (390)..(2494): SWISSPROT Homolog: EC 5.1.1.11 Phenylalanine racemase (ATP-hydrolyzing)
  misc_feature: Useful for fungicidal and/or biocontrol applications
MVAAKVSVAGDAGEHHDNLYEQANWCFGLERDEIESIRLCSPLQLDVIACAANDRRGAAGHVVYEIPGNVDLDRLATAWKEVVRQTTELRTCILTSKAEDSYQIVLRQSFPWTHTIVFDTKKSVMQDEAAAAIRGPRSNRFVILEDRDKEKTLLIWTFNHALVDKTLRERSLRRVQSVYDGGKIQYSYHIAKQGEYHDMPIENATTFWQQHFDGLSASVFPTLPPQVTIPRPEEELQHQIVFQGPARQTWSGTTICRAALAILLARSTFSSEALFGVITDISQEHSIDGLARTLAPMRCHCAPDQSVSDVMEAITAYDNAMRNFATIGLRKIGQSGDDASAASGFQTTLLVTTSDASHAPLSLRLHRTVEEPDQFAPFTDRALLLHCHMFDGSASMTARYDNRVIDSLQMARFLRQLGCVIQQLQRPDTERLLVRQIDPITQEDRAEIANWNSESPIVKNDLIHDLFARSATAVPGKIAVSACDGDWTYAELEDVSSRLAAHIQALDLAQEQAIVPLCFEKSKWVPVAMLAVLKAGHAFTLVDPSLPRARIAQICRQTSATFALSSKIHVNTMSAVMDHCLMVDEGVLRSFPCRERWNQPTMPRDLAYILFTSGSTGEPKGAMIEHQAFTSRVFECGLALGINSDTRSLQFASYSFGSFMLEIVATLIHGGCVCIPSEDERMNNIAEFVRRKEVNWALLTPSFIGTLDPDCVPGLQTLAAAGELISASLRDTWAPRLQLLNAYGLSEISILCSATKLSARSSMPSNVCQALGARFWVVDPNELDRLAPIGCVGELVVESPGVARGYLVSSPDGNSRFLSTIPAWYPSEQLHDGVKLYRTGDLVCYQSDGSLIYLGRGDLQVKIRGQRIEIGEVETRLQQHSPSHIPVVEAIKRSGSLADTHLIAFLVETSEAASDIHAQIVDSNIATALNAKLEQVLPRHCIPALYIRVSNLPHTVTGKTDRRKFRSIANKLLDEAAQSVMTQSSQTLGSTLPGQKAKLRELWFECLGVATDADSQKANFFELGGNSIIAMKMVNKARSSDIPIRVADIFDNPTLDDLVGTLFPGSSAYTPIQTTTYDGPVEQSFAQGRLWFLDQLEFGSSSYLIPFAMRMRGKIHINALNAALLALEHRHETLRTTFEERDGVGMQVIHATCIKELKMIDISNNSNEYLRLLQQEQTSTFNLASEAGWRVSLLCLGEDDHVISIVMHHIISDGWSVDILCRELSQFYRAALQGHDPLSVAKPLLINYRDFSVWQKQAKQIVEHQGQLEYWANQLLHSSPATFLADFPRPSRLSGQAGSVPVRIEGDLYHKLLEFCNTHNITQFAVLLAVFRATHYRFTGAEDASIGAPNANRNRPELEDMIGFFVNTQCMRITVSSSDTLESLVRQVRSTMSAAFEHQDVPFDRVVSTVLPGSRDMSRNPLVQLVFAMHAQKELGKFDLEGLEGEPLISPVTTRFDAEFHLFQEADKLSGQMIFATDIFKLASIQKVVQVFDMILCQGLDHPHLPIATLPLNDEKSGLGANIEMTDYPRESSIVDIFREQVAADPYAPAVTDSSTRLTYIELDRQSDRIAKWLRRQNMIAETLIGVLAPRSCQTIAVLLGILKANLAYLPLDVNAPVGRLETIMSALRGRCPMLLCSDIIAPEIQLTGIEIARIRDILEHGDTENVNGEVGEPVSPSAASLAHIIFTSGSTGNPKGVMIEHRNIVRLVKESTVIPSFPSAVKVAHLSNIAFDAATWEIYAALLNGGTIVCIDYMTVLDSIELGAVFSKEHINAALLTPALLKQCLAHNPNMLRRLDILVSGGDRLDSQDAIMAQGLVRTGLYNAYGPTENGVISTVYKVDEKDSFANGVPIGRPISNSGAYIMDPNQQLLPAGVVGELIVTGDGLARGYTDPAFDVDRFIQVIISGELVRAYRTGDRARYRPDDNQIEFFGRIDQQIKIRGHRIEPAEVERAILGYDAVRDAVVVVIQHQDSHWPEMVGYVTTHGGSPTGQNGEGFHRSRLASDIREQLEVSLPSYMVPSRIVVIDQMPLNASGKVDRKELIRQGAEVVLEPSPSSSSPTPQTLPDKIETMLCEEFAAVLGVDVDITGNFFKLGGHSLMATKLAAHIAHRLDARVTVKDIFDHPVPGQLAEKLKLARSEKCNGVSSVQTADNTLFRLLALDDPHNFVRREINSQLGHCNSEILDIYPATRLQKRYLHYPLTGRPWPLAPFSIDFPPKSDLGTLIRACKDLVEYFDVFRTVFRPAAGELYQVVLKHFDLPVEIIQSEESIDDATRAFLEKAVKHTVNLDVPMIRISILRKKGSYLRVILRLNHACYDALSLEHMLQALHALYLGNGPSMVAAPAGFVQYMQHSANSRKDGYQFWRSVLKTSSMTTMEDVSKNKTQSATPVIGTYYAAKTITVPLKAGADSGITQATVFTTACAFMLSKETGLKDILFGRLVSGRQGLPIAYQNLVGPCTNQIPVRVRIDRAANTKELLTQMQAQYINSIPFETLGFDEIKDNCTSWPASVTNYSCNVAYQSFNAHPESDIEGHRVQMGVLPQLENLVEQGLIHDVNIIGDIDIETSRLHIMIFVCKRVCESEGRAESMLEELCEKILTLNQALQNQNIE

SEQ ID NO: 8599 - DNA, 683 bp, Muscodor strobelii
  misc_feature: SGI EST ID NO. CUFF.20774.0
  misc_feature: Variant of the nucleotide sequence at SEQ ID NO 8597
ctgctataaggggacctcgttccaaccgatttgtcattcttgaggaccgagacaaggaaaagacacttctcatctggacatttaaccatgccctcgtcgataagactctccgagagcgctcgcttcgacgggttcagtcggtatacgatggcgggaaaatacaatattcctaccacatagcaaagcaaggagaatatcacgacatgccaattgagaacgcaacgacgttttggcagcaacacttcgatggattgagtgcttccgtatttccaactctgcctcctcaagtgactatacctcgtcccgaagaggagttacaacaccagatcgtatttcagggtcccgcacggcagacgtggtctggcacaactatctgccgagccgcactcgcaatactcttggctcgctcgacgttttcctccgaggcgctcttcggtgtcatcacagatatatctcaagaacactccatcgacggcctggcacgaacactggcaccaatgcgttgccattgtgcgcctgatcagtcggtgtcagatgtcatggaagcgataactgcatacgacaatgctatgcgtaattttgcaacaatagggctacgcaaaatcggccagagtggagatgacgcatcggctgcttccggattccagaccactctgctcgttaccactagcgatgcatcgcac

SEQ ID NO: 8600 - DNA, 1026 bp, Muscodor strobelii
  misc_feature: SGI cDNA ID NO. 562654
  misc_feature: Encodes the peptide sequence at SEQ ID NO 8601
atgtgcatcccaattagagagaaatcgctttcaatcacgcatgattttggcataggtttcgatcttaatccgtcttatggtacagtagcggtctcttatcctaatgggtcgatctacactatcgcacgagtcgagggggatggagcgtaccgagagatgatgcacagactgtctctcccctcgtcgcaacacatccatgagccttatcgtaaccttggcgagagcatcgaagacatcccccgtcagatatggcgaggattacgcaggaggttcggtcttgccgcatcaggggacgcaggcacgctcagcaatatgatccgcattctccgagcggaagctaccgcctatgtcagagaagatatatcagcagcgggcatttccaagcctcatctcaaggctttgtacaccgaggatatcaaagatgcattcgaacatttgggcctgatcaaccttgaactttatagacacggagcgggatattacaccctccccgcaacgttggcagcatatgctggtaatggccaaggactgtgcgcaaattacacagactatgtcagatgcagacaagatgagcagcaaatggaggaaagatttatgctggctgtctcatattcttaccacggactactcactagtcaagtcagactgaggtctgcgtgggggaccgatgaggtactgaggagtgaagacttgcgtctaggatatgctgagagagataatcgccagtcgtactttgatagggttcgggagatgctccagatccctgtgatagagaggtctattaggagaaatgttacaggtgttgtactacacggagatgcggtcgatgagcccgaatttagagcggtcctcgaaggggttgtggatgagttcatcgagggcgagcaacagatccttgatcgagacccggtgttcagtgcagcgaaaggaaccgcagaaatgagtaagagatatcttttccgcgtgagaaatgtttccagcctacgcgccaagacgtcagagggtgccgagttgaagttgcattag

SEQ ID NO: 8601 - protein, 341 aa, Muscodor strobelii
  misc_feature: SGI Peptide ID NO. 562654
  misc_feature (14)..(275): NCBI GI: 240282374 Blast Desc: conserved [Ajellomyces capsulatus H143]
  misc_feature (3)..(319): NCBI GI: 225678155 Blast Desc: [Paracoccidioides brasiliensis Pb03]
  misc_feature (14)..(275): NCBI GI: 225559435 Blast Desc: [Ajellomyces capsulatus G186AR]
  misc_feature (14)..(275): NCBI GI: 154274193 Blast Desc: [Ajellomyces capsulatus NAm1] gi|150415556|gb|EDN10909.1| [Ajellomyces capsulatus NAm1]
  misc_feature (16)..(338): NCBI GI: 169608069 Blast Desc: SNOG_07101 [Phaeosphaeria nodorum SN15] gi|160701553|gb|EAT85752.2| SNOG_07101 [Phaeosphaeria nodorum SN15]
  misc_feature (68)..(148): NCBI GI: 121719330 Blast Desc: ACLA_003510 [Aspergillus clavatus NRRL 1] gi|119404562|gb|EAW14938.1| ACLA_003510 [Aspergillus clavatus NRRL 1]
  misc_feature (17)..(316): NCBI GI: 256722443 Blast Desc: NECHADRAFT_77205 [Nectria haematococca mpVI 77-13-4]
  misc_feature (82)..(317): NCBI GI: 116196150 Blast Desc: [Chaetomium globosum CBS 148.51] gi|88180586|gb|EAQ88054.1| [Chaetomium globosum CBS 148.51]
  misc_feature (113)..(220): NCBI GI: 189208458 Blast Desc: [Pyrenophora tritici-repentis Pt-1C-BFP] gi|187976655|gb|EDU43281.1| [Pyrenophora tritici-repentis Pt-1C-BFP]
  misc_feature (60)..(319): NCBI GI: 226279518 Blast Desc: conserved [Paracoccidioides brasiliensis Pb01]
MCIPIREKSLSITHDFGIGFDLNPSYGTVAVSYPNGSIYTIARVEGDGAYREMMHRLSLPSSQHIHEPYRNLGESIEDIPRQIWRGLRRRFGLAASGDAGTLSNMIRILRAEATAYVREDISAAGISKPHLKALYTEDIKDAFEHLGLINLELYRHGAGYYTLPATLAAYAGNGQGLCANYTDYVRCRQDEQQMEERFMLAVSYSYHGLLTSQVRLRSAWGTDEVLRSEDLRLGYAERDNRQSYFDRVREMLQIPVIERSIRRNVTGVVLHGDAVDEPEFRAVLEGVVDEFIEGEQQILDRDPVFSAAKGTAEMSKRYLFRVRNVSSLRAKTSEGAELKLH

SEQ ID NO: 8602 - DNA, 1293 bp, Muscodor strobelii
  misc_feature: SGI cDNA ID NO. 562655
  misc_feature: Encodes the peptide sequence at SEQ ID NO 8603
atgtgtcagttcgcccggacattggtttccgtttatgttctgatgacgcgctcctgcgttggcagctatgctgactttcctcgtcttcctgtacttgatgatagattcgtctggggctccgtaggcgattcatgggcatctggtgtgtctttttctggtcagaaaacggagtatgatggcgataagaataattgtcatcgttggaaagattcatatggacctataatagagcgcaagacgacctggaccattgggattcagaagttcaattttggcgcatgctcaggtgcacgtctacatgagatatgcgttgagcctcaagcagacaatcccccacaaatggaccttgttggtagtccacaaatgatcacctaccacactggtggcaacaactgtcttttcggtaacattgttgaggaatgtatctatcaaccccctaaacaggactatggagcagagtatccggacagctcaggacaattcgcacgaagaatccagcaaagtaatgattatatcaacgatacaaccagggcgggcttcggcttgtaccaagacgatttgaatacagtgagggatctgctcattcatcaggacgtcaggggtaataaggatttcaagctatatattctgagctatgctccgttcttcaatcttggagcaaattattgcgatgacatctcgttcggtgcactggcatggttgccatttggcaatgcaccgaaagtttccaatcggctgcgcacggatatcaacaacggcgttgaccgcgtaaatcagagtctcgcgcgcgttgcaaacgacgtcaatgatccacgagtcagatacattgacatctctcccgcatttgaggggcatagattctgcgagaatcaccataaatacagagaccagtggtacgagcccgatgtttggctttggaatttcaaccacccaggcttggaccctcctgctgacccgtcattgatggatttatggcttagtcaaggcaagctgccagatggtacggtcctgagtcttcctgatggtgcagatgttggtgttgagatgcagggaggtgcggatacagatggtgggactggcagcggaggaacacagccaacatgggttcaacgacccttccaccctaaacacaggggtgcggaggtaattgggaatatcatcattgcccaggcattagcagacaaaatcccaggtggagtgggctcgtctccgcctgcttcgggcgcttgtgattgtgacgagagcgggtgcagtccggaatcgcctacttgctgcgccagtgatacttgttga

SEQ ID NO: 8603 - protein, 430 aa, Muscodor strobelii
  misc_feature: SGI Peptide ID NO. 562655
  misc_feature (31)..(321): NCBI GI: 169612754 Blast Desc: SNOG_09503 [Phaeosphaeria nodorum SN15] gi|160702577|gb|EAT82768.2| SNOG_09503 [Phaeosphaeria nodorum SN15]
  misc_feature (87)..(313): NCBI GI: 189196018 Blast Desc: [Pyrenophora tritici-repentis Pt-1C-BFP] gi|187980226|gb|EDU46852.1| [Pyrenophora tritici-repentis Pt-1C-BFP]
  misc_feature (38)..(293): NCBI GI: 154275318 Blast Desc: [Ajellomyces capsulatus NAm1] gi|150414950|gb|EDN10312.1| [Ajellomyces capsulatus NAm1]
  misc_feature (4)..(293): NCBI GI: 240281835 Blast Desc: conserved [Ajellomyces capsulatus H143]
  misc_feature (38)..(293): NCBI GI: 225558915 Blast Desc: conserved [Ajellomyces capsulatus G186AR]
  misc_feature (18)..(307): NCBI GI: 119194569 Blast Desc: CIMG_01659 [Coccidioides immitis RS]
  misc_feature (36)..(421): NCBI GI: 242821769 Blast Desc: esterase family protein [Talaromyces stipitatus ATCC 10500] gi|218712668|gb|EED12093.1| esterase family protein [Talaromyces stipitatus ATCC 10500]
  misc_feature (38)..(289): NCBI GI: 225679700 Blast Desc: [Paracoccidioides brasiliensis Pb03]
  misc_feature (38)..(289): NCBI GI: 226291445 Blast Desc: conserved [Paracoccidioides brasiliensis Pb18]
  misc_feature (38)..(289): NCBI GI: 226285966 Blast Desc: conserved [Paracoccidioides brasiliensis Pb01]
MCQFARTLVSVYVLMTRSCVGSYADFPRLPVLDDRFVWGSVGDSWASGVSFSGQKTEYDGDKNNCHRWKDSYGPIIERKTTWTIGIQKFNFGACSGARLHEICVEPQADNPPQMDLVGSPQMITYHTGGNNCLFGNIVEECIYQPPKQDYGAEYPDSSGQFARRIQQSNDYINDTTRAGFGLYQDDLNTVRDLLIHQDVRGNKDFKLYILSYAPFFNLGANYCDDISFGALAWLPFGNAPKVSNRLRTDINNGVDRVNQSLARVANDVNDPRVRYIDISPAFEGHRFCENHHKYRDQWYEPDVWLWNFNHPGLDPPADPSLMDLWLSQGKLPDGTVLSLPDGADVGVEMQGGADTDGGTGSGGTQPTWVQRPFHPKHRGAEVIGNIIIAQALADKIPGGVGSSPPASGACDCDESGCSPESPTCCASDTC

SEQ ID NO: 8604 - DNA, 786 bp, Muscodor strobelii
  misc_feature: SGI cDNA ID NO. 562656
  misc_feature: Elevated expression when VOC is produced
  misc_feature: Encodes the peptide sequence at SEQ ID NO 8605
atgcgagaggtgctgcgtcgtacaggatgtacatggctgaggccttgcggccagccgggcttgaacgggcatgttgtcgactactcaagatacggttgtacagatcccacctggcaagatcccgcttgcttaaaccaatgtgcgcaattccagcccgacggaggaactggcataagaccatgtgacgggattgacaaggggaatcgctactgttgcgatgatgggaccaacggtgtaggatcattcgcttgttgcagtgatgaatcaaacatatttacagttggcgatggcggagcaagcatcatcgctacaattcctgctgtggtcacgtcttccgggatttctactactaactctgacgttacaacgtcgtcgtcaacccaagactctacgacctcacatttcacgacgacaagctcgacaacagcgagcccgacaattagtaaagttccgtctcccacgaactcgagcgcgaattcggccacctctcacgaaagccaaaatcctcttactttgggccttggtatcggtcttggtgttggtctgcctgcgacagccgccgtcctgggtgcgttgttttggttctcaagacgctcacgctccgatccgaagccaagagcagaattagaaggcatgcttgatagtgtatcaccccaaggaccacgatcatccgagggaggtttcttcaatccaaaggcagaaaatacgcgttacgccgttggtacaccgaacacgccaccatcagaactcgccgctagttctagagaaatcagcgagcttggctga

SEQ ID NO: 8605 - protein, 261 aa, Muscodor strobelii
  misc_feature: SGI Peptide ID NO. 562656
  misc_feature (22)..(250): NCBI GI: 154290405 Blast Desc: BC1G_15672 [Botryotinia fuckeliana B05.10] gi|150847743|gb|EDN22936.1| [Botryotinia fuckeliana B05.10]
  misc_feature (22)..(234): NCBI GI: 156054899 Blast Desc: [Sclerotinia sclerotiorum 1980] gi|154704077|gb|EDO03816.1| [Sclerotinia sclerotiorum 1980]
  misc_feature (84)..(250): NCBI GI: 258567346 Blast Desc: L-aminoadipate-semialdehyde dehydrogenase large subunit [Uncinocarpus reesii 1704] gi|237905863|gb|EEP80264.1| L-aminoadipate-semialdehyde dehydrogenase large subunit reesii
  misc_feature (28)..(231): NCBI GI: 46127829 Blast Desc: FG08292.1 [Gibberella zeae PH-1]
  misc_feature (30)..(209): NCBI GI: 156060799 Blast Desc: [Sclerotinia sclerotiorum 1980] gi|154699946|gb|EDN99684.1| [Sclerotinia sclerotiorum 1980]
  misc_feature: Useful for introducing or modulating the production of volatile compounds
MREVLRRTGCTWLRPCGQPGLNGHVVDYSRYGCTDPTWQDPACLNQCAQFQPDGGTGIRPCDGIDKGNRYCCDDGTNGVGSFACCSDESNIFTVGDGGASIIATIPAVVTSSGISTTNSDVTTSSSTQDSTTSHFTTTSSTTASPTISKVPSPTNSSANSATSHESQNPLTLGLGIGLGVGLPATAAVLGALFWFSRRSRSDPKPRAELEGMLDSVSPQGPRSSEGGFFNPKAENTRYAVGTPNTPPSELAASSREISELG

SEQ ID NO: 8606 - DNA, 1965 bp, Muscodor strobelii
  misc_feature: SGI EST ID NO. CUFF.20820.1
  misc_feature: Variant of the nucleotide sequence at SEQ ID NO 8604
gatgtatcgtgcaccagtcagattgagattatgaggtacctaaatcatttaggtactgatcctgtagccttctgccgtgacaattaggtcgtcacctttgacgcggctgcaatgtagtgcaggacatgaccacagatggccgtcgtttccttcaacggacaagccagtaaatcaagatctgagttcattttcagccggtatcttttagcggctttctaaaaatatgagcccaggtcatacgttatgtatgagcggttctacacatacctacgcggttaacaatgtgacgtttcaacttgtaaggtcaaagtgatttgacaagccctcctactctcctgtccacatttaaccatgaacttataattgggatatacatctgtgcagtgttggcgttcttgtccgcaggatttgcctcggattgggaatggcgctgtgtccagattgaagagagttgatccgactggctcgaagatgacaagggattgcagactctgccacagcctcacctgtatgccagggccagagaaaacttggcgtcgatgttgttttgatgtaccgccccttaatctccacatatcggaaagccctacgagagggcatctgctccgtcagtaccatgcgagaggtgctgcgtcgtagtgcgtcttggtcgctcttctgggtgaacaacaaggccgcaaccgttgagaaacattgggaatccatccaggaaaattctcttatattctaatcaccgttcatcgctggaagtacgtgtatcctagaaaatcttctgacttgttctcagcaggatgtacatggctgaggccttgcggccagccggtacgttagacagatggacaattggtcttccgtgcttgcttcttaccgccaacctactgggatcaacacgtgcccaagacgcgtccgatacttgttactatctcaatggggcgcaaaacggagagggtcttcaaaggtgcaacaatgaaactacaggctactcaacgtgttgccctcctggatggacgtgttggtcgaatggcgtttgtcagggcttgaacgggcatgttgtcgactactcaagatacggttgtacagatcccacctggcaagatcccgcttgcttaaaccaatgtgcgcaattccagcccgacggaggaactggcataagaccatgtgacgggattgacaaggggaatcgctactgttgcgatgatgggaccaacggtgtaggatcattcgcttgttgcagtgatgaatcaaacatatttacagttggcgatggcggagcaagcatcatcgctacaattcctgctgtggtcacgtcttccgggatttctactactaactctgacgttacaacgtcgtcgtcaacccaagactctacgacctcacatttcacgacgacaagctcgacaacagcgagcccgacaattagtaaagttccgtctcccacgaactcgagcgcgaattcggccacctctcacgaaagccaaaatcctcttactttgggccttggtatcggtcttggtgttggtctgcctgcgacagccgccgtcctgggtgcgttgttttggttctcaagacgctcacgctccgatccgaagccaagagcagaattagaaggcatgcttgatagtgtatcaccccaaggaccacgatcatccgagggaggtttcttcaatccaaaggcagaaaatacgcgttacgccgttggtacaccgaacacgccaccatcagaactcgccgctagttctagagaaatcagcgagcttggctgaaggagtgcattgtcgtgtaccgccggccgtactcttacttcgagcgcgaactactatgtttcgcttattttatctaaatgtgcattgatataccatgcgatcataaaatcaagggcgttcgggcgatctatcattgcatttacatgagtttccatggaagagcgtccgattattgatgtacatataccatattgctaacgag

SEQ ID NO: 8607 - DNA, 414 bp, Muscodor strobelii
  misc_feature: SGI cDNA ID NO. 562657
  misc_feature: Encodes the peptide sequence at SEQ ID NO 8608
atgcattattatacttcgcttacaatcttcgccgctattgtcggtcttgcaaagtcgatgcctttggtgtctcaagagactagcaacgtcaacaagcgcgcccagccgatgtgggtcaacgatcttgagattgccaaagaagcgaagcgtgctcagccaatctgggttaatgacctcgaaattgccaaagaagaaaggcgttcacagccaatatgggtcaatgatctcgagattgctaaggaagagaagcgtgcgcaaccgatttgggtgaatgatcttgaaattgctaaggaagaaaaacgtgcacagccgatttgggtcaatgacctcgagatcgccaaagatgagaagcgggcacagccaatctgggttaacgatcttgaaatcgctaaggaagagaagcgtagccagtag

SEQ ID NO: 8608 - protein, 137 aa, Muscodor strobelii
  misc_feature: SGI Peptide ID NO. 562657
MHYYTSLTIFAAIVGLAKSMPLVSQETSNVNKRAQPMWVNDLEIAKEAKRAQPIWVNDLEIAKEERRSQPIWVNDLEIAKEEKRAQPIWVNDLEIAKEEKRAQPIWVNDLEIAKDEKRAQPIWVNDLEIAKEEKRSQ

SEQ ID NO: 8609 - DNA, 890 bp, Muscodor strobelii
  misc_feature: SGI EST ID NO. CUFF.20828.0
  misc_feature: Variant of the nucleotide sequence at SEQ ID NO 8607
agtcaattgagaagtcagtggcacaatcgagaatctcatgctataagaatcggcttgtagaccacatcccgctgccttgcctggcattcgatgctattatcaacatttcagaagcaagcctttgagtacaaacagcggaaattatttccccattcctaatcatcatgcattattatacttcgcttacaatcttcgccgctattgtcggtcttgcaaagtcgatgcctttggagactagcaacgtcaacaagcgcgcccagccgatgtgggtcaacgatcttgagattgccaaagaagcgaagcgtgctcagccaatctgggttaatgacctcgaaattgccaaagaagaaaggcgttcacagccaatatgggtcaatgatctcgagattgctaaggaagagaagcgtgcgcaaccgatttgggtgaatgatcttgaaattgctaaggaagaaaaacgtgcacagccgatttgggtcaatgacctcgagatcgccaaagatgagaagcgggcacagccaatctgggttaacgatcttgaaatcgctaaggaagagaagcgtagccagtagaggtcaaactagtgcctagtcgcacaaaggcgacaatgcagtcttaggaagaaatcggtaaacagtgcttgctatccatggttcatatgacagggctgggattctcttgcaaagatgcgtcaagcttcttcagtcgttcgtaagtttcatctcggcatttatgcagcatatattagtcagactgcttgtgagggttaccctcattcttgttacctcagaaagggagtgcgatgtgagaaatgaatgatgggagtaaactgtcacaccaatattgtagatagccgatcactcaactcaatctacaataacattctcttgctc

SEQ ID NO: 8610 - DNA, 423 bp, Muscodor strobelii
  misc_feature: SGI cDNA ID NO. 562658
  misc_feature: Encodes the peptide sequence at SEQ ID NO 8611
atggcccagcaaggagggacatacaaaccaagaccgaagagtaaatatttttcattctcgataggatgtggttgttacgcagcccagtctgacaggagcgacacgaatcgacaaagtacaaaccgcttgggcgcagaggaggtccaaagcgaacgagaaaaaaagggcgatggggacgaagcatcctccgcaatacgtccagactcgtctggtgacgtcgcgaacgagtgggtaatagttggtcctgacggagaaatcgagaatgagaagtcggggatcaattcgtcttacgagtgcaaagtaggatggggaactagaaagattacactcttcagctggtacttcaagactggtgatcatgctcgcgaaatatggcgccaagaacgatatgaggagctagcagaacccgaacagcttaattag

SEQ ID NO: 8611 - protein, 140 aa, Muscodor strobelii
  misc_feature: SGI Peptide ID NO. 562658
MAQQGGTYKPRPKSKYFSFSIGCGCYAAQSDRSDTNRQSTNRLGAEEVQSEREKKGDGDEASSAIRPDSSGDVANEWVIVGPDGEIENEKSGINSSYECKVGWGTRKITLFSWYFKTGDHAREIWRQERYEELAEPEQLN

SEQ ID NO: 8612 - DNA, 1005 bp, Muscodor strobelii
  misc_feature: SGI EST ID NO. CUFF.20835.0
  misc_feature: Variant of the nucleotide sequence at SEQ ID NO 8610
aaagcatcatgggctttgcttatttgatatgactacttggccgtcttttaggtcgtgtctaatccttcgcctctaattagcttcgaaaaaaattaatgactatcatgtcaataaccttgtcgttccaagagcacgagtatcaatttcacgaagaaattatagatcaaagcacctcaagtcacgatagccatgaccccgcaaacgcgcccgaatgagcaaccaagcgacctccagtgatctgcatgcccgcccgacacttcatgcaggtcatattcgccaccagtgtgacaaggactatgattacataaggctcacagatatcaggcgtccgtttagacagtccttgacagtttcatcttctcgctccatctggcttacaagctctaaaagcaaacatctaacggccctatcatccgagagcgctcattcgcaatggcccagcaaggagggacatacaaaccaagaccgaagagtaaatatttttcattctcgataggatgtggttgttacgcagcccagtctgacaggagcgacacgaatcgacaaagtacaaaccgcttgggcgcagaggaggtccaaagcgaacgagaaaaaaagggcgatggggacgaagcatcctccgcaatacgtccagactcgtctggtgacgtcgcgaacgagtgggtaatagttggtcctgacggagaaatcgagaatgagaagtcggggatcaattcgtcttacgagtgcaaagtaggatggggaactagaaagattacactcttcagctggtacttcaagactggtgatcatgctcgcgaaatatggcgccaagaacgatatgaggagctagcagaacccgaacagcttaattaggacagacccaatgtagtttacctcaatctgagacaagaaaatcgagttgcagttcatatatgcagcatttgaatcaatgcggcactaattttccgatgctcaggtagtgtaggcgagcaacgccgttgcaaccaccgcaatctatctaag

SEQ ID NO: 8613 - DNA, 897 bp, Muscodor strobelii
  misc_feature: SGI cDNA ID NO. 562659
  misc_feature: Elevated expression when VOC is produced
  misc_feature: Encodes the peptide sequence at SEQ ID NO 8614
atgtggtcttacatcttggtgactacgctcgcgatcgccggtactcactgcgcgcggattctccagtcgaacgacgatggatgggccgagtcgtatatccgcaaactcaacgatgcgttgacagaagccggccacgacgttgtattgtctgcgcccgcccaaaacgaatcgggcactggctcgctcgacgtggaccctttgccgtcgacgggatcctgtgaatacaattcatgtccgcctggaggcgcagttggcagtaacacaaccaacccacgattgaactgggtgaattcgtttccagtcacctcagccagatacggagtcgagatgtttgcaccgcaattttggggcgactcgccggctgacttggtagtttccggaccaaacgtgggctcaaacttataccttgaggtccaattctctggcacagttggggttgctagatatgctagccacgacattggcatcccagccattgcattctcaggggcgacagaagaccggcagtcctattcagcatcacctaaatccgcagccagcgcgatctacgctgaactgtctacgcagcttactgaggcgattcttgcctctggtgcgccgtatcttccagacaataccttcttaaatgtcaattttccaacggtcgataattgtcccaatgcagcgtcatattcgtgggttctcacgcgcatcaatccggctggcttcttatccacaccagatgttcagacatgtggcaacactcggctacccaccgaaagcgacgttgttggtggggaaggctgcttcatcgccgttagtgtcggcaatgcatcagataagaccactgccgctgctgcgcaacaatcagttgttcttcagaaattaggcagcatgctcacatgctggtcgggatag

SEQ ID NO: 8614 - protein, 298 aa, Muscodor strobelii
  misc_feature: SGI Peptide ID NO. 562659
  misc_feature (18)..(231): Pfam Id: PF01975 Pfam Desc: Survival protein SurE
  misc_feature (122)..(213): Pfam Id: PF01975 Pfam Desc: Survival protein SurE
  misc_feature (1)..(295): NCBI GI: 116191153 Blast Desc: CHGG_05294 [Chaetomium globosum CBS 148.51] gi|88181207|gb|EAQ88675.1| CHGG_05294 [Chaetomium globosum CBS 148.51]
  misc_feature (1)..(295): NCBI GI: 256731556 Blast Desc: [Nectria haematococca mpVI 77-13-4]
  misc_feature (1)..(295): NCBI GI: 171683722 Blast Desc: protein product [Podospora anserina] gi|170941821|emb|CAP67474.1| protein product [Podospora anserina]
  misc_feature (1)..(295): NCBI GI: 46123111 Blast Desc: FG05933.1 [Gibberella zeae PH-1]
  misc_feature (20)..(295): NCBI GI: 70981642 Blast Desc: acid phosphatase [Aspergillus fumigatus Af293] gi|66843972|gb|EAL84312.1| acid phosphatase, [Aspergillus fumigatus Af293] gi|159122040|gb|EDP47163.1| acid phosphatase,
  misc_feature (19)..(295): NCBI GI: 119501529 Blast Desc: 5'/3'-nucleotidase SurE family protein [Neosartorya fischeri NRRL 181] gi|119415687|gb|EAW25624.1| 5'/3'-nucleotidase SurE family protein [Neosartorya fischeri NRRL 181]
  misc_feature (20)..(295): NCBI GI: 115401910 Blast Desc: conserved [Aspergillus terreus NIH2624] gi|114190484|gb|EAU32184.1| conserved [Aspergillus terreus NIH2624]
  misc_feature (19)..(295): NCBI GI: 67525509 Blast Desc: AN3212.2 [Aspergillus nidulans FGSC A4] gi|40743750|gb|EAA62937.1| AN3212.2 [Aspergillus nidulans FGSC A4] gi|259485825|tpe|CBF83175.1| TPA: acid phosphatase, nidulans
  misc_feature (19)..(295): NCBI GI: 169606222 Blast Desc: SNOG_06148 [Phaeosphaeria nodorum SN15] gi|111064859|gb|EAT85979.1| SNOG_06148 [Phaeosphaeria nodorum SN15]
  misc_feature (19)..(295): NCBI GI: 145616278 Blast Desc: MGG_03439 [Magnaporthe grisea 70-15] gi|145010017|gb|EDJ94673.1| MGG_03439 [Magnaporthe grisea 70-15]
  misc_feature (20)..(288): SWISSPROT Homolog: EC 3.1.3.2 Acid phosphatase
  misc_feature: Useful for introducing or modulating the production of volatile compounds
MWSYILVTTLAIAGTHCARILQSNDDGWAESYIRKLNDALTEAGHDVVLSAPAQNESGTGSLDVDPLPSTGSCEYNSCPPGGAVGSNTTNPRLNWVNSFPVTSARYGVEMFAPQFWGDSPADLVVSGPNVGSNLYLEVQFSGTVGVARYASHDIGIPAIAFSGATEDRQSYSASPKSAASAIYAELSTQLTEAILASGAPYLPDNTFLNVNFPTVDNCPNAASYSWVLTRINPAGFLSTPDVQTCGNTRLPTESDVVGGEGCFIAVSVGNASDKTTAAAAQQSVVLQKLGSMLTCWSG

SEQ ID NO: 8615 - DNA, 1475 bp, Muscodor strobelii
  misc_feature: SGI EST ID NO. CUFF.20838.0
  misc_feature: Variant of the nucleotide sequence at SEQ ID NO 8613
ccacagggcgcgcgcagtgaccaaataaccaagcaaagccgggacttggcaaccctaacccctaccaggaggactccaggaagttgtcaaaacaggacagatggggcagctcaaacccgacatatccaggagattaaagaccaagttgtcgtcagccatgtcatgccattgttatgctgttcttctctcattacctttgctctgtttcgggggcgcattgactacgtgatcgactaggcgacagcaaaataacaatgtggtcttacatcttggtgactacgctcgcgatcgccggtactcactgcgcgcggattctccagtcgaacgacgatggatgggccgagtcgtatatccgcaaactcaacgatgcgttgacagaagccggccacgacgttgtattgtctgcgcccgcccaaaacgaatcgggcactggctcgctcgacgtggaccctttgccgtcgacgggatcctgtgaatacaattcatgtccgcctggaggcgcagttggcagtaacacaaccaacccacgattgaactgggtgaattcgtttccagtcacctcagccagatacggagtcgagatgtttgcaccgcaattttggggcgactcgccggctgacttggtagtttccggaccaaacgtgggctcaaacttataccttgaggtccaattctctggcacagttggggttgctagatatgctagccacgacattggcatcccagccattgcattctcaggggcgacagaagaccggcagtcctattcagcatcacctaaatccgcagccagcgcgatctacgctgaactgtctacgcagcttactgaggcgattcttgcctctggtgcgccgtatcttccagacaataccttcttaaatgtcaattttccaacggtcgataattgtcccaatgcagcgtcatattcgtgggttctcacgcgcatcaatccggctggcttcttatccacaccagatgttcagacatgtggcaacactcggctacccaccgaaagcgacgttgttggtggggaaggctgcttcatcgccgttagtgtcggcaatgcatcagataagaccactgccgctgctgcgcaacaatcagttgttcttcagaaattaggcagcatgctcacatgctggtcgggatagaagacgaagtgggtcttggatttggcttgtacattcgggacaacacatataatactgcatttagtacatgcacatcatgaatattcatcgcttgtgtgtaatgctcagcgagtattagatcgcgatgtcgaatgaaattcagtgcaatcagcggtggtaatacaagctacctaatgtgtgttgccgtgcctgataattatcgatctacgattctggttgcgaaatatcttggtatgctcaagtgtaccaacactattaggcctgtctgcgttactgggtcttggtaactcaattcctgggccactcgttgccacaataaaaaag

SEQ ID NO: 8616 - DNA, 1185 bp, Muscodor strobelii
  misc_feature: SGI cDNA ID NO. 562660
  misc_feature: Elevated expression when VOC is produced
  misc_feature: Encodes the peptide sequence at SEQ ID NO 8617
atgaagtttatagcactcctccggctcgcgctctacggaggcctcgcaacgatctcgttgtacttcgcatttcttgctcttctgacacggccactgattcaaaatcaagcgatttatctcaatgccatcaccctcacctggtttcgggatgtcaacatccccgagcaatggggatttctgcgcaatcaagtcacgccgttcacgctcaagacagcggatggctacagcttacacgcatggcacattctaccattgaagttgtaccaagagcatgaggcagaactcatccatcaaagcccaggacacgcattagacgtcactcaaactctcagtttcgagttgctacgtgacgacccaaatgcattgttggttttatacttccacggcgccggtggaaccgtcgcgtctggatggagaccgcaaagctatcgtgcgatgtctgctcttgcgcccgacagaatacacacggtttccattgattatcgagggtttggaagtagcacaggcaccccgtcggaggcaggtcttctcgctgatgcatcagcagtcgccgagtgggcgatcaatgtggcgggcattccaccatctcggattgttctgttcggccagtctctcggtactgcagtcagtgccgctcttgcccttcagtacgcgactcggacagagccgataatgttttcgggcctggtacttgtagcgccgatggctaacgttgagcttctcacggcgacttatcgcgtcgctggggtcattccaattcttgatccggttgctcgcttccccaagctgttggcttggctcaataccttcatcaacgataagtggcgtacagacgagaagctagcagatctagttcgtgcgtgtgaacatcatcatgatgggtctttgcgataccacatcaccttcattcatgccctagacgataatttcataccctggttccatagtgatgccaacttttggcatgctgttaatgcatcaacccccgcaggtgtgagtatcggtaatctcgaagatttcaaagcgcattctaaggtccccttcgatactgaaagttggaccgttgaatggaaagcaagacgaggatgtattagggaacaaatagtgcaattcggactccacgacaggattatggcctacccggttgtgagccaagcaatagcgagggcacttgacgaaaaatag

SEQ ID NO: 8617 - protein, 394 aa, Muscodor strobelii
  misc_feature: SGI Peptide ID NO. 562660
  misc_feature (154)..(220): Pfam Id: PF00561 Pfam Desc: alpha/beta hydrolase fold
  misc_feature (21)..(391): NCBI GI: 39946410 Blast Desc: MGG_08306 [Magnaporthe grisea 70-15] gi|145020049|gb|EDK04277.1| MGG_08306 [Magnaporthe grisea 70-15]
  misc_feature (11)..(362): NCBI GI: 261359309 Blast Desc: abhydrolase domain-containing protein [Verticillium albo-atrum VaMs.102]
  misc_feature (18)..(389): NCBI GI: 255937581 Blast Desc: Pc13g14090 [Penicillium chrysogenum Wisconsin 54-1255] gi|211584437|emb|CAP92478.1| Pc13g14090 [Penicillium chrysogenum Wisconsin 54-1255]
  misc_feature (11)..(382): NCBI GI: 169599987 Blast Desc: SNOG_02824 [Phaeosphaeria nodorum SN15] gi|160705359|gb|EAT89555.2| SNOG_02824 [Phaeosphaeria nodorum SN15]
  misc_feature (12)..(391): NCBI GI: 238840621 Blast Desc: abhydrolase domain-containing protein 12B [Microsporum canis CBS 113480]
  misc_feature (6)..(392): NCBI GI: 145241450 Blast Desc: An09g00470 [Aspergillus niger] gi|134077909|emb|CAL00307.1| protein product [Aspergillus niger]
  misc_feature (21)..(391): NCBI GI: 189192308 Blast Desc: abhydrolase domain containing 12 [Pyrenophora tritici-repentis Pt-1C-BFP] gi|187974099|gb|EDU41598.1| abhydrolase domain containing 12 [Pyrenophora tritici-repentis
  misc_feature (16)..(392): NCBI GI: 212539730 Blast Desc: abhydrolase domain-containing protein, [Penicillium marneffei ATCC 18224] gi|210067319|gb|EEA21411.1| abhydrolase domain-containing protein, [Penicillium marneffei ATCC 18224]
  misc_feature (20)..(360): NCBI GI: 116203105 Blast Desc: CHGG_09437 [Chaetomium globosum CBS 148.51] gi|88177955|gb|EAQ85423.1| CHGG_09437 [Chaetomium globosum CBS 148.51]
  misc_feature (6)..(391): NCBI GI: 46140153 Blast Desc: FG11591.1 [Gibberella zeae PH-1]
  misc_feature (18)..(239): SWISSPROT Homolog: EC 3.1.1.23 Acylglycerol lipase
  misc_feature: Useful for introducing or modulating the production of volatile compounds
MKFIALLRLALYGGLATISLYFAFLALLTRPLIQNQAIYLNAITLTWFRDVNIPEQWGFLRNQVTPFTLKTADGYSLHAWHILPLKLYQEHEAELIHQSPGHALDVTQTLSFELLRDDPNALLVLYFHGAGGTVASGWRPQSYRAMSALAPDRIHTVSIDYRGFGSSTGTPSEAGLLADASAVAEWAINVAGIPPSRIVLFGQSLGTAVSAALALQYATRTEPIMFSGLVLVAPMANVELLTATYRVAGVIPILDPVARFPKLLAWLNTFINDKWRTDEKLADLVRACEHHHDGSLRYHITFIHALDDNFIPWFHSDANFWHAVNASTPAGVSIGNLEDFKAHSKVPFDTESWTVEWKARRGCIREQIVQFGLHDRIMAYPVVSQAIARALDEK

SEQ ID NO: 8618 - DNA, 1610 bp, Muscodor strobelii
  misc_feature: SGI EST ID NO. CUFF.20840.0
  misc_feature: Variant of the nucleotide sequence at SEQ ID NO 8616
tagcactcctccggctcgcgctctacggaggcctcgcaacgatctcgttgtacttcgcatttcttgctcttctgacacggccactgattcaaaatcaagcgatttatctcaatgccatcaccctcacctggtttcgggatgtcaacatccccgagcaatggggatttctgcgcaatcaagtcacgccgttcacgctcaagacagcggatggctacagcttacacgcatggcacattctaccattgaagttgtaccaagagcatgaggcagaactcatccatcaaagcccaggacacgcattagacgtcactcaaactctcagtttcgagttgctacgtgacgacccaaatgcattgttggttttatacttccacggcgccggtggaaccgtcgcgtctggatggagaccgcaaagctatcgtgcgatgtctgctcttgcgcccgacagaatacacacggtttccattgattatcgagggtttggaagtagcacaggcaccccgtcggaggcaggtcttctcgctgatgcatcagcagtcgccgagtgggcgatcaatgtggcgggcattccaccatctcggattgttctgttcggccagtctctcggtactgcagtcagtgccgctcttgcccttcagtacgcgactcggacagagccgataatgttttcgggcctggtacttgtagcgccgatggctaacgttgagcttctcacggcgacttatcgcgtcgctggggtcattccaattcttgatccggttgctcgcttccccaagctgttggcttggctcaataccttcatcaacgataagtggcgtacagacgagaagctagcagatctagttcgtgcgtgtgaacatcatcatgatgggtctttgcgataccacatcaccttcattcatgccctagacgataatttcataccctggttccatagtgatgccaacttttggcatgctgttaatgcatcaacccccgcaggtgtgagtatcggtaatctcgaagatttcaaagcgcattctaaggtccccttcgatactgaaagttggaccgttgaatggaaagcaagacgaggatgtattagggaacaaatagtgcaattcggactccacgacaggattatggcctacccggttgtgagccaagcaatagcgagggcacttgacgaaaaatagaacaaaacctgtggactaattattcataaaggttccaggcagagactgaaactcttctcgcgctagcttcatgaggacggtatacgtatccaaactacgaagcttactggagcaagtaggcataggtctcgtaatctgtcgagcctgtggaacgagaatctggtactcggtatagagatcgattagtcgtgtcagatatgccttcgttaggccagtgcataattatgagttgaggagtcctcggatatgtactcgcgcaatgctggctcatgtagctgagcgccgggtctagccccctgaaacgggtcctttcacatgcgttaacttccagctcctaatcgtttgggttcgtgtatacctcaatgggttgtccaaagtcaatataattctcaagcacaagcagaatgcactgactccccctcagcgtccaacaac

SEQ ID NO: 8619 - DNA, 1779 bp, Muscodor strobelii
  misc_feature: SGI cDNA ID NO. 562661
  misc_feature: Encodes the peptide sequence at SEQ ID NO 8620
atgccagaactaatacgcgattcttttttcggccatagcgttcgcatcctggtaaatactttcctatctagtgagatcatgactaccggcggaagattcttcaagtatccagaggaaatcgattcatcgatatggaaacgatacgtcgactctgagaaatctgccaacattgcgcaccatggacatactggagaaccatcaccaacttcttcacaggagcgaattgttgatgaagattccaataattccacaaacagtggcagtaatggaagtagcgagagggatcggccatctgcggcccgagttgatacccacgttgttgtccacggccatccgagtagaaaagttgatcccgagaaaggcaaagacttctatatcgtggattggtacgggccggatgacccggagaatccacagaactggtccacacccaagaagcttttcgtcactttcgaaatatgcttcttaacattcagtgtttacatcggtagtgcgatatacacggcaggtttgcagtctgtggtcaaaactttcaaggtgtcgcaagttgctgctacgcttggtcttactctgttcgttatcggttatggcattggtcctatggtctggtcacctctctcggaaattccacagataggtcgaaatacggtctacattctgaccctggcacttttcgtggctcttcaggtgcctaccgctttggcagtaaactttggcatgcttctcgcttttcgtttcctcactggcttcgttggcagcccgagtctggcgacgggcggcgcgagtatcggcgacatgtactcacctgcaaagcgaacgtatggattagcagtgtgggggattggcgcggtatgtggtccgacgctcggcccattagtaggtggttttgctgcggaagcaaagggatggcaatggccaatctgggagcttacatggctctcgggtggaactcttctcgttcttattttcttcttgccggaaacaagccctacaaatattttgtaccgaagatcgcgacgactccgcaagctcacaggcaacgagaagcttatatcagaaccggagcttgtgggaaaggacatgaccccgaaagacatcgcaatgatgacacttgttcgacccttcagtctaatgtttactgagccgattgtattgctactcgacttatatctcgcgctcgtgtacggattactctatatctggtttgagagttttcccattgtttttattgagatatacggcttttctctcgggactgaaggtctcgccttcttggggatcttgatagcagtcttcattgtgttaccacccttttgttggtatttccacaagtacgtcgagccgaagtttaacgagaacggagagctgaaaccagaatggcgtttaccaccagcttttgttggcgcattcgccattcccatctgtcttttctggtttggatggtctagtcgctcggacatccactggattgtccccattatagggacgggttggttcagtatcggtgccttcctgctcttcaattgcgttatgaattacctttccgacgcttacccggactatgtggcaagcatattggcgggtaatgactttttaagaagtggagttggcgcaggattccctctatttgcatctgctatgtacaagaatctcggcgtgaattgggcaagttcaacactcgcctttatctcagttgcattcattcctatcccgtttgtgttgttcaagtacggggaatggctgagacataagagtaagcatgctagacacgacctatga

SEQ ID NO: 8620 - protein, 592 aa, Muscodor strobelii
  misc_feature: SGI Peptide ID NO. 562661
  misc_feature (153)..(541): Pfam Id: PF07690 Pfam Desc: Major Facilitator Superfamily
  misc_feature (1)..(540): NCBI GI: 46111967 Blast Desc: FG02865.1 [Gibberella zeae PH-1]
  misc_feature (1)..(592): NCBI GI: 189189440 Blast Desc: benomyl/methotrexate resistance protein [Pyrenophora tritici-repentis Pt-1C-BFP] gi|187972665|gb|EDU40164.1| benomyl/methotrexate resistance protein [Pyrenophora Pt-1C-BFP]
  misc_feature (1)..(592): NCBI GI: 145254457 Blast Desc: An18g01720 [Aspergillus niger] gi|134084211|emb|CAK47244.1| protein product [Aspergillus niger]
  misc_feature (3)..(592): NCBI GI: 169608253 Blast Desc: SNOG_07194 [Phaeosphaeria nodorum SN15] gi|111064725|gb|EAT85845.1| SNOG_07194 [Phaeosphaeria nodorum SN15]
  misc_feature (1)..(592): NCBI GI: 156062062 Blast Desc: SS1G_01145 [Sclerotinia sclerotiorum 1980] gi|154696483|gb|EDN96221.1| SS1G_01145 [Sclerotinia sclerotiorum 1980]
  misc_feature (1)..(592): NCBI GI: 154292086 Blast Desc: BC1G_14852 [Botryotinia fuckeliana B05.10] gi|150846279|gb|EDN21472.1| BC1G_14852 [Botryotinia fuckeliana B05.10]
  misc_feature (3)..(592): NCBI GI: 169767646 Blast Desc: [Aspergillus oryzae RIB40] gi|83766149|dbj|BAE56292.1| protein product [Aspergillus oryzae]
  misc_feature (3)..(592): NCBI GI: 238484555 Blast Desc: caffeine resistance protein, [Aspergillus flavus NRRL3357] gi|220701566|gb|EED57904.1| caffeine resistance protein, [Aspergillus flavus NRRL3357]
  misc_feature (3)..(568): NCBI GI: 145252122 Blast Desc: An16g02610 [Aspergillus niger] gi|134083118|emb|CAK46791.1| protein product [Aspergillus niger]
  misc_feature (6)..(588): NCBI GI: 71013596 Blast Desc: UM02490.1 [Ustilago maydis 521] gi|46098295|gb|EAK83528.1| UM02490.1 [Ustilago maydis 521]
MPELIRDSFFGHSVRILVNTFLSSEIMTTGGRFFKYPEEIDSSIWKRYVDSEKSANIAHHGHTGEPSPTSSQERIVDEDSNNSTNSGSNGSSERDRPSAARVDTHVVVHGHPSRKVDPEKGKDFYIVDWYGPDDPENPQNWSTPKKLFVTFEICFLTFSVYIGSAIYTAGLQSVVKTFKVSQVAATLGLTLFVIGYGIGPMVWSPLSEIPQIGRNTVYILTLALFVALQVPTALAVNFGMLLAFRFLTGFVGSPSLATGGASIGDMYSPAKRTYGLAVWGIGAVCGPTLGPLVGGFAAEAKGWQWPIWELTWLSGGTLLVLIFFLPETSPTNILYRRSRRLRKLTGNEKLISEPELVGKDMTPKDIAMMTLVRPFSLMFTEPIVLLLDLYLALVYGLLYIWFESFPIVFIEIYGFSLGTEGLAFLGILIAVFIVLPPFCWYFHKYVEPKFNENGELKPEWRLPPAFVGAFAIPICLFWFGWSSRSDIHWIVPIIGTGWFSIGAFLLFNCVMNYLSDAYPDYVASILAGNDFLRSGVGAGFPLFASAMYKNLGVNWASSTLAFISVAFIPIPFVLFKYGEWLRHKSKHARHDL

SEQ ID NO: 8621 - DNA, 263 bp, Muscodor strobelii
  misc_feature: SGI EST ID NO. CUFF.20844.0
  misc_feature: Variant of the nucleotide sequence at SEQ ID NO 8619
ttccgacgcttacccggactatgtggcaagcatattggcgggtaatgactttttaagaagtggagttggcgcaggattccctctatttgcatctgctatgtacaagaatctcggcgtgaattgggcaagttcaacactcgcctttatctcagttgcattcattcctatcccgtttgtgttgttcaagtacggggaatggctgagacataagagtaagcatgctagacacgacctatgattctagcgatttaccatcatttgta

SEQ ID NO: 8622 - DNA, 1836 bp, Muscodor strobelii
  misc_feature: SGI cDNA ID NO. 562662
  misc_feature: Encodes the peptide sequence at SEQ ID NO 8623
atgccagaactaatacgcgattcttttttcggccatagcgttcgcatcctggtaaatactttcctatctagtgagatcatgactaccggcggaagattcttcaagtatccagaggaaatcgattcatcgatatggaaacgatacgtcgactctgagaaatctgccaacattgcgcaccatggacatactggagaaccatcaccaacttcttcacaggagcgaattgttgatgaagattccaataattccacaaacagtggcagtaatggaagtagcgagagggatcggccatctgcggcccgagttgatacccacgttgttgtccacggccatccgagtagaaaagttgatcccgagaaaggcaaagacttctatatcgtggattggtacgggccggatgacccggagaatccacagaactggtccacacccaagaagcttttcgtcactttcgaaatatgcttcttaacattcagtgtttacatcggtagtgcgatatacacggcaggtttgcagtctgtggtcaaaactttcaaggtgtcgcaagttgctgctacgcttggtcttactctgttcgttatcggttatggcattggtcctatggtctggtcacctctctcggaaattccacagataggtcgaaatacggtctacattctgaccctggcacttttcgtggctcttcaggtgcctaccgctttggcagtaaactttggcatgcttctcgcttttcgtttcctcactggcttcgttggcagcccgagtctggcgacgggcggcgcgagtatcggcgacatgtactcacctgcaaagcgaacgtatggattagcagtgtgggggattggcgcggtatgtggtccgacgctcggcccattagtaggtggttttgctgcggaagcaaagggatggcaatggccaatctgggagcttacatggctctcgggtggaactcttctcgttcttattttcttcttgccggaaacaagccctacaaatattttgtaccgaagatcgcgacgactccgcaagctcacaggcaacgagaagcttatatcagaaccggagcttgtgggaaaggacatgaccccgaaagacatcgcaatgatgacacttgttcgacccttcagtctaatgtttactgagccgattgtattgctactcgacttatatctcgcgctcgtgtacggattactctatatctggtttgagagttttcccattgtttttattgagatatacggcttttctctcgggactgaaggtctcgccttcttggggatcttgatagcagtcttcattgtgttaccacccttttgttggtatttccacaagtacgtcgagccgaagtttaacgagaacggagagctgaaaccagaatggcgtttaccaccagcttttgttggcgcattcgccattcccatctgtcttttctggtttggatggtctagtcgctcggacatccactggattgtccccattatagggacgggttggttcagtatcggtgccttcctgctcttcaattgcgttatgaattacctttccgacgcttacccggactatgtggcaagcatattggcgggtaatgactttttaagaagtggagttggcgcaggattcgtaagtcttaccaagggacgtcttattgcatttgtcatactaaccgggactgtacagcctctatttgcatctgctatgtacaagaatctcggcgtgaattgggcaagttcaacactcgcctttatctcagttgcattcattcctatcccgtttgtgttgttcaagtacggggaatggctgagacataagagtaagcatgctagacacgacctatga

SEQ ID NO: 8623 - protein, 611 aa, Muscodor strobelii
  misc_feature: SGI Peptide ID NO. 562662
  misc_feature (153)..(542): Pfam Id: PF07690 Pfam Desc: Major Facilitator Superfamily
  misc_feature (1)..(543): NCBI GI: 46111967 Blast Desc: FG02865.1 [Gibberella zeae PH-1]
  misc_feature (1)..(611): NCBI GI: 189189440 Blast Desc: benomyl/methotrexate resistance protein [Pyrenophora tritici-repentis Pt-1C-BFP] gi|187972665|gb|EDU40164.1| benomyl/methotrexate resistance protein [Pyrenophora Pt-1C-BFP]
  misc_feature (1)..(611): NCBI GI: 145254457 Blast Desc: An18g01720 [Aspergillus niger] gi|134084211|emb|CAK47244.1| protein product [Aspergillus niger]
  misc_feature (3)..(611): NCBI GI: 169608253 Blast Desc: SNOG_07194 [Phaeosphaeria nodorum SN15] gi|111064725|gb|EAT85845.1| SNOG_07194 [Phaeosphaeria nodorum SN15]
  misc_feature (1)..(611): NCBI GI: 156062062 Blast Desc: SS1G_01145 [Sclerotinia sclerotiorum 1980] gi|154696483|gb|EDN96221.1| SS1G_01145 [Sclerotinia sclerotiorum 1980]
  misc_feature (1)..(611): NCBI GI: 154292086 Blast Desc: BC1G_14852 [Botryotinia fuckeliana B05.10] gi|150846279|gb|EDN21472.1| BC1G_14852 [Botryotinia fuckeliana B05.10]
  misc_feature (3)..(611): NCBI GI: 169767646 Blast Desc: [Aspergillus oryzae RIB40] gi|83766149|dbj|BAE56292.1| protein product [Aspergillus oryzae]
  misc_feature (3)..(611): NCBI GI: 238484555 Blast Desc: caffeine resistance protein, [Aspergillus flavus NRRL3357] gi|220701566|gb|EED57904.1| caffeine resistance protein, [Aspergillus flavus NRRL3357]
  misc_feature (3)..(587): NCBI GI: 145252122 Blast Desc: An16g02610 [Aspergillus niger] gi|134083118|emb|CAK46791.1| protein product [Aspergillus niger]
  misc_feature (6)..(607): NCBI GI: 71013596 Blast Desc: UM02490.1 [Ustilago maydis 521] gi|46098295|gb|EAK83528.1| UM02490.1 [Ustilago maydis 521]
MPELIRDSFFGHSVRILVNTFLSSEIMTTGGRFFKYPEEIDSSIWKRYVDSEKSANIAHHGHTGEPSPTSSQERIVDEDSNNSTNSGSNGSSERDRPSAARVDTHVVVHGHPSRKVDPEKGKDFYIVDWYGPDDPENPQNWSTPKKLFVTFEICFLTFSVYIGSAIYTAGLQSVVKTFKVSQVAATLGLTLFVIGYGIGPMVWSPLSEIPQIGRNTVYILTLALFVALQVPTALAVNFGMLLAFRFLTGFVGSPSLATGGASIGDMYSPAKRTYGLAVWGIGAVCGPTLGPLVGGFAAEAKGWQWPIWELTWLSGGTLLVLIFFLPETSPTNILYRRSRRLRKLTGNEKLISEPELVGKDMTPKDIAMMTLVRPFSLMFTEPIVLLLDLYLALVYGLLYIWFESFPIVFIEIYGFSLGTEGLAFLGILIAVFIVLPPFCWYFHKYVEPKFNENGELKPEWRLPPAFVGAFAIPICLFWFGWSSRSDIHWIVPIIGTGWFSIGAFLLFNCVMNYLSDAYPDYVASILAGNDFLRSGVGAGFVSLTKGRLIAFVILTGTVQPLFASAMYKNLGVNWASSTLAFISVAFIPIPFVLFKYGEWLRHKSKHARHDL

SEQ ID NO: 8624 - DNA, 1170 bp, Muscodor strobelii
  misc_feature: SGI cDNA ID NO. 562663
  misc_feature: Encodes the peptide sequence at SEQ ID NO 8625
atgccgaatcctaaaatcagctccattcttcaagatatccggaccaagggcaaggaattcgagacgcaagcaggagagaacagtcaacgtcagctcctgaatgctgcacgagctcttgttgatgcccttgagtccccagccgagagagtgatgcgaatgactaccacgagcattactagagtctgtattgacttggatttgttcaacgtattattgtctgataatggctctccaaaatctacaaaattcctctctcagacttgtggtgcggaccagaaacttttagagcgattgctgaagcatctggcaacttccagcgtgatcgatgaaatcgacatagacacttttggccctaccccgaccagtgcaatacttgccacaccggaatgttctggcgcggtaatggatatgtacgatgcaggtgcagatcatcatagtcacttacctgccttcctcaaggcgaataagtatcaaaatccaaccgacaggaccaagttaagcctgtggcgttatgcaactggttgtgaacttccatacattggctggctcaatttgcctgagaattcagcacgcagaaatgcttttgagcggcacatgggattcaagactataagcaaaaagtggtacgaggcagttcccattgatgagatccttggcaaagaggttgaaggcgatgcactgttggttgacattggcggcaataccggttacgatctccaaggcttccacaaagcacaccctaatcgaccaggaaagttggttctccaggacactcccagcattgtcgaagcagtgaaattgcaaccaccatttgaggtgatggctcatgacatgttcacgccccaaccagtgaatggtgccaatgcctactatatgaagatggtcctacacgactggggtgacgacgattgccagcgcatactaagtaacataaagccagccatgaaacagggcttcagcaaagttcttatcaacgagatggttattccgcaaaagaacgcagagtggtttgctactggagtggacattatcatgctcaatacacactcgtcttacgaaaggacagagagagattggaatagattggctgagaatgcaggactcaaagttaaacagatctgggattgtgatggagcaatggagaagctgattgagatggtcctcccgtga

SEQ ID NO: 8625 - protein, 389 aa, Muscodor strobelii
  misc_feature: SGI Peptide ID NO. 562663
  misc_feature (110)..(364): Pfam Id: PF00891 Pfam Desc: O-methyltransferase
  misc_feature (228)..(364): Pfam Id: PF00891 Pfam Desc: O-methyltransferase
  misc_feature (17)..(388): NCBI GI: 145235619 Blast Desc: An03g05790 [Aspergillus niger] gi|134058145|emb|CAK38339.1| protein product [Aspergillus niger]
  misc_feature (6)..(388): NCBI GI: 255933237 Blast Desc: Pc12g12810 [Penicillium chrysogenum Wisconsin 54-1255] gi|211582708|emb|CAP80908.1| Pc12g12810 [Penicillium chrysogenum Wisconsin 54-1255]
  misc_feature (5)..(388): NCBI GI: 121709769 Blast Desc: o-methyltransferase [Aspergillus clavatus NRRL 1] gi|119400664|gb|EAW11089.1| o-methyltransferase [Aspergillus clavatus NRRL 1]
  misc_feature (5)..(388): NCBI GI: 242783242 Blast Desc: O-methyltransferase, [Talaromyces stipitatus ATCC 10500] gi|218720295|gb|EED19714.1| O-methyltransferase, [Talaromyces stipitatus ATCC 10500]
  misc_feature (9)..(388): NCBI GI: 169770447 Blast Desc: [Aspergillus oryzae RIB40] gi|83767552|dbj|BAE57691.1| protein product [Aspergillus oryzae]
  misc_feature (5)..(388): NCBI GI: 115387201 Blast Desc: conserved [Aspergillus terreus NIH2624] gi|114195190|gb|EAU36890.1| conserved [Aspergillus terreus NIH2624]
  misc_feature (5)..(388): NCBI GI: 67541563 Blast Desc: AN6945.2 [Aspergillus nidulans FGSC A4] gi|40738510|gb|EAA57700.1| AN6945.2 [Aspergillus nidulans FGSC A4] gi|259480556|tpe|CBF71797.1| TPA: O-methyltransferase, FGSC
  misc_feature (32)..(388): NCBI GI: 255943319 Blast Desc: Pc18g06010 [Penicillium chrysogenum Wisconsin 54-1255] gi|211587161|emb|CAP94825.1| Pc18g06010 [Penicillium chrysogenum Wisconsin 54-1255]
  misc_feature (3)..(385): NCBI GI: 242797694 Blast Desc: O-methyltransferase [Talaromyces stipitatus ATCC 10500] gi|218716359|gb|EED15780.1| O-methyltransferase [Talaromyces stipitatus ATCC 10500]
  misc_feature (5)..(388): NCBI GI: 255931801 Blast Desc: Pc12g06140 [Penicillium chrysogenum Wisconsin 54-1255] gi|211582076|emb|CAP80241.1| Pc12g06140 [Penicillium chrysogenum Wisconsin 54-1255]
  misc_feature (71)..(374): SWISSPROT Homolog: EC 2.1.1.110 Sterigmatocystin 8-O-methyltransferase
MPNPKISSILQDIRTKGKEFETQAGENSQRQLLNAARALVDALESPAERVMRMTTTSITRVCIDLDLFNVLLSDNGSPKSTKFLSQTCGADQKLLERLLKHLATSSVIDEIDIDTFGPTPTSAILATPECSGAVMDMYDAGADHHSHLPAFLKANKYQNPTDRTKLSLWRYATGCELPYIGWLNLPENSARRNAFERHMGFKTISKKWYEAVPIDEILGKEVEGDALLVDIGGNTGYDLQGFHKAHPNRPGKLVLQDTPSIVEAVKLQPPFEVMAHDMFTPQPVNGANAYYMKMVLHDWGDDDCQRILSNIKPAMKQGFSKVLINEMVIPQKNAEWFATGVDIIMLNTHSSYERTERDWNRLAENAGLKVKQIWDCDGAMEKLIEMVLP

SEQ ID NO: 8626 - DNA, 1131 bp, Muscodor strobelii
  misc_feature: SGI EST ID NO. CUFF.20859.0
  misc_feature: Variant of the nucleotide sequence at SEQ ID NO 8624
ccaaaatctacaaaattcctctctcagacttgtggtgcggaccagaaacttttagagcgattgctgaagcatctggcaacttccagcgtgatcgatgaaatcgacatagacacttttggccctaccccgaccagtgcaatacttgccacaccggaatgttctggcgcggtaatggatatgtacgatgcaggtgcagatcatcatagtcacttacctgccttcctcaaggcgaataagtatcaaaatccaaccgacaggaccaagttaagcctgtggcgttatgcaactggttgtgaacttccatacattggctggctcaatttgcctgagaattcagcacgcagaaatgcttttgagcggcacatgggattcaagactataagcaaaaagtggtacgaggcagttcccattgatgagatccttggcaaagaggttgaaggcgatgcactgttggttgacattggcggcaataccggttacgatctccaaggcttccacaaagcacaccctaatcgaccaggaaagttggttctccaggacactcccagcattgtcgaagcagtgaaattgcaaccaccatttgaggtgatggctcatgacatgttcacgccccaaccagtgaatggtgccaatgcctactatatgaagatggtcctacacgactggggtgacgacgattgccagcgcatactaagtaacataaagccagccatgaaacagggcttcagcaaagttcttatcaacgagatggttattccgcaaaagaacgcagagtggtttgctactggagtggacattatcatgctcaatacacactcgtcttacgaaaggacagagagagattggaatagattggctgagaatgcaggactcaaagttaaacagatctgggattgtgatggagcaatggagaagctgattgagatggtcctcccgtgaagctgtttccctttagtgggaaggtagtcacagtgaaatttttgccagaagacagcagtgacccagggtcgccctatgtgctatagtttgagagatttacatctaaaatatgctctgtctatttgaaggtcaagacgttgatggctttgcctttgtattatcccacttgatgagatatctcaggagttttcg

SEQ ID NO: 8627 - DNA, 1521 bp, Muscodor strobelii
  misc_feature: SGI cDNA ID NO. 562664
  misc_feature: Encodes the peptide sequence at SEQ ID NO 8628
atgtctataaaattcatgaccgctgcgattatcgctgttggatggctcgttcatattctgtcgaaatggtactttcacccgctgcggtctatcccgggcccctttatcaataccatatcagagttccctgctgcaatcaatttgctcagaggcgaccaacatacatactacaagtcccttcatgataaatatggctcagtagtgagagtgtccccgaatgaggtcagctttatcagtgctgacgcccgagaagaaatttatgggtttcgcaaaaatggtttaatggagaagagtgccatattcctcggtgctgtcggagctgtaggcggggagacgggagtcagtcttgctctgaatgctgagcacactcgacaacgaaaggcactcggctatttattcacgaattcggctcttttgcaacttgaaggtctattccaagcacactttcgaaagcttattagtgtcctcacgtctgcggcgaccaatgatgaagcaatcgacgtctcgagctggtatacgtacctctcttttgatctaatgggcgatttgtgcttcgcagagccctttgggtgcctggacgaagcatctgcaacggaatggtccacgtccgtcatcaacgttttcgtagccgcaacgtggacacaggcgatacgacgaatctttggcgtaggaacatggcttgaatctataatgacaaagctattggtgccttctggggctgctgaatggagaaacatacacctaaacaattcccgcgagaaaacgacccgtcgccttgcagatcacaatagagatcatcccgattttgtgtatcatatcctcaacaacgaatccaagaagtcgttgtccaggacggaaatcatgctcaatctggcgttatttattagcgccggtacagatactacggccacggccttaacgggttggacttattttgtttgtactcaccgtgaagtacacgaacgtctgatgagcgaagtccgaggtgctttgggctcgagagatgagatcaactgggaaaatgtcaagaatctccgctacctcgaagcaacaatacacgaaaccttgcgcttatttccgccatcacctgcgagccaacaacgtgttgtacctccggggggcgctacaatagacggctattacgtaccagcgggcacaactgtcgcagtagccccttgggtttcgacacactcatccttgaattttcataaaccggattgcttcatccccgagcgttggcttggagaggatcagagattctccggtgatcatcttaatgcctctgtaccctttggcaatggtcccagggtgtgtattgggagaaatttggcgtaccttgagatgcgccttatcgcggctcacataatctggaacttcgacttacagctcgacagaggtgtatacgagacaaagaatggcgtttggggacttgacggtagcttaagaacgatgaagatatttcattctatgacgaaaccagagctgtgggttcggttcagtcagattagagatatatcatga

SEQ ID NO: 8628 - protein, 506 aa, Muscodor strobelii
  misc_feature: SGI Peptide ID NO. 562664
  misc_feature (32)..(490): Pfam Id: PF00067 Pfam Desc: Cytochrome P450
  misc_feature (259)..(467): Pfam Id: PF00067 Pfam Desc: Cytochrome P450
  misc_feature (26)..(504): NCBI GI: 39972583 Blast Desc: MGG_07593 [Magnaporthe grisea 70-15] gi|145016796|gb|EDK01226.1| MGG_07593 [Magnaporthe grisea 70-15]
  misc_feature (2)..(502): NCBI GI: 57337317 Blast Desc: cytochrome P450 monoxygenase [Botryotinia fuckeliana]
  misc_feature (67)..(502): NCBI GI: 154309272 Blast Desc: BC1G_07530 [Botryotinia fuckeliana B05.10] gi|150852354|gb|EDN27546.1| BC1G_07530 [Botryotinia fuckeliana B05.10]
  misc_feature (24)..(501): NCBI GI: 189212320 Blast Desc: pisatin demethylase [Pyrenophora tritici-repentis Pt-1C-BFP] gi|187980717|gb|EDU47343.1| pisatin demethylase [Pyrenophora tritici-repentis Pt-1C-BFP]
  misc_feature (142)..(503): NCBI GI: 145604893 Blast Desc: MGG_07982 [Magnaporthe grisea 70-15] gi|145012800|gb|EDJ97454.1| MGG_07982 [Magnaporthe grisea 70-15]
  misc_feature (89)..(449): NCBI GI: 169599493 Blast Desc: SNOG_02565 [Phaeosphaeria nodorum SN15] gi|111068176|gb|EAT89296.1| SNOG_02565 [Phaeosphaeria nodorum SN15]
  misc_feature (25)..(503): NCBI GI: 189199302 Blast Desc: pisatin demethylase [Pyrenophora tritici-repentis Pt-1C-BFP] gi|187983087|gb|EDU48575.1| pisatin demethylase [Pyrenophora tritici-repentis Pt-1C-BFP]
  misc_feature (24)..(472): NCBI GI: 121716300 Blast Desc: benzoate 4-monooxygenase cytochrome P450 [Aspergillus clavatus NRRL 1] gi|119403916|gb|EAW14333.1| benzoate 4-monooxygenase cytochrome P450 [Aspergillus clavatus NRRL 1]
  misc_feature (1)..(463): NCBI GI: 119481647 Blast Desc: benzoate 4-monooxygenase cytochrome P450 [Neosartorya fischeri NRRL 181] gi|119409006|gb|EAW18955.1| benzoate 4-monooxygenase cytochrome P450 [Neosartorya fischeri NRRL 181]
  misc_feature (5)..(463): NCBI GI: 121707561 Blast Desc: toxin biosynthesis cytochrome P450 monooxygenase, [Aspergillus clavatus NRRL 1] gi|119400022|gb|EAW10448.1| toxin biosynthesis cytochrome P450 monooxygenase, [Aspergillus clavatus
  misc_feature (113)..(462): SWISSPROT Homolog: EC 1.14.14.1 Unspecific monooxygenase
MSIKFMTAAIIAVGWLVHILSKWYFHPLRSIPGPFINTISEFPAAINLLRGDQHTYYKSLHDKYGSVVRVSPNEVSFISADAREEIYGFRKNGLMEKSAIFLGAVGAVGGETGVSLALNAEHTRQRKALGYLFTNSALLQLEGLFQAHFRKLISVLTSAATNDEAIDVSSWYTYLSFDLMGDLCFAEPFGCLDEASATEWSTSVINVFVAATWTQAIRRIFGVGTWLESIMTKLLVPSGAAEWRNIHLNNSREKTTRRLADHNRDHPDFVYHILNNESKKSLSRTEIMLNLALFISAGTDTTATALTGWTYFVCTHREVHERLMSEVRGALGSRDEINWENVKNLRYLEATIHETLRLFPPSPASQQRVVPPGGATIDGYYVPAGTTVAVAPWVSTHSSLNFHKPDCFIPERWLGEDQRFSGDHLNASVPFGNGPRVCIGRNLAYLEMRLIAAHIIWNFDLQLDRGVYETKNGVWGLDGSLRTMKIFHSMTKPELWVRFSQIRDIS

SEQ ID NO: 8629 - DNA, 1835 bp, Muscodor strobelii
  misc_feature: SGI EST ID NO. CUFF.20889.1
  misc_feature: Variant of the nucleotide sequence at SEQ ID NO 8627
gccattcggagcaggtgcaatgtttcagctcaactagagagcgaagatccatcccactggagcaataccggtatttcattatcgttcttaaacccgattaactctataaaagctatgtctataaaattcatgaccgctgcgattatcgctgttggatggctcgttcatattctgtcgaaatggtactttcacccgctgcggtctatcccgggcccctttatcaataccatatcagagttccctgctgcaatcaatttgctcagaggcgaccaacatacatactacaagtcccttcatgataaatatggctcagtagtgagagtgtccccgaatgaggtcagctttatcagtgctgacgcccgagaagaaatttatgggtttcgcaaaaatggtttaatggagaagagtgccatattcctcggtgctgtcggagctgtaggcggggagacgggagtcagtcttgctctgaatgctgagcacactcgacaacgaaaggcactcggctatttattcacgaattcggctcttttgcaacttgaaggtctattccaagcacactttcgaaagcttattagtgtcctcacgtctgcggcgaccaatgatgaagcaatcgacgtctcgagctggtatacgtacctctcttttgatctaatgggcgatttgtgcttcgcagagccctttgggtgcctggacgaagcatctgcaacggaatggtccacgtccgtcatcaacgttttcgtagccgcaacgtggacacaggcgatacgacgaatctttggcgtaggaacatggcttgaatctataatgacaaagctattggtgccttctggggctgctgaatggagaaacatacacctaaacaattcccgcgagaaaacgacccgtcgccttgcagatcacaatagagatcatcccgattttgtgtatcatatcctcaacaacgaatccaagaagtcgttgtccaggacggaaatcatgctcaatctggcgttatttattagcgccggtacagatactacggccacggccttaacgggttggacttattttgtttgtactcaccgtgaagtacacgaacgtctgatgagcgaagtccgaggtgctttgggctcgagagatgagatcaactgggaaaatgtcaagaatctccgctacctcgaagcaacaatacacgaaaccttgcgcttatttccgccatcacctgcgagccaacaacgtgttgtacctccggggggcgctacaatagacggctattacgtaccagcgggcacaactgtcgcagtagccccttgggtttcgacacactcatccttgaattttcataaaccggattgcttcatccccgagcgttggcttggagaggatcagagattctccggtgatcatcttaatgcctctgtaccctttggcaatggtcccagggtgtgtattgggagaaatttggcgtaccttgagatgcgccttatcgcggctcacataatctggaacttcgacttacagctcgacagaggtgtatacgagacaaagaatggcgtttggggacttgacggtagcttaagaacgatgaagatatttcattctatgacgaaaccagagctgtgggttcggttcagtcagattagagatatatcatgatttggtgatgggaagtctgaaaacaaatatgttaaagtctgtggtcatggcttgctagtgaagtctctgaaattcaagcgataagtaagaaaagtactatgaaaaaagggagggcaggcactattcagaggggctggactggctcttcttgatttaattaggtacatatactatatcatgcctttcaagttagtaactcg

SEQ ID NO: 8630 - DNA, 783 bp, Muscodor strobelii
  misc_feature: SGI cDNA ID NO. 562665
  misc_feature: Encodes the peptide sequence at SEQ ID NO 8631
atggtcgacaccgaagaactcgcaagaggttatactctcgtcaacaatacacagcaaaacacgggattgtatcttctcgagaaactatgtgttcagccagggatgcgagtgctcgacatcggatgtgggccgggcaacctcacatttcacatagcagatattgttggacctgaagggagtgttgtcggcgtcgacccaagtaaggagcgcattaccattgcgcggcaggaaatcaagaaaccaaatacgacattcagcgaaggacgagctgaggatctatcaatgttttctgcacaaagttttgatatcattttctgcaattcaacattccattgggtccaggatcagtctacagcactaaaagaatttgcccgtgtcctcaaagtcggaggacgacttggcatgtctggtggatctggcgattttactgccatacatgaaaggattaaagaagaagttctatcgcaggagcccttcaaaggatattcggaagaggcacctccgacatttctcaagcagcgtgagctagagtgtctgcttgatgatgccggtcttgacgagaggaacatctcggtgagaacgatcgtgaagtctgccaaaaatggcgacgagatgatcgattggctggtcaccagttccagtggaagtacatacggcggaatacccctcgatcttcggcctcgcgcaagggaggagatgaggaaggagtgggacaaggtcacgacggagaatggaattcatatgaacatggagttgctggtcactgtcgctgtcaaggcctag

SEQ ID NO: 8631 - protein, 260 aa, Muscodor strobelii
  misc_feature: SGI Peptide ID NO. 562665
  misc_feature (38)..(135): Pfam Id: PF08241 Pfam Desc: Methyltransferase domain
  misc_feature (38)..(133): Pfam Id: PF08242 Pfam Desc: Methyltransferase domain
  misc_feature (11)..(197): Pfam Id: PF01209 Pfam Desc: ubiE/COQ5 methyltransferase family
  misc_feature (25)..(43): Pfam Id: PF02353 Pfam Desc: Cyclopropane-fatty-acyl-phospholipid synthase
  misc_feature (32)..(80): Pfam Id: PF01135 Pfam Desc: Protein-L-isoaspartate(D-aspartate) O-methyltransferase (PCMT)
  misc_feature (30)..(65): Pfam Id: PF01209 Pfam Desc: ubiE/COQ5 methyltransferase family
  misc_feature (1)..(259): NCBI GI: 39972585 Blast Desc: MGG_07594 [Magnaporthe grisea 70-15] gi|145016797|gb|EDK01227.1| MGG_07594 [Magnaporthe grisea 70-15]
  misc_feature (3)..(260): NCBI GI: 145609305 Blast Desc: MGG_13406 [Magnaporthe grisea 70-15] gi|145016692|gb|EDK01122.1| MGG_13406 [Magnaporthe grisea 70-15]
  misc_feature (3)..(260): NCBI GI: 39969513 Blast Desc: MGG_10367 [Magnaporthe grisea 70-15] gi|145015154|gb|EDJ99722.1| MGG_10367 [Magnaporthe grisea 70-15]
  misc_feature (1)..(260): NCBI GI: 154319247 Blast Desc: BC1G_02575 [Botryotinia fuckeliana B05.10] gi|150857006|gb|EDN32198.1| BC1G_02575 [Botryotinia fuckeliana B05.10]
  misc_feature (2)..(259): NCBI GI: 148265901 Blast Desc: methyltransferase type 11 [Geobacter uraniireducens Rf4] gi|146399401|gb|ABQ28034.1| Methyltransferase type 11 [Geobacter uraniireducens Rf4]
  misc_feature (2)..(258): NCBI GI: 115388978 Blast Desc: [Aspergillus terreus NIH2624] gi|114194390|gb|EAU36090.1| [Aspergillus terreus NIH2624]
  misc_feature (3)..(259): NCBI GI: 147920658 Blast Desc: ubiquinone/menaquinone biosynthesis methyltransferase [uncultured methanogenic archaeon RC-I] gi|110620937|emb|CAJ36215.1| ubiquinone/menaquinone biosynthesis
  misc_feature (3)..(259): NCBI GI: 282163572 Blast Desc: methyltransferase [Methanocella paludicola SANAE] gi|282155886|dbj|BAI60974.1| methyltransferase [Methanocella paludicola SANAE]
  misc_feature (2)..(260): NCBI GI: 162453901 Blast Desc: ubiquinone/menaquinone biosynthesis methyltransferase [Sorangium cellulosum 'So ce 56'] gi|161164483|emb|CAN95788.1| Ubiquinone/menaquinone biosynthesis methyltransferase [Sorangium
  misc_feature (1)..(259): NCBI GI: 162451316 Blast Desc: trans-aconitate 2-methyltransferase [Sorangium cellulosum 'So ce 56'] gi|161161898|emb|CAN93203.1| Trans-aconitate 2-methyltransferase [Sorangium cellulosum 'So ce
  misc_feature (5)..(128): SWISSPROT Homolog: EC 2.1.1.137 Arsenite methyltransferase
MVDTEELARGYTLVNNTQQNTGLYLLEKLCVQPGMRVLDIGCGPGNLTFHIADIVGPEGSVVGVDPSKERITIARQEIKKPNTTFSEGRAEDLSMFSAQSFDIIFCNSTFHWVQDQSTALKEFARVLKVGGRLGMSGGSGDFTAIHERIKEEVLSQEPFKGYSEEAPPTFLKQRELECLLDDAGLDERNISVRTIVKSAKNGDEMIDWLVTSSSGSTYGGIPLDLRPRAREEMRKEWDKVTTENGIHMNMELLVTVAVKA

SEQ ID NO: 8632 - DNA, 1131 bp, Muscodor strobelii
  misc_feature: SGI EST ID NO. CUFF.20892.0
  misc_feature: Variant of the nucleotide sequence at SEQ ID NO 8630
caaaattgagccctcatgacaaagcaacctaatccgtgtaccgcctatcaggagcattgtcaaatgagattttcttttcgtcgttcgcaactaacggccaaattcttattttcaccatggtcgacaccgaagaactcgcaagaggttatactctcgtcaacaatacacagcaaaacacgggattgtatcttctcgagaaactatgtgttcagccagggatgcgagtgctcgacatcggatgtgggccgggcaacctcacatttcacatagcagatattgttggacctgaagggagtgttgtcggcgtcgacccaagtaaggagcgcattaccattgcgcggcaggaaatcaagaaaccaaatacgacattcagcgaaggacgagctgaggatctatcaatgttttctgcacaaagttttgatatcattttctgcaattcaacattccattgggtccaggatcagtctacagcactaaaagaatttgcccgtgtcctcaaagtcggaggacgacttggcatgtctggtggatctggcgattttactgccatacatgaaaggattaaagaagaagttctatcgcaggagcccttcaaaggatattcggaagaggcacctccgacatttctcaagcagcgtgagctagagtgtctgcttgatgatgccggtcttgacgagaggaacatctcggtgagaacgatcgtgaagtctgccaaaaatggcgacgagatgatcgattggctggtcaccagttccagtggaagtacatacggcggaatacccctcgatcttcggcctcgcgcaagggaggagatgaggaaggagtgggacaaggtcacgacggagaatggaattcatatgaacatggagttgctggtcactgtcgctgtcaaggcctagaagtccgaatctccgaccatactcatgtggttgtagaagcagtctttaattactaggcggctattgtaccggtgggcataattgagtttgttgcgtctatgatgctgccgcatgttacccgcacatgattagcctcatgatagactcttgccgtcaaagcgtcgcagcttctacatagttctcgtagatcttagtttgatggaacccatagattcaagactgccaagagaat

SEQ ID NO: 8633 - DNA, 1032 bp, Muscodor strobelii
  misc_feature: SGI cDNA ID NO. 562666
  misc_feature: Encodes the peptide sequence at SEQ ID NO 8634
atgctagcaccagcagtaccgcttgtgatgaatgacttcaacacagattcatctacttttgcaacattggtggtttctattttcgtgcttggcttcgcctttgggcccttgttgcttgcaccacttagtgaactctatggtcgagtaatcatctacaacataaccaacgtgttattcttgaccttcactattctatgcgctgtttcccgaagcccagcgatgctattagcctttcgtttcttgtcaggctttgcaggcgtggcgacgattacaattgggtcaggaacgatcgctgatacgatgccacgtgagacacgtggtaaggctgtatctatttggtctgtggggacaatccttggtccaataacaggacctataatcggtggttatgttgcagatatcgctggctggaggtggatcttctgggttatctcgattgccatcggtgttgtcacacttatagcgtttgctatccttcgagagagtaacccggtcgtattgctagaaagaaaggccgatcgcttgcggcgagatactggcaatctatcttatcgttctgcactggcatcgaacatcacttcaaaagagctgttcaaacaaagtatcatccgaccacttaagatcctcattacatatcctatagttaccgttatgtgcacctatgttgctatcatttacgaacgcttcgaaaacgagcagctcgcggaaagatcatcggtccagaagatagactacccttccgaattgtctatacctggtgccctcaccttcccaattggcttatttgtctatgggtggagcattgagaaacacgtccactggattgtgtcccagatcggaactgctatatttgggttcagttctattctaatcttcctaagcatccagacttacttggtcgatgcgtttgaatcgcatgctgcaagtgtcattggcgccaatgcggtgttgaggggtcttgccggcgctctcgtaagtgctgctcgttttgatcaaaagctcaggcgatggccacgaatcttgagaacttga

SEQ ID NO: 8634 - protein, 343 aa, Muscodor strobelii
  misc_feature: SGI Peptide ID NO. 562666
  misc_feature (1)..(326): Pfam Id: PF07690 Pfam Desc: Major Facilitator Superfamily
  misc_feature (1)..(226): Pfam Id: PF07690 Pfam Desc: Major Facilitator Superfamily
  misc_feature (22)..(162): Pfam Id: PF00083 Pfam Desc: Sugar (and other) transporter
  misc_feature (1)..(325): NCBI GI: 39972587 Blast Desc: MGG_07595 [Magnaporthe grisea 70-15] gi|145016799|gb|EDK01229.1| MGG_07595 [Magnaporthe grisea 70-15]
  misc_feature (1)..(325): NCBI GI: 39969505 Blast Desc: MGG_10363 [Magnaporthe grisea 70-15] gi|145015157|gb|EDJ99725.1| MGG_10363 [Magnaporthe grisea 70-15]
  misc_feature (1)..(325): NCBI GI: 256721165 Blast Desc: NECHADRAFT_98255 [Nectria haematococca mpVI 77-13-4]
  misc_feature (1)..(328): NCBI GI: 46111993 Blast Desc: FG02869.1 [Gibberella zeae PH-1]
  misc_feature (1)..(325): NCBI GI: 238838068 Blast Desc: polyamine transporter 4 [Microsporum canis CBS 113480]
  misc_feature (1)..(318): NCBI GI: 85097950 Blast Desc: NCU05580 [Neurospora crassa OR74A] gi|28922035|gb|EAA31306.1| conserved [Neurospora crassa OR74A]
  misc_feature (2)..(325): NCBI GI: 169601800 Blast Desc: SNOG_03776 [Phaeosphaeria nodorum SN15] gi|160706012|gb|EAT88981.2| SNOG_03776 [Phaeosphaeria nodorum SN15]
  misc_feature (1)..(332): NCBI GI: 116201743 Blast Desc: CHGG_08756 [Chaetomium globosum CBS 148.51] gi|88177274|gb|EAQ84742.1| CHGG_08756 [Chaetomium globosum CBS 148.51]
  misc_feature (1)..(331): NCBI GI: 171678072 Blast Desc: protein product [Podospora anserina] gi|170937105|emb|CAP61763.1| protein product [Podospora anserina]
  misc_feature (1)..(328): NCBI GI: 46116950 Blast Desc: FG04317.1 [Gibberella zeae PH-1]
MLAPAVPLVMNDFNTDSSTFATLVVSIFVLGFAFGPLLLAPLSELYGRVIIYNITNVLFLTFTILCAVSRSPAMLLAFRFLSGFAGVATITIGSGTIADTMPRETRGKAVSIWSVGTILGPITGPIIGGYVADIAGWRWIFWVISIAIGVVTLIAFAILRESNPVVLLERKADRLRRDTGNLSYRSALASNITSKELFKQSIIRPLKILITYPIVTVMCTYVAIIYERFENEQLAERSSVQKIDYPSELSIPGALTFPIGLFVYGWSIEKHVHWIVSQIGTAIFGFSSILIFLSIQTYLVDAFESHAASVIGANAVLRGLAGALVSAARFDQKLRRWPRILRT

SEQ ID NO: 8635 - DNA, 1483 bp, Muscodor strobelii
  misc_feature: SGI EST ID NO. CUFF.20895.0
  misc_feature: Variant of the nucleotide sequence at SEQ ID NO 8633
ttccgcgttaaggtccttacgtcacacatcgactgatctatgagcttacttcctacgattgtttgcatacactctctgactcgctgagggttttgcggcacattcactctccagttacttagagctggaatttttcgtgacggatcgtgaatgtgcaacatgcctaatgctagcaccagatggccacgaactcaggaccattctccccgaaatcatcaatcttgcatcctcttctcgctgtatcgaccatgagacgttcattcttgccatgatctgatcacaacagaagagagtatgagtcgtgagagtatcgagtccccttctgaggggctggaaacagagctgaagatgccaactagggacgaggatgagatcgtgtcttcttctattgtatcgtgggactcggatcaagatccaaacaatccaagaaattggtcgtcgacaaagaaatgggcaaacattattatcatatctataattagctttctcgtgcccctagtatcagccatgctagcaccagcagtaccgcttgtgatgaatgacttcaacacagattcatctacttttgcaacattggtggtttctattttcgtgcttggcttcgcctttgggcccttgttgcttgcaccacttagtgaactctatggtcgagtaatcatctacaacataaccaacgtgttattcttgaccttcactattctatgcgctgtttcccgaagcccagcgatgctattagcctttcgtttcttgtcaggctttgcaggcgtggcgacgattacaattgggtcaggaacgatcgctgatacgatgccacgtgagacacgtggtaaggctgtatctatttggtctgtggggacaatccttggtccaataacaggacctataatcggtggttatgttgcagatatcgctggctggaggtggatcttctgggttatctcgattgccatcggtgttgtcacacttatagcgtttgctatccttcgagagagtaacccggtcgtattgctagaaagaaaggccgatcgcttgcggcgagatactggcaatctatcttatcgttctgcactggcatcgaacatcacttcaaaagagctgttcaaacaaagtatcatccgaccacttaagatcctcattacatatcctatagttaccgttatgtgcacctatgttgctatcatttacggtatgctctatctgctcttcgcaacttactcttttgtctacgaacaggtgtatggattctcaacttccgatgctggtcttgtgtttattgctggaggattaggtacccttttgggacttttttacgttggaaaactgagcgatagaacgcttcgaaaacgagcagctcgcggaaagatcatcggtccagaagatagactacccttccgaattggtacgtgtagaaagaccccacgcgaattactttttgattgtattcctaagacatgatactaacatctttgcagtacgtaatcta

SEQ ID NO: 8636 - DNA, 1092 bp, Muscodor strobelii
  misc_feature: SGI cDNA ID NO. 562667
  misc_feature: Encodes the peptide sequence at SEQ ID NO 8637
atgcatgatagtctgtcagtcataggggcaggccctgccggctttgcgctcgccgcggacctgcagagtcaagggaagagtgtcttggtgtactcgcatcctgcgcatctccatcacgccaacgctgtgagggacaaaggtttcctgacgatcaatggcgcgatcgaaagctttatgaaactacatatcacatctgacatgggcgaagctgtctcattttctaagattatcatacttaccgttccgtctacgggccaggaaaccgtactgcaggaactaaagaaatttgatttgcgtcagcacacgatcatcgccatccccgggaacctgttttcactcattgctagtgccgagatacaagcagaaagcttcctcgaaaccaatctctcaccatattcatgtcggatggacgggggaagcttagtagtgatgggcacgaagagccgaatcttaattgcgtcgttacacacgccattgactcgatcattttgtcaaagcatacagagtatcttcccaatggagctcaaatggtgcagcagcgtcattgaagtctgtttatcaaatatcaacggagtgtttcatccgctcatgatgttgatgaatgctggacggattgaaagcacaggcggagatttcttcctctatcgagacggtcttactcgatcagttgccaacgctatgatagccgtcgatgaagtacgaatgaagactggtgctgcatttgggctacggctcaaaagtgctttggacgtgtccaacgagtgctacaatcacgactttaaggacttagtagaactggctcgaaattcacaaccccacagaagattgaaggcgccatccaatatcgagaaccgaaatgtttctgaagacgttccagatttacttgtttgctggaacagtttggcagagaagctgggaattgatggatctgcgatcaaggccgtcatcgttttagccgagatcgcaactggaaaggattatctagaaagtggtcgcaatctaaagagactgaagttaaatggtttatctagaagtgagcttatagcgaagttcaacccttattttgggcaacggatcgagagtcgcatgtaa

SEQ ID NO: 8637 - protein, 363 aa, Muscodor strobelii
  misc_feature: SGI Peptide ID NO. 562667
  misc_feature (3)..(138): Pfam Id: PF01210 Pfam Desc: NAD-dependent glycerol-3-phosphate dehydrogenase N-terminus
  misc_feature (175)..(325): Pfam Id: PF02317 Pfam Desc: NAD/NADP octopine/nopaline dehydrogenase, alpha-helical domain
  misc_feature (61)..(106): Pfam Id: PF01210 Pfam Desc: NAD-dependent glycerol-3-phosphate dehydrogenase N-terminus
  misc_feature (1)..(363): NCBI GI: 145609435 Blast Desc: MGG_13427 [Magnaporthe grisea 70-15] gi|145016798|gb|EDK01228.1| MGG_13427 [Magnaporthe grisea 70-15]
  misc_feature (4)..(351): NCBI GI: 39969503 Blast Desc: MGG_10362 [Magnaporthe grisea 70-15] gi|145015158|gb|EDJ99726.1| MGG_10362 [Magnaporthe grisea 70-15]
  misc_feature (4)..(351): NCBI GI: 115443096 Blast Desc: [Aspergillus terreus NIH2624] gi|114188224|gb|EAU29924.1| [Aspergillus terreus NIH2624]
  misc_feature (4)..(349): NCBI GI: 120609270 Blast Desc: NAD/NADP octopine/nopaline dehydrogenase [Acidovorax avenae subsp. citrulli AAC00-1] gi|120587734|gb|ABM31174.1| NAD/NADP octopine/nopaline dehydrogenase [Acidovorax citrulli
  misc_feature (4)..(348): NCBI GI: 255947836 Blast Desc: Pc22g06570 [Penicillium chrysogenum Wisconsin 54-1255] gi|211591702|emb|CAP97945.1| Pc22g06570 [Penicillium chrysogenum Wisconsin 54-1255]
  misc_feature (7)..(351): NCBI GI: 86359788 Blast Desc: D-lysopine dehydrogenase/D-octopine dehydrogenase protein [Rhizobium etli CFN 42] gi|86283890|gb|ABC92952.1| D-lysopine dehydrogenase/D-octopine dehydrogenase protein etli
  misc_feature (5)..(352): NCBI GI: 145234645 Blast Desc: An03g00670 [Aspergillus niger] gi|134057643|emb|CAK38042.1| protein product [Aspergillus niger]
  misc_feature (4)..(348): NCBI GI: 167040731 Blast Desc: NAD/NADP octopine/nopaline dehydrogenase [Thermoanaerobacter sp. X514] gi|242257070|ref|ZP_04801946.1| NAD/NADP octopine/nopaline dehydrogenase [Thermoanaerobacter sp.
  misc_feature (4)..(348): NCBI GI: 256752167 Blast Desc: NAD/NADP octopine/nopaline dehydrogenase [Thermoanaerobacter ethanolicus CCSD1] gi|256748981|gb|EEU62019.1| NAD/NADP octopine/nopaline CCSD1]
  misc_feature (4)..(348): NCBI GI: 167037833 Blast Desc: NAD/NADP octopine/nopaline dehydrogenase [Thermoanaerobacter pseudethanolicus ATCC 33223] gi|241904528|ref|ZP_04789217.1| NAD/NADP octopine/nopaline subsp.
  misc_feature (5)..(352): SWISSPROT Homolog: EC 1.5.1.11 D-octopine dehydrogenase
  misc_feature (5)..(352): SWISSPROT Homolog: EC 1.5.1.16 D-lysopine dehydrogenase
MHDSLSVIGAGPAGFALAADLQSQGKSVLVYSHPAHLHHANAVRDKGFLTINGAIESFMKLHITSDMGEAVSFSKIIILTVPSTGQETVLQELKKFDLRQHTIIAIPGNLFSLIASAEIQAESFLETNLSPYSCRMDGGSLVVMGTKSRILIASLHTPLTRSFCQSIQSIFPMELKWCSSVIEVCLSNINGVFHPLMMLMNAGRIESTGGDFFLYRDGLTRSVANAMIAVDEVRMKTGAAFGLRLKSALDVSNECYNHDFKDLVELARNSQPHRRLKAPSNIENRNVSEDVPDLLVCWNSLAEKLGIDGSAIKAVIVLAEIATGKDYLESGRNLKRLKLNGLSRSELIAKFNPYFGQRIESRM

SEQ ID NO: 8638 - DNA, 1631 bp, Muscodor strobelii
  misc_feature: SGI EST ID NO. CUFF.20901.0
  misc_feature: Variant of the nucleotide sequence at SEQ ID NO 8636
acagcaggtacatcgaacatgtatatatttacctcgaaagctctctcaataggcaacaagatgccattatacccgcattgtctgcatgatagcacagatcctcgacttgcatcttccttgtcgtttttaggtttcttatctgccgttcactttgaagtcatcttagatctttcggaatgcatgatagtctgtcagtcataggggcaggccctgccggctttgcgctcgccgcggacctgcagagtcaagggaagagtgtcttggtgtactcgcatcctgcgcatctccatcacgccaacgctgtgagggacaaaggtttcctgacgatcaatggcgcgatcgaaagctttatgaaactacatatcacatctgacatgggcgaagctgtctcattttctaagattatcatacttaccgttccgtctacgggccaggaaaccgtactgcaggaactaaagaaatttgatttgcgtcagcacacgatcatcgccatccccgggaacctgttttcactcattgctagtgccgagatacaagcagaaagcttcctcgaaaccaatctctcaccatattcatgtcggatggacgggggaagcttagtagtgatgggcacgaagagccgaatcttaattgcgtcgttacacacgccattgactcgatcattttgtcaaagcatacagagtatcttcccaatggagctcaaatggtgcagcagcgtcattgaagtctgtttatcaaatatcaacggagtgtttcatccgctcatgatgttgatgaatgctggacggattgaaagcacaggcggagatttcttcctctatcgagacggtcttactcgatcagttgccaacgctatgatagccgtcgatgaagtacgaatgaagactggtgctgcatttgggctacggctcaaaagtgctttggacgtgtccaacgagtgctacaatcacgactttaaggacttagtagaactggctcgaaattcacaaccccacagaagattgaaggcgccatccaatatcgagaaccgaaatgtttctgaagacgttccagatttacttgtttgctggaacagtttggcagagaagctgggaattgatggatctgcgatcaaggccgtcatcgttttagccgagatcgcaactggaaaggattatctagaaagtggtcgcaatctaaagagactgaagttaaatggtttatctagaagtgagcttatagcgaagttcaacccttattttgggcaacggatcgagagtcgcatgtaaggcgcatgtacacaaatgagggttttaacaataaccacgcaacaaatatcgacgatttaagtcaaaatagacacgatttcaatcataattcgcaatcgattatgttacttctttcattttccaagatctcacgacacttaaggtttatcatggctccactgaaaatggcgaagccttgcgccatagtaccccaatatccacggaacaggagcaaatgcaagagcaatgaaggccaacaaactgttgccccaaccaaaaccaagtgcatcataaagtcctaggccaccgagaggaatctagtttacgagaatacgttagtccgttctcctgttcgttacggttcgaaattgagttgtcaagttc

SEQ ID NO: 8639 - DNA, 906 bp, Muscodor strobelii
  misc_feature: SGI cDNA ID NO. 562668
  misc_feature: Reduced expression when VOC is produced
  misc_feature: Encodes the peptide sequence at SEQ ID NO 8640
atggcgatgtctcttactcaagcccagctgagtactccttctttagtagcgtcggaggctcttcccagctcaagtagcgagccattgtctctcacctgtaccattagacaagatcctctatctattactcttaatgggccagcgctcttcgggctggcggtgtccctaattctaagtactcaattcttccagccaactatcgtggcgctgctcatagcactcgcaacaattcttatattcgtgcacaatgacttccagaactatctcaatctcggcccgggtggtactcctgcgacattcactggatacacacgcatcaactggctcaagctctgggctctacgagatccatttacaccactacctccagacccaaccgctcaaccaccgtccggcattttgaacagacaaagactcccgtatcgctgtggtccgcgtccgcgagtggtaggcattgcgccccaacgtcaagtcgatcaattcgggtctcgagagtgttatctagcactgcgtcgagtcctagaaaatcacggtcttgcgaacgcggaacagattggtattggcacatcatgttttgagaaacatggattgggcttattcgcccgatacccgctgaataatacttgccagggcgagatctgccatgttcacggctctgaccattctttgcatctcaacttacatcctgatgatgctaaagaggtgctagcgaagggctggggccaacgacacccactgaccagtcactgctttggactattcaaaatgccggttccaagacagttcactatggtctatgccccaaggagtagagatgagctcaaggttgtttgcaacatcatcgaagcagcgagttggtgggtaacgggaaaggagttcccaatggagatgctcggcgagtcctaa

SEQ ID NO: 8640 - protein, 301 aa, Muscodor strobelii
  misc_feature: SGI Peptide ID NO. 562668
  misc_feature (1)..(295): NCBI GI: 46108258 Blast Desc: FG01011.1 [Gibberella zeae PH-1]
  misc_feature (27)..(295): NCBI GI: 256734456 Blast Desc: NECHADRAFT_74743 [Nectria haematococca mpVI 77-13-4]
  misc_feature (3)..(297): NCBI GI: 171696258 Blast Desc: protein product [Podospora anserina] gi|170948371|emb|CAP60535.1| protein product [Podospora anserina]
  misc_feature (36)..(297): NCBI GI: 154318299 Blast Desc: BC1G_03317 [Botryotinia fuckeliana B05.10] gi|150842840|gb|EDN18033.1| BC1G_03317 [Botryotinia fuckeliana B05.10]
  misc_feature (23)..(301): NCBI GI: 116182028 Blast Desc: CHGG_01642 [Chaetomium globosum CBS 148.51] gi|88185939|gb|EAQ93407.1| CHGG_01642 [Chaetomium globosum CBS 148.51]
  misc_feature (28)..(300): NCBI GI: 156053103 Blast Desc: SS1G_06719 [Sclerotinia sclerotiorum 1980] gi|154704497|gb|EDO04236.1| SS1G_06719 [Sclerotinia sclerotiorum 1980]
  misc_feature (27)..(301): NCBI GI: 145614624 Blast Desc: MGG_04441 [Magnaporthe grisea 70-15] gi|145021537|gb|EDK05666.1| MGG_04441 [Magnaporthe grisea 70-15]
  misc_feature (1)..(301): NCBI GI: 85117369 Blast Desc: NCU08337 [Neurospora crassa OR74A] gi|28927046|gb|EAA36004.1| conserved [Neurospora crassa OR74A]
  misc_feature (71)..(292): NCBI GI: 258568862 Blast Desc: conserved [Uncinocarpus reesii 1704] gi|237906621|gb|EEP81022.1| conserved [Uncinocarpus reesii 1704]
  misc_feature (71)..(292): NCBI GI: 240109855 Blast Desc: CPC735_033600 [Coccidioides posadasii C735 delta SOWgp]
  misc_feature: Useful for introducing or modulating the production of volatile compounds
MAMSLTQAQLSTPSLVASEALPSSSSEPLSLTCTIRQDPLSITLNGPALFGLAVSLILSTQFFQPTIVALLIALATILIFVHNDFQNYLNLGPGGTPATFTGYTRINWLKLWALRDPFTPLPPDPTAQPPSGILNRQRLPYRCGPRPRVVGIAPQRQVDQFGSRECYLALRRVLENHGLANAEQIGIGTSCFEKHGLGLFARYPLNNTCQGEICHVHGSDHSLHLNLHPDDAKEVLAKGWGQRHPLTSHCFGLFKMPVPRQFTMVYAPRSRDELKVVCNIIEAASWWVTGKEFPMEMLGES

SEQ ID NO: 8641 - DNA, 3261 bp, Muscodor strobelii
  misc_feature: SGI EST ID NO. CUFF.20925.0
  misc_feature: Variant of the nucleotide sequence at SEQ ID NO 8639
gtaacttccaacaagctacgtgcaagcatcgtcacttgaccacttgcagcaacagcccatttaacaatgtctacaaaagggtcgctttggaacgcacatgcacctgtgcaaattcactcgtatgcaaggcacgaaccttacctacacacttaggcttcaagaattgcagactttcaacacacgagcaccaattgatactacttccttgcttataccacatcctagatatttcgttccagactgattacaccatccaagtctgcttgtccgaagataaaggattattaccatggcgatgtctcttactcaagcccagctgagtactccttctttagtagcgtcggaggctcttcccagctcaagtagcgagccattgtctctcacctgtaccattagacaagatcctctatctattactcttaatgggccagcgctcttcgggctggcggtgtccctaattctaagtactcaattcttccagccaactatcgtggcgctgctcatagcactcgcaacaattcttatattcgtgcacaatgacttccagaactatctcaatctcggcccgggtggtactcctgcgacattcactggtaagttcgcgcgaatattaaatcgaacaatttgggggatgtcgaatcaattggtgtttgttctcttgacacatgtctttgcgagaatcagttatgaataggagatagtaatcaaatcatggtgtaggatacacacgcatcaactggctcaagctctgggctctacgagatccatttacaccactacctccagacccaaccgctcaaccaccgtccggcattttgaacagacaaagactcccgtatcgctgtggtccgcgtccgcgagtggtaggcattgcgccccaacgtcaagtcgatcaattcgggtctcgagagtgttatctagcactgcgtcgagtcctagaaaatcacggtcttgcgaacgcggaacagattggtattggcacatcatgttttgagaaacatggattgggcttattcgcccgatacccgctgaataatacttgccagggcgagatctgccatgttcacggctctgaccattctttgcatctcaacttacatcctgatgatgctaaagaggtgctagcgaagggctggggccaacgacacccactgaccagtcactgctttggactattcaaaatgccggttccaagacagttcactatggtctatgccccaaggagtagagatgagctcaaggttgtttgcaacatcatcgaagcagcgagttggtgggtaacgggaaaggagttcccaatggagatgctcggcgagtcctaaacttacaggactgactgagaatctgagattgccgttggttgccatcggtaaaactcccataaaatgtctacctagtgttacttcgtaacttgacctattttctagccaaatcctacaatgaactaccaatattgggacaaagactcgaaattctacaattcaacatgtgagaccaggtttgtgagttcttgagagtttgcatgtctttcgacattcatagcctccaacaccaaaagcaccatatttatgatatgtctttattcattttcattccaatccgtacttctagatctccgttgaagatatctcactgctgttccgtttgccgctctactctttatccccgctttcctaaccgcaacgccgcaaatgttgaagattcgcgtgtctagtccatgaataaaacaatacaaacaccattccatgaacagatatatgtgcagataaatatgtttatacactttccaaaatattccctttaagctggagcagtacccttccagtacttagccggcacaaacggcatcttgctgacaaccgccttgcgcgccttgcctcggactttgacctgcacttcggtgccagacttgtgtaatccgtccttgatgtatcccatagcgatattcttacccaatgtcggactagggcagccactggtgataacaccgatattctgcccagcctcatcaacgatctcagcgccttcacgagcaggtgctccctcgatgataagtccaatgcgtcgcctgctcacaccagcgccacctttgctcttgggcgtgagttgtgagaggattacatctgagccgtggaacttgttaggcccggttctgcggtccttgccgatgatccatgatagaccaccttcgaccggagtagtggtgtcgtcaaggtcgtggccgtaaagacacataccagcctctagtctaagcgaatctctcgctccgagaccggcgagttggagtttatctggtccggcggtctctagtaaagtctgtgtcaccgggacggtatcttcgggcgagatggagatctcgaagccgtcttcgccagtgtatccaccacgtgagatcagaactttgtgctgtccgcctttcacttttgcgaagcggctctggccgaagtagagttccttcagcttgacgtcctctgggttgacgagtatggactcgaggagttccgcggataaaggaccctggagggcaataagtccccatccgtcttgaatctcatgctttacctctcggcccttccaggctgcgagttgttcgctgaggtatttgagatctttttcccggcacgcggcatttgtgacaacgtagaatagcaaggggctcaatcgcgtgataactgtgtcgtctacgatcccgccagtctcaggccataatagtgcagataatgtactctgatgtgcgggtagagtcgacagactgctcggcgtgatcgattcgagaaactcggtggcgcccggtccggagaacatgtgttgaaccatatgtcctacatcgaataacgaggccttctcccgagtgaaatggtgcgatgcgctgacgcttaggccggagtattgaactggcatgtcgaagccgccgaatggcaccatcttggcgccatgctcgagatgtaagtcataaaggggagttcgattcaacggaccttcggaggacgatgcgtacgttctacggttttgagtccgggttgtcgttggcagagcgaggcatgttggacgggccggagagcgctcggaagtagtcgtataagtgcgggttaccgcggttgacgatatagctctggcaagagtgtttgtctgtgttcttgaactgctgagggcattgacgcctttcccggccctctgtatgactctagatgccttcattttgaatcaattgagtgctggtaatcgccaattgaccttacgaaggttggtgtttttggcccg

SEQ ID NO: 8642 - DNA, 1125 bp, Muscodor strobelii
  misc_feature: SGI cDNA ID NO. 562669
  misc_feature: Reduced expression when VOC is produced
  misc_feature: Encodes the peptide sequence at SEQ ID NO 8643
atggtgccattcggcggcttcgacatgccagttcaatactccggcctaagcgtcagcgcatcgcaccatttcactcgggagaaggcctcgttattcgatgtaggacatatggttcaacacatgttctccggaccgggcgccaccgagtttctcgaatcgatcacgccgagcagtctgtcgactctacccgcacatcagagtacattatctgcactattatggcctgagactggcgggatcgtagacgacacagttatcacgcgattgagccccttgctattctacgttgtcacaaatgccgcgtgccgggaaaaagatctcaaatacctcagcgaacaactcgcagcctggaagggccgagaggtaaagcatgagattcaagacggatggggacttattgccctccagggtcctttatccgcggaactcctcgagtccatactcgtcaacccagaggacgtcaagctgaaggaactctacttcggccagagccgcttcgcaaaagtgaaaggcggacagcacaaagttctgatctcacgtggtggatacactggcgaagacggcttcgagatctccatctcgcccgaagataccgtcccggtgacacagactttactagagaccgccggaccagataaactccaactcgccggtctcggagcgagagattcgcttagactagaggctggtatgtgtctttacggccacgaccttgacgacaccactactccggtcgaaggtggtctatcatggatcatcggcaaggaccgcagaaccgggcctaacaagttccacggctcagatgtaatcctctcacaactcacgcccaagagcaaaggtggcgctggtgtgagcaggcgacgcattggacttatcatcgagggagcacctgctcgtgaaggcgctgagatcgttgatgaggctgggcagaatatcggtgttatcaccagtggctgccctagtccgacattgggtaagaatatcgctatgggatacatcaaggacggattacacaagtctggcaccgaagtgcaggtcaaagtccgaggcaaggcgcgcaaggcggttgtcagcaagatgccgtttgtgccggctaagtactggaagggtactgctccagcttaa

SEQ ID NO: 8643 - protein, 374 aa, Muscodor strobelii
  misc_feature: SGI Peptide ID NO. 562669
  misc_feature (31)..(252): Pfam Id: PF01571 Pfam Desc: Aminomethyltransferase folate-binding domain
  misc_feature (262)..(360): Pfam Id: PF08669 Pfam Desc: Glycine cleavage T-protein C-terminal barrel domain
  misc_feature (283)..(360): Pfam Id: PF08669 Pfam Desc: Glycine cleavage T-protein C-terminal barrel domain
  misc_feature (1)..(374): NCBI GI: 154318225 Blast Desc: BC1G_03280 [Botryotinia fuckeliana B05.10] gi|150842803|gb|EDN17996.1| BC1G_03280 [Botryotinia fuckeliana B05.10]
  misc_feature (1)..(374): NCBI GI: 156053183 Blast Desc: SS1G_06759 [Sclerotinia sclerotiorum 1980] gi|154704537|gb|EDO04276.1| SS1G_06759 [Sclerotinia sclerotiorum 1980]
  misc_feature (1)..(369): NCBI GI: 169608321 Blast Desc: SNOG_07231 [Phaeosphaeria nodorum SN15] gi|111064762|gb|EAT85882.1| SNOG_07231 [Phaeosphaeria nodorum SN15]
  misc_feature (1)..(370): NCBI GI: 39945686 Blast Desc: MGG_04826 [Magnaporthe grisea 70-15] gi|145021324|gb|EDK05453.1| MGG_04826 [Magnaporthe grisea 70-15]
  misc_feature (1)..(374): NCBI GI: 171680267 Blast Desc: protein product [Podospora anserina] gi|170939760|emb|CAP64986.1| protein product [Podospora anserina]
  misc_feature (1)..(374): NCBI GI: 46108538 Blast Desc: FG01151.1 [Gibberella zeae PH-1]
  misc_feature (1)..(372): NCBI GI: 256734393 Blast Desc: [Nectria haematococca mpVI 77-13-4]
  misc_feature (1)..(374): NCBI GI: 261355889 Blast Desc: aminomethyltransferase [Verticillium albo-atrum VaMs.102]
  misc_feature (1)..(370): NCBI GI: 116206962 Blast Desc: CHGG_02774 [Chaetomium globosum CBS 148.51] gi|88183371|gb|EAQ90839.1| CHGG_02774 [Chaetomium globosum CBS 148.51]
  misc_feature (1)..(369): NCBI GI: 85116758 Blast Desc: NCU02727 [Neurospora crassa OR74A] gi|28926915|gb|EAA35876.1| NCU02727 [Neurospora crassa OR74A]
  misc_feature (1)..(369): SWISSPROT Homolog: EC 2.1.2.10 Aminomethyltransferase
  misc_feature: Useful for introducing or modulating the production of volatile compounds
MVPFGGFDMPVQYSGLSVSASHHFTREKASLFDVGHMVQHMFSGPGATEFLESITPSSLSTLPAHQSTLSALLWPETGGIVDDTVITRLSPLLFYVVTNAACREKDLKYLSEQLAAWKGREVKHEIQDGWGLIALQGPLSAELLESILVNPEDVKLKELYFGQSRFAKVKGGQHKVLISRGGYTGEDGFEISISPEDTVPVTQTLLETAGPDKLQLAGLGARDSLRLEAGMCLYGHDLDDTTTPVEGGLSWIIGKDRRTGPNKFHGSDVILSQLTPKSKGGAGVSRRRIGLIIEGAPAREGAEIVDEAGQNIGVITSGCPSPTLGKNIAMGYIKDGLHKSGTEVQVKVRGKARKAVVSKMPFVPAKYWKGTAPA

SEQ ID NO: 8644 - DNA, 552 bp, Muscodor strobelii
  misc_feature: SGI cDNA ID NO. 562670
  misc_feature: Encodes the peptide sequence at SEQ ID NO 8645
atgggtctcacgttctccaagttgttcgacaaactatgggggaagaaggagatgagaattctgatggttggtttggacgccgccggaaagaccaccattctctacaagctcaagctcggtgaaatcgtcaccaccatccccaccatcggattcaacgtcgaaactgtcgaatacaagaacattcagttcaccgtgtgggatgtcggtggtcaagacaagatccgccctctgtggcgccactacttccagaacactcagggtatcatcttcgtcgtcgacagcaacgacagggatcgtattgtcgaggcccgtgaggagttgcagcgcatgctcaacgaggatgagctccgcgatgccatccttctggtctttgccaacaagcaggatctgcctaacgccatgaatgctgccgagatcactgacaagcttggtctgcacagcttgagacagcgtgcctggtacatccaatctacctgcgctacttctggtgacggtctgtatgagggtctcgagtggctcgccaccactctgcgcaaggcaggacaccagtag

SEQ ID NO: 8645 - protein, 183 aa, Muscodor strobelii
  misc_feature: SGI Peptide ID NO. 562670
  misc_feature (5)..(177): Pfam Id: PF00025 Pfam Desc: ADP-ribosylation factor family
  misc_feature (19)..(129): Pfam Id: PF08477 Pfam Desc: Miro-like protein
  misc_feature (19)..(179): Pfam Id: PF00071 Pfam Desc: Ras family
  misc_feature (15)..(174): Pfam Id: PF09439 Pfam Desc: Signal recognition particle receptor beta subunit
  misc_feature (1)..(183): NCBI GI: 39944912 Blast Desc: ADP-ribosylation factor 1 [Magnaporthe grisea 70-15] gi|145021540|gb|EDK05669.1| ADP-ribosylation factor 1 [Magnaporthe grisea 70-15]
  misc_feature (1)..(183): NCBI GI: 46108264 Blast Desc: ARF_AJECA ADP-RIBOSYLATION FACTOR [Gibberella zeae PH-1] gi|256735172|gb|EEU48518.1| [Nectria haematococca mpVI 77-13-4]
  misc_feature (1)..(182): NCBI GI: 154318287 Blast Desc: ADP-ribosylation factor [Botryotinia fuckeliana B05.10] gi|156053125|ref|XP_001592489.1| ADP-ribosylation factor 1 [Sclerotinia sclerotiorum 1980] gi|150842834|gb|EDN18027.1| 1
  misc_feature (1)..(182): NCBI GI: 169607641 Blast Desc: SNOG_06879 [Phaeosphaeria nodorum SN15] gi|189189756|ref|XP_001931217.1| ADP-ribosylation factor [Pyrenophora tritici-repentis Pt-1C-BFP] SNOG_06879 nodorum SN15]
  misc_feature (1)..(183): NCBI GI: 225560088 Blast Desc: ADP-ribosylation factor [Ajellomyces capsulatus G186AR]
  misc_feature (1)..(183): NCBI GI: 226281580 Blast Desc: ADP-ribosylation factor [Paracoccidioides brasiliensis Pb01] gi|226291307|gb|EEH46735.1| ADP-ribosylation factor [Paracoccidioides brasiliensis Pb18]
  misc_feature (1)..(182): NCBI GI: 169781474 Blast Desc: [Aspergillus oryzae RIB40] gi|238498256|ref|XP_002380363.1| ADP-ribosylation factor, [Aspergillus flavus NRRL3357] gi|83773942|dbj|BAE64067.1| protein
  misc_feature (1)..(183): NCBI GI: 261203473 Blast Desc: conserved [Ajellomyces dermatitidis SLH14081] gi|461532|sp|P34727.3|ARF_AJECA RecName: Full=ADP-ribosylation factor gi|407693|gb|AAA17548.1| ADP-ribosylation factor conserved
  misc_feature (1)..(182): NCBI GI: 121701675 Blast Desc: ADP-ribosylation factor, [Aspergillus clavatus NRRL 1] gi|119397245|gb|EAW07676.1| ADP-ribosylation factor, [Aspergillus clavatus NRRL 1]
  misc_feature (3)..(183): NCBI GI: 225679576 Blast Desc: ADP-ribosylation factor [Paracoccidioides brasiliensis Pb03]
MGLTFSKLFDKLWGKKEMRILMVGLDAAGKTTILYKLKLGEIVTTIPTIGFNVETVEYKNIQFTVWDVGGQDKIRPLWRHYFQNTQGIIFVVDSNDRDRIVEAREELQRMLNEDELRDAILLVFANKQDLPNAMNAAEITDKLGLHSLRQRAWYIQSTCATSGDGLYEGLEWLATTLRKAGHQ

SEQ ID NO: 8646 - DNA, 1386 bp, Muscodor strobelii
  misc_feature: SGI EST ID NO. CUFF.20908.0
  misc_feature: Variant of the nucleotide sequence at SEQ ID NO 8644
gggcgattcgcagcgcccggcatcctgcgtctccagccacattgcagtgccagtgcctttgcctactagcctttcaaaaatccacacatcctcttcctcccaactgcatcacttctcgccgaccacaacaacatctcaacccctttgaacctggccccatcacgacgagatctctccttcgccgagcaggtctcattgttgccgcataatcaacggatatcttctgggttaataattctctcgtcacattaattaccacaccgtcgcaatcatgggtctcacgttctccaagttgttcgacaaactatgggggaagaaggagatgagaattctgatggttggtttggacgccgccggaaagaccaccattctctacaagctcaagctcggtgaaatcgtcaccaccatccccaccatcggattcaacgtcgaaactgtcgaatacaagaacattcagttcaccgtgtgggatgtcggtggtcaagacaagatccgccctctgtggcgccactacttccagaacactcagggtatcatcttcgtcgtcgacagcaacgacagggatcgtattgtcgaggcccgtgaggagttgcagcgcatgctcaacgaggatgagctccgcgatgccatccttctggtctttgccaacaagcaggatctgcctaacgccatgaatgctgccgagatcactgacaagcttggtctgcacagcttgagacagcgtgcctggtacatccaatctacctgcgctacttctggtgacggtctgtatgagggtctcgagtggctcgccaccactctgcgcaaggcaggacaccagtagaggatatagatatgatggcaatacccaacggtcgacccatttctctcccacttttctctcaagggtcggttgtagctcgcaagccatatctggagcggaggatatagtcatacaattatgcatcatttcgacacctgttttctctggcagtggttgcagactacatggtgacgacgcaaccacgctactctcggcatggcctctaaacagtggtccaattcagaagtctggtttcggaaagaataggggagtgggcgtactgggacggagcttgtatgaatttggtgttacatacagcaaaagagatctccttacggttactcgcgggctgtccctgcatcttgctgctggcgcgggaggtctatagttgacccttaccgtgctataacgtgacccgtagtcgtacacactcataataagacttccttttctacaattctgtttaggtttccatagcttgtaaaccgaacagtgtgtcgtgagtcgagctccagctctgattgatgcaagagatatcaagattatagatcagtcaatagaccatctccaaactaagcgagctg

SEQ ID NO: 8647 - DNA, 609 bp, Muscodor strobelii
  misc_feature: SGI cDNA ID NO. 562671
  misc_feature: Encodes the peptide sequence at SEQ ID NO 8648
atgttattttcaaccgccacgctgctagcagctgctggcctcttcagcgccgtggccggccacaacatacagcttccgggccacggtcgggagtgcttccacgaagaattacacaaggacgatgtcatgaccgtcaccttccaggtcggcgacagggagtttggcagcgcaggcaacctcgacatagacttttggatcaaggctcccaacggtcaggacgagacgatgcaacggtcaacctccaacggcgactactcctttacagccagacaagacggcagatatctctactgctttggcaacgaacactggggtgccaccagcaaagaggtctccttcaacgtccatggtatcgtctacgtctcggaatcagatgcgcctaaggatcccttggatgttgagctcaagaaacttaacgagcttgtcagccaagtgaaagacgaacagtcctacatcgtcgtccgcgagcgaacccaccgtaacaccgccgagagcaccaatagccgtgtcaagtggtggaatctcttcgttattggtgtcgtcgttggcgagtccctctttcaggtctggtggttacgccgcttcttcgaggtcaagcgcgttgtataa

SEQ ID NO: 8648 - protein, 202 aa, Muscodor strobelii
  misc_feature: SGI Peptide ID NO. 562671
  misc_feature (53)..(119): Pfam Id: PF01105 Pfam Desc: emp24/gp25L/p24 family/GOLD
  misc_feature (2)..(202): NCBI GI: 164424875 Blast Desc: NCU08339 [Neurospora crassa OR74A] gi|157070701|gb|EAA36006.2| NCU08339 [Neurospora crassa OR74A]
  misc_feature (1)..(202): NCBI GI: 261356289 Blast Desc: endosomal protein P24B [Verticillium albo-atrum VaMs.102]
  misc_feature (15)..(202): NCBI GI: 46108262 Blast Desc: FG01013.1 [Gibberella zeae PH-1]
  misc_feature (1)..(202): NCBI GI: 171695464 Blast Desc: protein product [Podospora anserina] gi|170947974|emb|CAP60138.1| protein product [Podospora anserina]
  misc_feature (2)..(202): NCBI GI: 256734455 Blast Desc: [Nectria haematococca mpVI 77-13-4]
  misc_feature (1)..(202): NCBI GI: 39944914 Blast Desc: MGG_04439 [Magnaporthe grisea 70-15] gi|145021539|gb|EDK05668.1| MGG_04439 [Magnaporthe grisea 70-15]
  misc_feature (1)..(202): NCBI GI: 156053123 Blast Desc: endosomal P24B protein [Sclerotinia sclerotiorum 1980] gi|154704507|gb|EDO04246.1| endosomal P24B protein [Sclerotinia sclerotiorum 1980]
  misc_feature (1)..(202): NCBI GI: 154318289 Blast Desc: BC1G_03312 [Botryotinia fuckeliana B05.10] gi|150842835|gb|EDN18028.1| BC1G_03312 [Botryotinia fuckeliana B05.10]
  misc_feature (20)..(198): NCBI GI: 116182032 Blast Desc: conserved [Chaetomium globosum CBS 148.51] gi|88185941|gb|EAQ93409.1| conserved [Chaetomium globosum CBS 148.51]
  misc_feature (1)..(198): NCBI GI: 121701729 Blast Desc: endosomal cargo receptor (P24), [Aspergillus clavatus NRRL 1] gi|119397272|gb|EAW07703.1| endosomal cargo receptor (P24), [Aspergillus clavatus NRRL 1]
MLFSTATLLAAAGLFSAVAGHNIQLPGHGRECFHEELHKDDVMTVTFQVGDREFGSAGNLDIDFWIKAPNGQDETMQRSTSNGDYSFTARQDGRYLYCFGNEHWGATSKEVSFNVHGIVYVSESDAPKDPLDVELKKLNELVSQVKDEQSYIVVRERTHRNTAESTNSRVKWWNLFVIGVVVGESLFQVWWLRRFFEVKRVV

SEQ ID NO: 8649 - DNA, 2256 bp, Muscodor strobelii
  misc_feature: SGI EST ID NO. CUFF.20967.0
  misc_feature: Variant of the nucleotide sequence at SEQ ID NO 8647
attatccatgctaggacgaatctacatagatgtcctactgtagtgaacaagatacttgattgtcacacaagcctatcccgcggttcaatcccttccagtatattgacccctgcgccgtgcccagggaccttttgcgccccagtgtcgccagtcccgtcggaagctgtgccaagccgcgccgagcctcaggcccgtgtcaaagtgtcaactcccctttgatgccacggtgatcaaattggtccagagcttgggcgacgagaattcgatacctttggtagcatcaccacccagccatgttattttcaaccgccacgctgctagcagctgctggcctcttcagcgccgtggccggccacaacatacagcttccgggccacggtcgggagtgcttccacgaagaattacacaaggacgatgtcatgaccgtcaccttccaggtcggcgacagggagtttggcagcgcaggcaacctcgacatagacttttgggtacgaagggctattgactattcttctgccatcccattggccatcaactgacccaatgcgctgcagatcaaggctcccaacggtcaggacgagacgatgcaacggtcaacctccaacggcgactactcctttacagccagacaagacggcagatatctctactgctttggcaacgaacactggggtgccaccagcaaagaggtctccttcaacgtccatggtatcgtctacgtctcggaatcagatgcgcctaaggatcccttggatgttgagctcaagaaacttaacgagcttgtcagccaagtgaaagacgaacagtcctacatcgtcgtccgcgagcgaacccaccgtaacaccgccgagagcaccaatagccgtgtcaagtggtggaatctcttcgttattggtgtcgtcgttggcgagtccctctttcaggtctggtggttacgccgcttcttcgaggtcaagcgcgttgtataatatgcaggaaacatgaagaagaatatcacattgtgtcgagacgaattttcaggtggtctggcgtactcaggtctatggcataagatggcgggctttaaaacggggcgatgatctggactgttttgtacgtttatatacaccacaatgagacgaacggaattgtcacacatctgggttatccttcgtcgcaccagtaataattggcaaacacatatgtgtacatgttacgcatgaatttcgctatctagagtacctcttctcactgcatacctgttactcaacctgtcgatgaaatccattcaacccaatcatcaattcaggcgagttttcaatctcagtctgtctcgccttcaactcatccacatcccaattagcaaagacaaacttattcttcaaaaacttagcctcctcgctcgcagcccagacaagaaaatgagcaggtagattgatatcatccccgggccactcgacgcccaactccttcaccatcttctgaccgccctccgtcccggtcacgatcccaggatgcacagtaatgaccctcagcccgggattctccgcaccgaaatactccatcaacttcaccgcagccagtttgctgaccgcgtagccagacatgggcatctgggccggaaaaaacgcaccggctgtcccaacatgcagaaacactgctctgggactagcatgagatgcgatgacttgcgcgaggacggctggtccgcggacgttgacctcgaaacctgtccaccagtcctcaaggtcgctttttgcgaggggagcgagagagggctggtagccggcaaaattgataacgacatctacggcatcgagtgtctctttggtgtctgtgaatgccttttgaagggctacggcatcttggatatcagcggcaaatgtcaagatcttggcatccttgaatttagactgaagagtattggcggtggaggagatagcctcgacttttcgcgtgacgagaatgagacggacacatcctgcttcgagaaacgcagttgcagtagctagggcaatcccgcttgatgcaccggtaatgaatacggttttcgacgatgcggataaggagggattagagggagagatggtagtgtaaggggttgtgtggttggtttttgtgtagttcattttgaggaaccaatgggctcagtcttgaaggaagggtgtaaaattaggtagttggttttcttcaaatgaaaatgggctactgatctcagacttccgcccaagctgagctcgagtggaagtcgtacttatactatttcgtggcaagtag

SEQ ID NO: 8650 - DNA, 867 bp, Muscodor strobelii
  misc_feature: SGI cDNA ID NO. 562672
  misc_feature: Encodes the peptide sequence at SEQ ID NO 8651
atgaactacacaaaaaccaaccacacaaccccttacactaccatctctccctctaatccctccttatccgcatcgtcgaaaaccgtattcattaccggtgcatcaagcgggattgccctagctactgcaactgcgtttctcgaagcaggatgtgtccgtctcattctcgtcacgcgaaaagtcgaggctatctcctccaccgccaatactcttcagtctaaattcaaggatgccaagatcttgacatttgccgctgatatccaagatgccgtagcccttcaaaaggcattcacagacaccaaagagacactcgatgccgtagatgtcgttatcaattttgccggctaccagccctctctcgctcccctcgcaaaaagcgaccttgaggactggtggacaggtttcgaggtcaacgtccgcggaccagccgtcctcgcgcaagtcatcgcatctcatgctagtcccagagcagtgtttctgcatgttgggacagccggtgcgttttttccggcccagatgcccatgtctggctacgcggtcagcaaactggctgcggtgaagttgatggagtatttcggtgcggagaatcccgggctgagggtcattactgtgcatcctgggatcgtgaccgggacggagggcggtcagaagatggtgaaggagttgggcgtcgagtggcccggggatgatatcaatctacctgctcattttcttgtctgggctgcgagcgaggaggctaagtttttgaagaataagtttgtctttgctaattgggatgtggatgagttgaaggcgagacagactgagattgaaaactcgcctgaattgatgattgggttgaatggatttcatcgacaggttgagtaa

SEQ ID NO: 8651 - protein, 288 aa, Muscodor strobelii
  misc_feature: SGI Peptide ID NO. 562672
  misc_feature (27)..(197): Pfam Id: PF00106 Pfam Desc: short chain dehydrogenase
  misc_feature (29)..(256): Pfam Id: PF01370 Pfam Desc: NAD dependent epimerase/dehydratase family
  misc_feature (28)..(212): Pfam Id: PF08659 Pfam Desc: KR domain
  misc_feature (27)..(148): Pfam Id: PF00106 Pfam Desc: short chain dehydrogenase
  misc_feature (29)..(204): Pfam Id: PF01370 Pfam Desc: NAD dependent epimerase/dehydratase family
  misc_feature (2)..(285): NCBI GI: 121701587 Blast Desc: NADP(+)-dependent dehydrogenase, [Aspergillus clavatus NRRL 1] gi|119397201|gb|EAW07632.1| NADP(+)-dependent dehydrogenase, [Aspergillus clavatus NRRL 1]
  misc_feature (2)..(285): NCBI GI: 67541821 Blast Desc: AN7074.2 [Aspergillus nidulans FGSC A4] gi|40742013|gb|EAA61203.1| AN7074.2 [Aspergillus nidulans FGSC A4] gi|259483608|tpe|CBF79138.1| TPA: oxidoreductase, short chain
  misc_feature (2)..(285): NCBI GI: 238495010 Blast Desc: short-chain dehydrogenase, [Aspergillus flavus NRRL3357] gi|220695391|gb|EED51734.1| short-chain dehydrogenase, [Aspergillus flavus NRRL3357]
  misc_feature (2)..(287): NCBI GI: 116198493 Blast Desc: CHGG_07402 [Chaetomium globosum CBS 148.51] gi|88178681|gb|EAQ86149.1| CHGG_07402 [Chaetomium globosum CBS 148.51]
  misc_feature (2)..(285): NCBI GI: 115400769 Blast Desc: conserved [Aspergillus terreus NIH2624] gi|114191639|gb|EAU33339.1| conserved [Aspergillus terreus NIH2624]
  misc_feature (5)..(280): NCBI GI: 256727874 Blast Desc: NECHADRAFT_95296 [Nectria haematococca mpVI 77-13-4]
  misc_feature (2)..(283): NCBI GI: 261360574 Blast Desc: conserved [Verticillium albo-atrum VaMs.102]
  misc_feature (8)..(283): NCBI GI: 119193560 Blast Desc: CIMG_01157 [Coccidioides immitis RS]
  misc_feature (4)..(286): NCBI GI: 256719855 Blast Desc: NECHADRAFT_73318 [Nectria haematococca mpVI 77-13-4]
  misc_feature (1)..(283): NCBI GI: 46117514 Blast Desc: FG04599.1 [Gibberella zeae PH-1]
  misc_feature (28)..(244): SWISSPROT Homolog: EC 1.1.1.276 Serine 3-dehydrogenase
MNYTKTNHTTPYTTISPSNPSLSASSKTVFITGASSGIALATATAFLEAGCVRLILVTRKVEAISSTANTLQSKFKDAKILTFAADIQDAVALQKAFTDTKETLDAVDVVINFAGYQPSLAPLAKSDLEDWWTGFEVNVRGPAVLAQVIASHASPRAVFLHVGTAGAFFPAQMPMSGYAVSKLAAVKLMEYFGAENPGLRVITVHPGIVTGTEGGQKMVKELGVEWPGDDINLPAHFLVWAASEEAKFLKNKFVFANWDVDELKARQTEIENSPELMIGLNGFHRQVE

SEQ ID NO: 8652 - DNA, 3249 bp, Muscodor strobelii
  misc_feature: SGI cDNA ID NO. 562673
  misc_feature: Reduced expression when VOC is produced
  misc_feature: Encodes the peptide sequence at SEQ ID NO 8653
atgtcctcgccttcttttgggttctcatgggccaagagatcaggctctaccaactcgcgccccgatgagagcagagagtccgttggcgcaatgagccacagccatcacgaatccatccgccctggctcacctcccataaatacgaggcacttttcgccgcctccgaatttgtctgcttaccgggagccgacaaggtccttcgtccctggttctgcgcaggatcatctcccccctattgatagtgctagcttcgctagaagtgtccgagaagacactgctgagctagcatcgtatgttttatccgacaagaaagacaagagaaatgcttcatttctccatagacgaccttcgacatcttcccatcacagccatgattttccagctgcccagcgcgaacaggccatcttcgacgatcacttagaagcaacgacggggagaatcgacgaagtttcggaaccatcggggtcaagcagcgaaacagagatagcagaaaatgttgggccttcaatcctatcgcagatgctgagacgatcacccccggaagcgtcattgaatgatgcttccacgaccgacaagcaagctgcatcttcgaagcgccatacgttaccacggtcggagatagcgtccccaatcaatggtactaggggcgatttatcggaaagaactcctctactaggtaacaagtcttccagtcatgtgctgtcggatgacttagaagatgttgaaaaccagaaaccgagggcgaaaggcaggtctaggttgtcggcagcacaagataagctacagaatctcgtggttgtcgcagaccttagaaaatggaacagacgaataatttgggagagagtgatcgtagacccaatacagtgtttaccagctgtcattgtgggattgctgctcaacgtattggacgctttgtcatatggcatgatacttttcccgcttggtaatcccatatttgcaaacctgggtccagctgggatatctatattctatatgagcactattgttgctcaactaacgttctctttcgggagtatatttcggggaggtgtcgggtcggaacttatcgaggtggtcccgttcttccatagcatggcagctacaataacctcgatcgttggtgaagatcaacctgacgccgtgatagcaactacgatcactgccttcgcaatttcgtctttattgacaggtgttgtgttctacctcatggggagacttcagctaggctatattgtcggttttatccctcgtcatattctgatcggctgtatcggcggcgttggctggtttctcattgcgacaggctttgaagtgtcagctcggttgggcgagtttcactacgatcttgaaacggccaaacgactcgctgaggccgatacgcttcctctgtggttgattccgttgggtctggctatcatcctcattctacttcagctgaagatcacatctcgctacttacttcctgcttttatcctcgccattcccattgtcttctacttcttcgtagcctcgctggactctctggatcccgaaaatctacgacaagctgggtggatttttgaggcacctgacgatgatcaaccgtggtggtttttttggaccctgtataaattcgagctagttcattggggcgcgatcgtcgactgcctcggagccatgctcgctctgacatttttcagtatactgcacgtccctataaacgttcctgcgttagcgcagaatgcaggcgaagacaacttggatttgaatcatgaactcaagctccatggctattcgaacttcatttccggcgccgtaggaagcattcaaaactacctggtgttcgcgaataccatattctttatgcggtcaggcggtgacagccgactcgctgggtgtcttctcgcccttctaacgtttgtggtgatgacattgggccctgcaactattggatacatacccgtcatgatggtcggagctctgatctatgtcctcgggttcgagctactgttcgatgcattattgaaaccaaggaaaaagctgaaatgggtagagtatttgactacactggtgatcgtactaactatgggcatctacgacttcgttattggtatatttgttggtatgattcttgcctttgtatccgccattttccatgcgtcacgggtatctgccatccgtgccacctatacaggagatcaagtcggatccatggttcgtcgaaacccttcccaacatcattatctccaagaggttggtacgcaaacatacgtaatcaagctttccgggtttcttttcttcggtacaattgtcggtgtagaagagaaaattcgtgcactcatctccgatgatgcattccaagaacgccccatcagctatgtgattcttgatctttggcatgtaacagggattgactattctggagcggaaggatttagtactctcagcaggttacttcacaacaaaggggtgtccttgctcttgagcggcaaggatgcggacagtagtgtgggcttggacctcagagccgttggactaggttctgatggtattgatgtcaaattcatgccagatctgaactcagcattggaaagttgtgagaacgagcaactcaagaccttttacgctagccaggaggctctaagagtgacccggcctacagctgcgaagactcttgacgtcccacgcgatggacccgttactgttacccatcaaccgttggattacttatcgcattctccaaggaaacaccacctgcatcaagccgcgaagaacgttttaacgcagcaagaaattcggcgggcaactagatggcaaagcatcagcgagcccttgaggctcatgctccaggtattccatgatgtgagtcagaagaacgaagacttctggttccgtgcgaagccctacttcgtacgcaaggaattcgtggaaggcactacattataccaccgtggtgagcaagctaatggcttctacctgctggaaagaggcgaattacatgccgaatacgagactgcccagggtcgcctatcggaacccattgttcagggcactacgtgcggcgaactgccctttttctccgagacggatcgcactgctacggtccgcgctgtcaaagattgcgtggcatgggttatggatacggacagctggaaccgacttcaagctgagaaccaggacgttgcgcaagaactgctccgagtgtctctcaaattgactacagaacgcatgaatgcgatgacgaattatatatcagctgtcgggaactaa

SEQ ID NO: 8653 - protein, 1082 aa, Muscodor strobelii
  misc_feature: SGI Peptide ID NO. 562673
  misc_feature (965)..(1053): Pfam Id: PF00027 Pfam Desc: Cyclic nucleotide-binding domain
  misc_feature (741)..(855): Pfam Id: PF01740 Pfam Desc: STAS domain
  misc_feature (403)..(713): Pfam Id: PF00916 Pfam Desc: Sulfate transporter family
  misc_feature (751)..(823): Pfam Id: PF01740 Pfam Desc: STAS domain
  misc_feature (541)..(713): Pfam Id: PF00916 Pfam Desc: Sulfate transporter family
  misc_feature (403)..(438): Pfam Id: PF00916 Pfam Desc: Sulfate transporter family
  misc_feature (1)..(1076): NCBI GI: 85111690 Blast Desc: NCU02632 [Neurospora crassa OR74A] gi|28925819|gb|EAA34821.1| NCU02632 [Neurospora crassa OR74A]
  misc_feature (1)..(1077): NCBI GI: 261356296 Blast Desc: sulfate transporter family protein [Verticillium albo-atrum VaMs.102]
  misc_feature (1)..(1077): NCBI GI: 46108248 Blast Desc: FG01006.1 [Gibberella zeae PH-1]
  misc_feature (1)..(1077): NCBI GI: 39944902 Blast Desc: MGG_04433 [Magnaporthe grisea 70-15] gi|145021545|gb|EDK05674.1| MGG_04433 [Magnaporthe grisea 70-15]
  misc_feature (62)..(1077): NCBI GI: 154297380 Blast Desc: BC1G_12094 [Botryotinia fuckeliana B05.10] gi|150858599|gb|EDN33791.1| BC1G_12094 [Botryotinia fuckeliana B05.10]
  misc_feature (240)..(1076): NCBI GI: 171695456 Blast Desc: protein product [Podospora anserina] gi|170947970|emb|CAP60134.1| protein product [Podospora anserina]
  misc_feature (246)..(1077): NCBI GI: 156062088 Blast Desc: SS1G_01159 [Sclerotinia sclerotiorum 1980] gi|154696496|gb|EDN96234.1| SS1G_01159 [Sclerotinia sclerotiorum 1980]
  misc_feature (41)..(1080): NCBI GI: 212542719 Blast Desc: sulfate transporter family protein [Penicillium marneffei ATCC 18224] gi|210066421|gb|EEA20514.1| sulfate transporter family protein [Penicillium marneffei ATCC 18224]
  misc_feature (44)..(1075): NCBI GI: 121708329 Blast Desc: sulfate transporter family protein [Aspergillus clavatus NRRL 1] gi|119400245|gb|EAW10671.1| sulfate transporter family protein [Aspergillus clavatus NRRL 1]
  misc_feature (41)..(1081): NCBI GI: 242769032 Blast Desc: sulfate transporter family protein [Talaromyces stipitatus ATCC 10500] gi|218724883|gb|EED24300.1| sulfate transporter family protein [Talaromyces stipitatus ATCC 10500]
  misc_feature: Useful for introducing or modulating the production of volatile compounds
MSSPSFGFSWAKRSGSTNSRPDESRESVGAMSHSHHESIRPGSPPINTRHFSPPPNLSAYREPTRSFVPGSAQDHLPPIDSASFARSVREDTAELASYVLSDKKDKRNASFLHRRPSTSSHHSHDFPAAQREQAIFDDHLEATTGRIDEVSEPSGSSSETEIAENVGPSILSQMLRRSPPEASLNDASTTDKQAASSKRHTLPRSEIASPINGTRGDLSERTPLLGNKSSSHVLSDDLEDVENQKPRAKGRSRLSAAQDKLQNLVVVADLRKWNRRIIWERVIVDPIQCLPAVIVGLLLNVLDALSYGMILFPLGNPIFANLGPAGISIFYMSTIVAQLTFSFGSIFRGGVGSELIEVVPFFHSMAATITSIVGEDQPDAVIATTITAFAISSLLTGVVFYLMGRLQLGYIVGFIPRHILIGCIGGVGWFLIATGFEVSARLGEFHYDLETAKRLAEADTLPLWLIPLGLAIILILLQLKITSRYLLPAFILAIPIVFYFFVASLDSLDPENLRQAGWIFEAPDDDQPWWFFWTLYKFELVHWGAIVDCLGAMLALTFFSILHVPINVPALAQNAGEDNLDLNHELKLHGYSNFISGAVGSIQNYLVFANTIFFMRSGGDSRLAGCLLALLTFVVMTLGPATIGYIPVMMVGALIYVLGFELLFDALLKPRKKLKWVEYLTTLVIVLTMGIYDFVIGIFVGMILAFVSAIFHASRVSAIRATYTGDQVGSMVRRNPSQHHYLQEVGTQTYVIKLSGFLFFGTIVGVEEKIRALISDDAFQERPISYVILDLWHVTGIDYSGAEGFSTLSRLLHNKGVSLLLSGKDADSSVGLDLRAVGLGSDGIDVKFMPDLNSALESCENEQLKTFYASQEALRVTRPTAAKTLDVPRDGPVTVTHQPLDYLSHSPRKHHLHQAAKNVLTQQEIRRATRWQSISEPLRLMLQVFHDVSQKNEDFWFRAKPYFVRKEFVEGTTLYHRGEQANGFYLLERGELHAEYETAQGRLSEPIVQGTTCGELPFFSETDRTATVRAVKDCVAWVMDTDSWNRLQAENQDVAQELLRVSLKLTTERMNAMTNYISAVGN

SEQ ID NO: 8654 - DNA, 7253 bp, Muscodor strobelii
  misc_feature: SGI EST ID NO. CUFF.21015.3
  misc_feature: Variant of the nucleotide sequence at SEQ ID NO 8652
gttcaagtcaacgctggtagttgtatcaaaaaatagggcaagactgcttttcactccaacaaataatctagaccatacactttcattgtggaaatcatacctattgagttgtcccgctgctcgagttgatcatgtatggagatctaggcaacaagcttgtgagcatttcacaaccccgccatattcaacccaccaatgctggggctaaagaggtttcaattaggtccaacaagcaaagagaactcagaatttagcacatctaccaccataccaaaccgaactcgtccgggccgtcacccgcgaggtacgcgatctggataaagatgttgctagtttgcttgagcccttccaaggttcattcaacccggccgatgatcacgccaccgcttgcaccttgctggtgaatcatttgtctatgcggagaaacaaaagatgtctgctggcctatcaccacacgcgaagtgataggcttgaagaactcgtctggaaaggctatgatgttgtcgatctcgccggtcagcaaacacgagacaacagccgcgtagctaaatccacggcccctgatggcggctcgggtagcttgagcccacaggaagaggactacgtgcgccagtacagtgacctgctcgccgcatacaagggacagtggaccgatatcgatctcactggcagccttgaacccccgcgcgatctgttcatcgatgtacgggtcctcaaggatgctggagagattcaaactgaatatggtgctatcaatttgacgaaaaacagccaattctacgtccgccagggagacgtagaacgcctcattgcccaaggatatcttcagaagctcggctaagcatatatcgtcagatggaaaagaccagaatcatgatcatattggccaataatacgccgtctctgaccttactgctgggtgtttgcattctaacctttaacaaattggcgacataccatggctgcattaaacggttctcaacgttagagatagtttctacctgacgaggtcacgagatccattgcgaattccggattattgctggtcttgcgctgaaacgccactgctcggtcacgggatcttctctccggaatggcacgtcacaagtcccggatcgcgatttgagaatcgccgcgcagttggtattggccaatgtcgcacatgggtctagacacatgtcgacattccatggttcccgttcatcttcatgtcatcgctacgacagttggacccttaaggggagcgagttagtcatgtcgtacgcgtcttgggaaccttgagcgaatgatatatcagcggcttgcgactatgcatggcccgcccgttcacctccgttgtgcggagtttggtggttggacgtgggaatatcccattggtgaaccacctcggtgaatataatgtctgatcccctctagaagctgcgactctcagttcataaactccatgttcggtgatatgggatcttgtatggaacgcctgcaacgggaaccgggatgggacttgagtggagaggaagcagcaaatgtctagccttggtgatacgtaatggaaatacatcccggttacataggattcaggcacgtgcaaagaaaaaccgcaatagagaagaaaaacgtgcatcctatttatcacgagctcgagtaagcttctccgtaccgagataaattttaccagctgctgcatacgcagagcggagaaatggtaattggagaatgagaacaagttgtcgggctcaactctcaaaaatgtggtttcaattatctccgctagtcaattcactgagacaaatgggctcgtcaacctctagtctcctcttttccacaaaggtgtaatatatatattgagtccgtacaacggcctcacattgattctgacaagacaagtatggttatggaaagaattaataaactgtggttgtctcgcagtgcatgataattaccaggatattactctggctggagctaccgagctgcatattcccaagacaggcgaggtaacgtgcatattgcattcgccaatgaggctgcgacatggattctgcatccaacttcataccataaacagagtagacgatttcggtcgacttcaccctatttcaaacaagagcgatgaaaatgtatagtaggtgaatagtttttctagaaatattttgttcagcccagcgacaaaaagctatcgaaagtaaaatgtcgaacttccagtatggtagttcccgaccctgtacctcaattgaaccaatctactggttggtgcgacatgctgcgttgacctgcagaatggtgtaaaattccgtgattattgctatagctcacatacttactaccgtaggtagactaccttttagatgaaaatttctgtatagattttgaggtgcggcagacgacattgagataggatcggcccgatacagagcttcaggtgggcttgacaaccctccagattctttgtcgcagcaatccaatcttcattcagaccaacatgaggtcagatccaacaccatacagttctagtgtgtttacgagttttggttaacgggccccatgaaaggcgtcgaactgatgagataggcgccattgaggcaattagagtcagcagaatggacctcacagcagtgagcggctctggccttgtccaaaggggaaatgcaggcattgcggcgaaaagaccacacatacattagatccagatatatgtgcagtaggtaggtaggccggtgcagaattcatgcaaatagaaccaatagcaaatatatacgatccctgttcaaaaaacgcggattgatgcggggcactgtcttttcttccattgccgttcttcaattgacctcttatcagatcgacccatgtctttcgtcgcctgcaaacatgaccaaaataaaactgtcgataattccagtccacaacctgtaccgctacgactagctaaatacccgtcgactccatacaccactatctctacgctaatgataaggtatctaggtagcttcgcgatacttacgtactacgctcaacttgagccctcagttcataccttgttcatctaaacttacctcattgactgcatggtcttccctcgaggaacatctctcgatcagcgtgagagatttgtcgcaattcgatctcaagtataggtttcgagcctacaaccattgatatgacctgatccagatacgtcccgtggtgtgtaataacctttgcgccggtcaatcaggtctccacgagttctcttaggccgcagtcggaatcttctcctttagacgcatctcctccacctgtagagcttgtaccacttctatccaaactcgcgtcatgggcgcatagtcgctctcgcatcgtgtgcagcgaatctgtagctgtaatatctcatctcgccatgtcctcgccttcttttgggttctcatgggccaagagatcaggctctaccaactcgcgccccgatgagagcagagagtccgttggcgcaatgagccacagccatcacgaatccatccgccctggctcacctcccataaatacgaggcacttttcgccgcctccgaatttgtctgcttaccgggagccgacaaggtccttcgtccctggttctgcgcaggatcatctccgtgcgtcttttggccgctttgactacctgttattgatttgctgacattcatgctcagcccctattgatagtgctagcttcgctagaagtgtccgagaagacactgctgagctagcatcgtatgttttatccgacaagaaagacaagagaaatgcttcatttctccatagacgaccttcgacatcttcccatcacagccatgattttccagctgcccagcgcgaacaggccatcttcgacgatcacttagaagcaacgacggggagaatcgacgaagtttcggaaccatcggggtcaagcagcgaaacagagatagcagaaaatgttgggccttcaatcctatcgcagatgctgagacgatcacccccggaagcgtcattgaatgatgcttccacgaccgacaagcaagctgcatcttcgaagcgccatacgttaccacggtcggagatagcgtccccaatcaatggtactaggggcgatttatcggaaagaactcctctactaggtaacaagtcttccagtcatgtgctgtcggatgacttagaagatgttgaaaaccagaaaccgagggcgaaaggcaggtctaggttgtcggcagcacaagataagctacagaatctcgtggttgtcgcagaccttagaaaatggaacagacgaataatttgggagagagtgatcgtagacccaatacagtgtttaccagctgtcattgtgggattgctgctcaacgtattggacgctttgtcatatggcatgatacttttcccgcttggtaatcccatatttgcaaacctgggtccagctgggatatctatattctatatgagcactattgttgctcaactaacgttctctttcgggagtatatttcggggaggtgtcgggtcggaacttatcgaggtggtcccgttcttccatagcatggcagctacaataacctcgatcgttggtgaagatcaacctgacgccgtgatagcaactacgatcactgccttcgcaatttcgtctttattgacaggtgttgtgttctacctcatggggagacttcagctaggctatattgtcggttttatccctcgtcatattctgatcggctgtatcggcggcgttggctggtttctcattgcgacaggctttgaagtgtcagctcggttgggcgagtttcactacgatcttgaaacggccaaacgactcgctgaggccgatacgcttcctctgtggttgattccgttgggtctggctatcatcctcattctacttcagctgaagatcacatctcgctacttacttcctgcttttatcctcgccattcccattgtcttctacttcttcgtagcctcgctggactctctggatcccgaaaatctacgacaagctgggtggatttttgaggcacctgacgatgatcaaccgtggtggtttttttggaccctgtataaattcgagctagttcattggggcgcgatcgtcgactgcctcggagccatgctcgctctgacatttttcagtatactgcacgtccctataaacgttcctgcgttagcgcagaatgcaggcgaagacaacttggatttgaatcatgaactcaagctccatggctattcgaacttcatttccggcgccgtaggaagcattcaaaactacctggtgttcgcgaataccatattctttatgcggtcaggcggtgacagccgactcgctgggtgtcttctcgcccttctaacgtttgtggtgatgacattgggccctgcaactattggatacatacccgtcatgatggtcggagctctgatctatgtcctcgggttcgagctactgttcgatgcattattgaaaccaaggaaaaagctgaaatgggtagagtatttgactacactggtgatcgtactaactatgggcatctacgacttcgttattggtatatttgttggtatgattcttgcctttgtatccgccattttccatgcgtcacgggtatctgccatccgtgccacctatacaggagatcaagtcggatccatggttcgtcgaaacccttcccaacatcattatctccaagaggttggtacgcaaacatacgtaatcaagctttccgggtttcttttcttcggtacaattgtcggtgtagaagagaaaattcgtgcactcatctccgatgatgcattccaagaacgccccatcagctatgtgattcttgatctttggcatgtaacagggattgactattctggagcggaaggatttagtactctcagcaggttacttcacaacaaaggggtgtccttgctcttgagcggcaaggatgcggacagtagtgtgggcttggacctcagagccgttggactaggttctgatggtattgatgtcaaattcatgccagatctgaactcagcattggaaagttgtgagaacgagcaactcaagaccttttacgctagccaggaggctctaagagtgacccggcctacagctgcgaagactcttgacgtcccacgcgatggacccgttactgttacccatcaaccgttggattacttatcgcattctccaaggaaacaccacctgcatcaagccgcgaagaacgttttaacgcagcaagaaattcggcgggcaactagatggcaaagcatcagcgagcccttgaggctcatgctccaggtattccatgatgtgagtcagaagaacgaagacttctggttccgtgcgaagccctacttcgtacgcaaggaattcgtggaaggcactacattataccaccgtggtgagcaagctaatggcttctacctgctggaaagaggcgaattacatgccgaatacgagactgcccagggtcgcctatcggaacccattgttcagggcactacgtgcggcgaactgccctttttctccgagacggatcgcactgctacggtccgcgctgtcaaagattgcgtggcatgggttatggatacggacagctggaaccgacttcaagctgagaaccaggacgttgcgcaagaactgctccgagtgtctctcaaattgactacagaacgcatgaatgcgatgacgaattatatatcagctgtcgggaactaattaggagagatactttacatggtgtgaaggacgtggacactaaaggatggaggatgtgcaaacagtatgaaaagttgcttacataggtactcatcttaggggcgtttggcagccgtctcttcagggacaattgtaattgttatacaattaagaaaaattgctcttgtgtagcgagacacgacttctatatcttttagtagggtggatctatcaataaactaaagccatgcaggtcttcattgttgactccaacaccaagtccaacatcgccactacctgtaaacgggcaatgttgcggcatcattgtgtggcatgggcaggtagccggcgatggaagacaccaatacgtgtatcatgcggcaggcacaacaaacacaatgccagaatagatgacgcagatggacgaaaagtacgaaaataaatgcaacgcacattgggctcgaaccccttgcacttttaaaaaaagaattcaggcttaagcgcaacctcagtatcctgaaccggaaatgtaaccactcgttcgtgattttccttccgactactttacctctcagccagcatgaccgagcacggg

SEQ ID NO: 8655 - DNA, 645 bp, Muscodor strobelii
  misc_feature: SGI cDNA ID NO. 562674
  misc_feature: Encodes the peptide sequence at SEQ ID NO 8656
atgtatggagatctaggcaacaagcttgtccaacaagcaaagagaactcagaatttagcacatctaccaccataccaaaccgaactcgtccgggccgtcacccgcgaggtacgcgatctggataaagatgttgctagtttgcttgagcccttccaaggttcattcaacccggccgatgatcacgccaccgcttgcaccttgctggtgaatcatttgtctatgcggagaaacaaaagatgtctgctggcctatcaccacacgcgaagtgataggcttgaagaactcgtctggaaaggctatgatgttgtcgatctcgccggtcagcaaacacgagacaacagccgcgtagctaaatccacggcccctgatggcggctcgggtagcttgagcccacaggaagaggactacgtgcgccagtacagtgacctgctcgccgcatacaagggacagtggaccgatatcgatctcactggcagccttgaacccccgcgcgatctgttcatcgatgtacgggtcctcaaggatgctggagagattcaaactgaatatggtgctatcaatttgacgaaaaacagccaattctacgtccgccagggagacgtagaacgcctcattgcccaaggatatcttcagaagctcggctaa

SEQ ID NO: 8656 - protein, 214 aa, Muscodor strobelii
  misc_feature: SGI Peptide ID NO. 562674
  misc_feature (1)..(213): Pfam Id: PF03651 Pfam Desc: Partner of SLD five, PSF1
  misc_feature (129)..(213): Pfam Id: PF03651 Pfam Desc: Partner of SLD five, PSF1
  misc_feature (1)..(105): Pfam Id: PF03651 Pfam Desc: Partner of SLD five, PSF1
  misc_feature (1)..(214): NCBI GI: 116182038 Blast Desc: conserved [Chaetomium globosum CBS 148.51] gi|121790410|sp|Q2HDQ7.1|PSF1_CHAGB RecName: Full=DNA replication complex GINS protein PSF1 gi|88185944|gb|EAQ93412.1| conserved
  misc_feature (1)..(214): NCBI GI: 46108250 Blast Desc: FG01007.1 [Gibberella zeae PH-1] gi|121818127|sp|Q4IP51.1|PSF1_GIBZE RecName: Full=DNA replication complex GINS protein PSF1
  misc_feature (1)..(214): NCBI GI: 85111688 Blast Desc: DNA replication complex GINS protein PSF1 [Neurospora crassa OR74A] gi|74617943|sp|Q7SDH9.1|PSF1_NEUCR RecName: Full=DNA replication complex GINS protein psf-1 DNA replication
  misc_feature (1)..(214): NCBI GI: 171695458 Blast Desc: protein product [Podospora anserina] gi|170947971|emb|CAP60135.1| protein product [Podospora anserina]
  misc_feature (1)..(213): NCBI GI: 156062090 Blast Desc: conserved [Sclerotinia sclerotiorum 1980] gi|154696497|gb|EDN96235.1| conserved [Sclerotinia sclerotiorum 1980]
  misc_feature (1)..(213): NCBI GI: 261356295 Blast Desc: DNA replication complex GINS protein PSF1 [Verticillium albo-atrum VaMs.102]
  misc_feature (10)..(214): NCBI GI: 145614630 Blast Desc: MGG_04434 [Magnaporthe grisea 70-15] gi|145021544|gb|EDK05673.1| MGG_04434 [Magnaporthe grisea 70-15]
  misc_feature (1)..(213): NCBI GI: 261199940 Blast Desc: PSF1 domain-containing protein [Ajellomyces dermatitidis SLH14081] gi|239594579|gb|EEQ77160.1| PSF1 domain-containing protein [Ajellomyces dermatitidis SLH14081]
  misc_feature (1)..(213): NCBI GI: 255947628 Blast Desc: Pc22g05470 [Penicillium chrysogenum Wisconsin 54-1255] gi|211591598|emb|CAP97835.1| Pc22g05470 [Penicillium chrysogenum Wisconsin 54-1255]
  misc_feature (1)..(213): NCBI GI: 119500072 Blast Desc: PSF1 domain protein [Neosartorya fischeri NRRL 181] gi|119414958|gb|EAW24896.1| PSF1 domain protein [Neosartorya fischeri NRRL 181]
MYGDLGNKLVQQAKRTQNLAHLPPYQTELVRAVTREVRDLDKDVASLLEPFQGSFNPADDHATACTLLVNHLSMRRNKRCLLAYHHTRSDRLEELVWKGYDVVDLAGQQTRDNSRVAKSTAPDGGSGSLSPQEEDYVRQYSDLLAAYKGQWTDIDLTGSLEPPRDLFIDVRVLKDAGEIQTEYGAINLTKNSQFYVRQGDVERLIAQGYLQKLG

SEQ ID NO: 8657 - DNA, 7253 bp, Muscodor strobelii; identical to SEQ ID NO: 8654
  misc_feature: SGI EST ID NO. CUFF.21015.3
  misc_feature: Variant of the nucleotide sequence at SEQ ID NO 8655

SEQ ID NO: 8658 - DNA, 1776 bp, Muscodor strobelii
  misc_feature: SGI cDNA ID NO. 562675
  misc_feature: Reduced expression when VOC is produced
  misc_feature: Encodes the peptide sequence at SEQ ID NO 8659
atgtctcaaagaattgccattctctctgtctacgacaagaccggtcttctggacctggccaagggtcttgtgcagcaaaatgtccgcatacttgcctctgggggcactgctcgcatgatccgtgattctggctttcccgtcgaggacatctctgctatcacaaaggctcctgaaatgctgggtggtcgcgtcaagaccttgcacccgtccgtccacgccggcattcttgcccgcaacctcgaatcagacgagaaagacctggccgaacagagcattaacaaagtcgactatgtcatctgcaacctataccctttcaaagacaccgtcgccaagccaaatgtgaccgtccctgaagctgtcgaagagattgatattggcggcgtcaccctcatccgcgcagccgccaagaaccacgctcgcgttacaatcctcagcgacccgaatgactacccggagttccttaaggagttggaaagcggcgagatcaaggaggccagtcgcaaccgatacgctctgaaagcatttgagcacactgcggactacgacacgcacatctcggccttcttccgagctcgctacgccgatggacagcaatacacagctctccgatacggtgcaaacccacatcagaagcctgcctctgcctacacatcctctacggccctccctttcaaagctctctgtggatctcccggatacatcaacctgctggatgccctgaacggctgggctctggtcaaggagctgaagagcgctttgggactgcctgccgctgccagtttcaagcacgtgtcgcctgcaggtgctgccattggtgtacccctaagtgccgacgagcgcaaggtgtactttgtagacgacattcaaggcatcgagacttctgctctcgctcaggcatatgctcgcgctcgtggtgccgaccgcatgagcagcttcggagacttcatcgctctgagtgacgttgtggacgtccccacagctagcatcatctccaaggaggtatcagacggtgttgttgcacccggcttcgaggatgccgctcttgagatcctcaagaagaagaagggtgggaagtacctggtccttcaaatggaccctcagtacgaacccgacacgacggaatctagaacagtgtacggtgtcacactgacccagcaccgtaacgatgccatcatcacccctgcatctttcagtcgaactgtgacaccgaaggacttcacactcccagagtccgcagcccgtgacttgacggtcgcgaccattgctttgaaatacacacaatccaactcagtctgttatgccaaaaacggacaggttgtaggtctcggtgccggacagcaatctcgcatccactgcacacgtctcgccggtgataaggccgacaactggtggcttcgcttccacccacgcgtcatgggaatcaagtggaagaagggcaccaagcgcgccgacaagagcaacgcgattgatttactggttagcggagaactacccaagtctggccccgagagagagggcttcgaggctgtgtttgaggaggtccctgctgctttctccgaggaagagagaagtgagtggctaggcaagttgacggatgttgctgtttccagtgatgctttcttccccttcatcgataacgtctatcgcacctctcgctcaggtgtcaagtacatcgccgcgcctggcggaagccaaaacgattctgccgtcttcgaaacagctgagaagcttggcattgtgtttgtcgaacaaaatattcgtctcttccaccactag

SEQ ID NO: 8659 - protein, 591 aa, Muscodor strobelii
  misc_feature: SGI Peptide ID NO. 562675
  misc_feature (134)..(460): Pfam Id: PF01808 Pfam Desc: AICARFT/IMPCHase bienzyme
  misc_feature (15)..(129): Pfam Id: PF02142 Pfam Desc: MGS-like domain
  misc_feature (2)..(591): NCBI GI: 39944906 Blast Desc: conserved [Magnaporthe grisea 70-15] gi|145021543|gb|EDK05672.1| conserved [Magnaporthe grisea 70-15]
  misc_feature (3)..(591): NCBI GI: 46108174 Blast Desc: FG00969.1 [Gibberella zeae PH-1]
  misc_feature (2)..(591): NCBI GI: 85111684 Blast Desc: bifunctional purine biosynthesis protein [Neurospora crassa OR74A] gi|28925816|gb|EAA34818.1| bifunctional purine biosynthesis protein [Neurospora crassa OR74A]
  misc_feature (2)..(591): NCBI GI: 256734496 Blast Desc: [Nectria haematococca mpVI 77-13-4]
  misc_feature (2)..(591): NCBI GI: 154308558 Blast Desc: BC1G_08339 [Botryotinia fuckeliana B05.10] gi|150852880|gb|EDN28072.1| BC1G_08339 [Botryotinia fuckeliana B05.10]
  misc_feature (3)..(591): NCBI GI: 115398043 Blast Desc: bifunctional purine biosynthesis protein ADE16 [Aspergillus terreus NIH2624] gi|114192804|gb|EAU34504.1| bifunctional purine biosynthesis protein ADE16 [Aspergillus
  misc_feature (3)..(591): NCBI GI: 169773685 Blast Desc: [Aspergillus oryzae RIB40] gi|83769172|dbj|BAE59309.1| protein product [Aspergillus oryzae]
  misc_feature (3)..(591): NCBI GI: 70994557 Blast Desc: phosphoribosylaminoimidazolecarboxamide formyltransferase/IMP cyclohydrolase [Aspergillus fumigatus Af293] gi|66849690|gb|EAL90018.1| formyltransferase/IMP fumigatus
  misc_feature (5)..(591): NCBI GI: 145256962 Blast Desc: An04g02060 [Aspergillus niger] gi|134058484|emb|CAL00693.1| protein product [Aspergillus niger]
  misc_feature (3)..(591): NCBI GI: 238491694 Blast Desc: phosphoribosylaminoimidazolecarboxamide formyltransferase/IMP [Aspergillus flavus NRRL3357] gi|220697497|gb|EED53838.1| formyltransferase/IMP [Aspergillus
  misc_feature (4)..(591): SWISSPROT Homolog: EC 3.5.4.10 IMP cyclohydrolase
  misc_feature (4)..(591): SWISSPROT Homolog: EC 2.1.2.3 Phosphoribosylaminoimidazolecarboxamide formyltransferase
  misc_feature: Useful for introducing or modulating the production of volatile compounds
MSQRIAILSVYDKTGLLDLAKGLVQQNVRILASGGTARMIRDSGFPVEDISAITKAPEMLGGRVKTLHPSVHAGILARNLESDEKDLAEQSINKVDYVICNLYPFKDTVAKPNVTVPEAVEEIDIGGVTLIRAAAKNHARVTILSDPNDYPEFLKELESGEIKEASRNRYALKAFEHTADYDTHISAFFRARYADGQQYTALRYGANPHQKPASAYTSSTALPFKALCGSPGYINLLDALNGWALVKELKSALGLPAAASFKHVSPAGAAIGVPLSADERKVYFVDDIQGIETSALAQAYARARGADRMSSFGDFIALSDVVDVPTASIISKEVSDGVVAPGFEDAALEILKKKKGGKYLVLQMDPQYEPDTTESRTVYGVTLTQHRNDAIITPASFSRTVTPKDFTLPESAARDLTVATIALKYTQSNSVCYAKNGQVVGLGAGQQSRIHCTRLAGDKADNWWLRFHPRVMGIKWKKGTKRADKSNAIDLLVSGELPKSGPEREGFEAVFEEVPAAFSEEERSEWLGKLTDVAVSSDAFFPFIDNVYRTSRSGVKYIAAPGGSQNDSAVFETAEKLGIVFVEQNIRLFHH

SEQ ID NO: 8660 - DNA, 2255 bp, Muscodor strobelii
  misc_feature: SGI EST ID NO. CUFF.20996.0
  misc_feature: Variant of the nucleotide sequence at SEQ ID NO 8658
gagaatctcatccttccaaagtacgtcggaaataatcctcattctgattgatgcctgaagcccgaaaccacgcatcgcagagcagcgtttggaagccattacaatcgctgacgtatcttaggatcgagatagctgtatttcctattgggaggattgccacaaatcgccaacaccatgtctcaaagaattgccattctctctgtctacgacaagaccggtcttctggacctggccaagggtcttgtgcagcaaaatgtccgcatacttgcctctgggggcactgctcgcatgatccgtgattctggctttcccgtcgaggacatctctgctatcacaaaggctcctgaaatgctgggtggtcgcgtcaagaccttgcacccgtccgtccacgccggcattcttgcccgcaacctcgaatcagacgagaaagacctggccgaacagagcattaacaaagtcgactatgtcatctgcaacctataccctttcaaagacaccgtcgccaagccaaatgtgaccgtccctgaagctgtcgaagagattgatattggcggcgtcaccctcatccgcgcagccgccaagaaccacgctcgcgttacaatcctcagcgacccgaatgactacccggagttccttaaggagttggaaagcggcgagatcaaggaggccagtcgcaaccgatacgctctgaaagcatttgagcacactgcggactacgacacgcacatctcggccttcttccgagctcgctacgccgatggacagcaatacacagctctccgatacggtgcaaacccacatcagaagcctgcctctgcctacacatcctctacggccctccctttcaaagctctctgtggatctcccggatacatcaacctgctggatgccctgaacggctgggctctggtcaaggagctgaagagcgctttgggactgcctgccgctgccagtttcaagcacgtgtcgcctgcaggtgctgccattggtgtacccctaagtgccgacgagcgcaaggtgtactttgtagacgacattcaaggcatcgagacttctgctctcgctcaggcatatgctcgcgctcgtggtgccgaccgcatgagcagcttcggagacttcatcgctctgagtgacgttgtggacgtccccacagctagcatcatctccaaggaggtatcagacggtgttgttgcacccggcttcgaggatgccgctcttgagatcctcaagaagaagaagggtgggaagtacctggtccttcaaatggaccctcagtacgaacccgacacgacggaatctagaacagtgtacggtgtcacactgacccagcaccgtaacgatgccatcatcacccctgcatctttcagtcgaactgtgacaccgaaggacttcacactcccagagtccgcagcccgtgacttgacggtcgcgaccattgctttgaaatacacacaatccaactcagtctgttatgccaaaaacggacaggttgtaggtctcggtgccggacagcaatctcgcatccactgcacacgtctcgccggtgataaggccgacaactggtggcttcgcttccacccacgcgtcatgggaatcaagtggaagaagggcaccaagcgcgccgacaagagcaacgcgattgatttactggttagcggagaactacccaagtctggccccgagagagagggcttcgaggctgtgtttgaggaggtccctgctgctttctccgaggaagagagaagtgagtggctaggcaagttgacggatgttgctgtttccagtgatgctttcttccccttcatcgataacgtctatcgcacctctcgctcaggtgtcaagtacatcgccgcgcctggcggaagccaaaacgattctgccgtcttcgaaacagctgagaagcttggcattgtgtttgtcgaacaaaatattcgtctcttccaccactagagaatgacgggagttggcccggataggtcattgggtcaataggtgataaatagatagatatggaaaagtgatgcggatagatacccgaatggtgcttggaaagatgtgccatcgaaaaggaagatagctcaagcttgagcgagcgaagtgacaaaaattaagtctcaaatattgtacgccgctcaacctttgtctgccttcttcgctatgagaaacgtgttcaactattgtgtatcaacttgacggctcatgcttctatctaaatggactcagacgttagcacgaagtcgtcaccaggggtcaaa

SEQ ID NO: 8661 - DNA, 687 bp, Muscodor strobelii
  misc_feature: SGI cDNA ID NO. 562676
  misc_feature: Encodes the peptide sequence at SEQ ID NO 8662
atgggcttcgctgatctgctcaccgatgctggttcggccatgctcaacagctggctgaccacccgatcctacatcgccacttactccccctcccaggccgatgttgccgtgttcaaggccatcagctctgctcctgatgccacaaagtacccccacgccgccagatggtacaagcacatcgcctcgttcgaggacgagttcgccactctccctggcgattcctccaaggcctacactgtctacggacctgatgtcgctgaagtcaccatcaaccccgccacggcacctgacgccgcggatgaagacgacattgacttgttcggctccgacgatgaggaggaggatgctgaggccgtccgcgttcgcgaggagcgcctagctgcttaccacgagaagaaggccgctaagcccaaggttgctgccaagtccatggtcaccttggacatcaagccctgggacgacgagaccgacatgaaggctctcgaggaggccgtccgaggcatcgagcaggatggtctggtctggggtgctgctcagttgcttcctattggttacggtatcaagaagctccagatcaacttcgttgttgaggatgacaaggtctccaccgatgagctgcaggagaagatccaggagtttgaggactacgttcagtccactgatgtcgctgccatgatgaagttgtaa

SEQ ID NO: 8662 - protein, 228 aa, Muscodor strobelii
  misc_feature: SGI Peptide ID NO. 562676
  misc_feature (142)..(228): Pfam Id: PF00736 Pfam Desc: EF-1 guanine nucleotide exchange domain
  misc_feature (1)..(228): NCBI GI: 116200656 Blast Desc: CHGG_10873 [Chaetomium globosum CBS 148.51] gi|88175587|gb|EAQ83055.1| CHGG_10873 [Chaetomium globosum CBS 148.51]
  misc_feature (1)..(228): NCBI GI: 256734457 Blast Desc: NECHADRAFT_102367 [Nectria haematococca mpVI 77-13-4]
  misc_feature (1)..(228): NCBI GI: 261356294 Blast Desc: elongation factor 1-beta [Verticillium albo-atrum VaMs.102]
  misc_feature (1)..(228): NCBI GI: 156053087 Blast Desc: elongation factor 1-beta [Sclerotinia sclerotiorum 1980] gi|154704489|gb|EDO04228.1| elongation factor 1-beta [Sclerotinia sclerotiorum 1980]
  misc_feature (1)..(228): NCBI GI: 171680807 Blast Desc: protein product [Podospora anserina] gi|170940031|emb|CAP65257.1| protein product [Podospora anserina]
  misc_feature (1)..(228): NCBI GI: 85093088 Blast Desc: elongation factor 1-beta [Neurospora crassa OR74A] gi|28921070|gb|EAA30389.1| elongation factor 1-beta [Neurospora crassa OR74A]
  misc_feature (1)..(228): NCBI GI: 27764296 Blast Desc: protein product [Podospora anserina]
  misc_feature (1)..(228): NCBI GI: 256719872 Blast Desc: NECHADRAFT_56718 [Nectria haematococca mpVI 77-13-4]
  misc_feature (1)..(228): NCBI GI: 46108252 Blast Desc: FG01008.1 [Gibberella zeae PH-1]
  misc_feature (1)..(228): NCBI GI: 39944908 Blast Desc: MGG_04436 [Magnaporthe grisea 70-15] gi|59802834|gb|AAX07632.1| elongation factor 1-beta-like protein [Magnaporthe grisea] gi|145021542|gb|EDK05671.1| MGG_04436 grisea
MGFADLLTDAGSAMLNSWLTTRSYIATYSPSQADVAVFKAISSAPDATKYPHAARWYKHIASFEDEFATLPGDSSKAYTVYGPDVAEVTINPATAPDAADEDDIDLFGSDDEEEDAEAVRVREERLAAYHEKKAAKPKVAAKSMVTLDIKPWDDETDMKALEEAVRGIEQDGLVWGAAQLLPIGYGIKKLQINFVVEDDKVSTDELQEKIQEFEDYVQSTDVAAMMKL

SEQ ID NO: 8663 - DNA, 1271 bp, Muscodor strobelii
  misc_feature: SGI EST ID NO. CUFF.21158.2
  misc_feature: Variant of the nucleotide sequence at SEQ ID NO 8661
ctcgtcccaccccctccatctttgcccctctattgcctgcttgggaacctgcctaagggacacgggctggttgctgcgactggcaagtgtgttgctgccgcaaaaaaattcgaaattacctacacatttctcctccagggcccccccacctacccttcttaattccccttccctcttcattctcacaagcttcttttttccgtccttgtcgctcaagataccctttcctcatcaccaataccgatcgatcccttctcattctcacgttcagcttgatcttcttacgtcaaaatgggcttcgctgatctgctcaccgatgctggttcggccatgctcaacagctggctgaccacccgatcctacatcgccacttactccccctcccaggccgatgttgccgtgttcaaggccatcagctctgctcctgatgccacaaagtacccccacgccgccagatggtacaagcacatcgcctcgttcgaggacgagttcgccactctccctggcgattcctccaaggcctacactgtctacggacctgatgtcgctgaagtcaccatcaaccccgccacggcacctgacgccgcggatgaagacgacattgacttgttcggctccgacgatgaggaggaggatgctgaggccgtccgcgttcgcgaggagcgcctagctgcttaccacgagaagaaggccgctaagcccaaggttgctgccaagtccatggtcaccttggacatcaagccctgggacgacgagaccgacatgaaggctctcgaggaggccgtccgaggcatcgagcaggatggtctggtctggggtgctgctcagttgcttcctattggttacggtatcaagaagctccagatcaacttcgttgttgaggatgacaaggtctccaccgatgagctgcaggagaagatccaggagtttgaggactacgttcagtccactgatgtcgctgccatgatgaagttgtaaactcgtaattgtgctggtggaacgactacacgggaggcaagatgtgagagaaatgacactagagccatggcaaatggccaacgaatttgatgaggttgaggattgggctgtggtatcgggcaaaagtcctttcatgagatgaatgctacatagaggccgaaaggtcatgagagaaatgaactacgggaatgtcacaaatacagtaaaataaaaacaactcgtgtctcggctactgttatttttggttttcaagatgcagtgaacccatacattgcggttgacattcatctgca

SEQ ID NO: 8664 - DNA, 2385 bp, Muscodor strobelii
  misc_feature: SGI cDNA ID NO. 562677
  misc_feature: Reduced expression when VOC is produced
  misc_feature: Encodes the peptide sequence at SEQ ID NO 8665
atgcttcctcggcgaaacattgtcgcgtcttcaagacgtttacttgctaccccaacgagacttacacggccagagccaaatacctccattcttgccaggaacgctggcttagccacaccatacaagaacagccgcatcgctctacctatcatagcatcacgaagctatgcacaaggtcgaccacatccacctggcggtacccatcgcatgaacctcggcggcgagcccgagaagcctgcactcgaacaatacggtgttgatctgaccgcaagggcgagagcgggaaagctggaccccgtcattggccgagatgctgagattcaacgcaccattcaggtcctgtccagacgcacgaagaacaacccggtcttgattggaagcgctggcactggcaagacggccgttctcgagggccttgcctctcgcatcgtgcgcggcgatgtgcccgagagtatcaagaacaagcgggtcatcagtctggatctgggtagtctgattgctggcgccaaattcagaggagacttcgaggagcgcttgaaaaaggttctgaccgaggtcgagcaagctgagggacaggttatcctctttatcgatgagctgcatattctactaggcctaggcaaggctgaagggtcgatagatgcctccaatctcctgaagcccgctctgtctagaggcgagctgcagtgctgtggcgctaccactcttgctgagtataggctcatcgagaaggatgtcgccttggctagacggttccaacctatccttgtcaacgaacctagcgtcgaggacacgatcagcattcttaggggcattaaagacaaatacgaagtgcatcatggagttcggatcacagacggagctctggtagctgcagcaacttactctaatcgctacatcaccgaccgttttctacccgacaaggctattgatttgatggacgaagctgcaagttcgctgcgcctacagcaagagagcaaacccgaggacatcatgcgccttgaccagaaaatcatgacaattcagatcgagttggagagcctgcggaaggaaaaggacgtagcgagtcgcgagcgccgtgagaaactcgaggcagacttacaaaggtatcaggaagaggagaaggctcttactgagagatgggataaagagaggggagagattgaagccctgaagaagatccaagaggatctggataaagcacgagttgaactcgagcaagctcaacgggatggtaactttggccgcgcctccgagctacgatttgggctcattcccaacctggaagagaaactaccaaaggagggcgaggactctgatggtcagcgcgcggacactctgatccatgattctgtgacagccgacgatatcgccggtgttgtttctcgagtcaccggcattcctgtatccaagttgacatctggacacatcgagaagctcattcacatggaagacacacttcgagtgtcagtgcgcgggcaagacgaggcattgaaagcagttgcagatgcagttcgaatgcagcgtgcaggcttgagcggcgataaccgtcctctcgcctctttcttcttcttgggtcctaccggagttggtaagacagaactttgcaaaaagctggcaagttttctcttctctaccgagcaagccgtggtcagattcgatatgagcgaattccaggagaaacacacaatctcgaggcttatcggggctccttcgggatatgtgggctatgacgacgctggccaactcactgaagccgtgcgacgaaagccctatgcggttctgctcttcgacgagtttgagaaggcccatcgtgatatctcggctttgctgctacaggtccttgatgaagggtaccttactgatgcacagggccacaaggtcgacttccggaacacgattattgtacttacgtcaaaccttggagccgatattctagtgggagcaaacccaatgcacccatataccgaaacaccagacggcgacatcagccctgatgttcgcaaagctgtacttgacgtcgtagccgcgaactacgcgcccgaattcctgaaccgtatcgactcgttcatcgttttcaaacgccttgctctcgaggcgctacgggatattgtcgatatccggctccgggagctacaacaacggcttgatgacaggcgtatcacgctgaatgttaacgacgagatccgcgtctggcttgcggagcgcggctatgacccaaagtttggcgcacgcccgctgaaccgtctgatcacgacagagattagcaatggactggctgataagattatcaggggagagttgaaacgtggtgacacggctggcgtgagcatcaaggaggacaagagcgggttggaagtctttgcagagaaatctgctgaataa

SEQ ID NO: 8665 - protein, 794 aa, Muscodor strobelii
  misc_feature: SGI Peptide ID NO. 562677
  misc_feature (121)..(314): Pfam Id: PF00004 Pfam Desc: ATPase family associated with various cellular activities (AAA)
  misc_feature (517)..(690): Pfam Id: PF07724 Pfam Desc: ATPase family associated with various cellular activities (AAA)
  misc_feature (10)..(794): NCBI GI: 116182036 Blast Desc: conserved [Chaetomium globosum CBS 148.51] gi|88185943|gb|EAQ93411.1| conserved [Chaetomium globosum CBS 148.51]
  misc_feature (1)..(787): NCBI GI: 256734454 Blast Desc: [Nectria haematococca mpVI 77-13-4]
  misc_feature (5)..(787): NCBI GI: 171695460 Blast Desc: protein product [Podospora anserina] gi|170947972|emb|CAP60136.1| protein product [Podospora anserina]
  misc_feature (1)..(794): NCBI GI: 145614628 Blast Desc: conserved [Magnaporthe grisea 70-15] gi|145021541|gb|EDK05670.1| conserved [Magnaporthe grisea 70-15]
  misc_feature (1)..(788): NCBI GI: 85111686 Blast Desc: heat shock protein 78, mitochondrial precursor [Neurospora crassa OR74A] gi|28925817|gb|EAA34819.1| heat shock protein 78, mitochondrial precursor [Neurospora crassa OR74A]
  misc_feature (15)..(794): NCBI GI: 46108266 Blast Desc: FG01015.1 [Gibberella zeae PH-1]
  misc_feature (35)..(794): NCBI GI: 156053085 Blast Desc: conserved [Sclerotinia sclerotiorum 1980] gi|154704488|gb|EDO04227.1| conserved [Sclerotinia sclerotiorum 1980]
  misc_feature (15)..(790): NCBI GI: 169781534 Blast Desc: [Aspergillus oryzae RIB40] gi|238498322|ref|XP_002380396.1| heat shock protein/chaperonin HSP78, [Aspergillus flavus NRRL3357] gi|83773972|dbj|BAE64097.1|
  misc_feature (14)..(794): NCBI GI: 67517989 Blast Desc: AN1163.2 [Aspergillus nidulans FGSC A4] gi|40747125|gb|EAA66281.1| AN1163.2 [Aspergillus nidulans FGSC A4] gi|259488519|tpe|CBF88019.1| TPA: oligomeric mitochondrial
  misc_feature (15)..(790): NCBI GI: 145239635 Blast Desc: An08g03480 [Aspergillus niger] gi|134076975|emb|CAK45384.1| protein product [Aspergillus niger]
  misc_feature: Useful for introducing or modulating the production of volatile compounds
MLPRRNIVASSRRLLATPTRLTRPEPNTSILARNAGLATPYKNSRIALPIIASRSYAQGRPHPPGGTHRMNLGGEPEKPALEQYGVDLTARARAGKLDPVIGRDAEIQRTIQVLSRRTKNNPVLIGSAGTGKTAVLEGLASRIVRGDVPESIKNKRVISLDLGSLIAGAKFRGDFEERLKKVLTEVEQAEGQVILFIDELHILLGLGKAEGSIDASNLLKPALSRGELQCCGATTLAEYRLIEKDVALARRFQPILVNEPSVEDTISILRGIKDKYEVHHGVRITDGALVAAATYSNRYITDRFLPDKAIDLMDEAASSLRLQQESKPEDIMRLDQKIMTIQIELESLRKEKDVASRERREKLEADLQRYQEEEKALTERWDKERGEIEALKKIQEDLDKARVELEQAQRDGNFGRASELRFGLIPNLEEKLPKEGEDSDGQRADTLIHDSVTADDIAGVVSRVTGIPVSKLTSGHIEKLIHMEDTLRVSVRGQDEALKAVADAVRMQRAGLSGDNRPLASFFFLGPTGVGKTELCKKLASFLFSTEQAVVRFDMSEFQEKHTISRLIGAPSGYVGYDDAGQLTEAVRRKPYAVLLFDEFEKAHRDISALLLQVLDEGYLTDAQGHKVDFRNTIIVLTSNLGADILVGANPMHPYTETPDGDISPDVRKAVLDVVAANYAPEFLNRIDSFIVFKRLALEALRDIVDIRLRELQQRLDDRRITLNVNDEIRVWLAERGYDPKFGARPLNRLITTEISNGLADKIIRGELKRGDTAGVSIKEDKSGLEVFAEKSAE

SEQ ID NO: 8666 - DNA, 2757 bp, Muscodor strobelii
  misc_feature: SGI EST ID NO. CUFF.20913.0
  misc_feature: Variant of the nucleotide sequence at SEQ ID NO 8664
tcgcctcggagctctatctccaaatgtctatttcacttctgctcggattgtgatcaagacatgattgtataattctcttcttgttttaaatttcccttctttctcttttgttgtccctttttgtaccgccataatcaccatgcttcctcggcgaaacattgtcgcgtcttcaagacgtttacttgctaccccaacgagacttacacggccagagccaaatacctccattcttgccaggaacgctggcttagccacaccatacaagaacagccgcatcgctctacctatcatagcatcacgaagctatgcacaaggtcgaccacatccacctggcggtacccatcgcatgaacctcggcggcgagcccgagaagcctgcactcgaacaatacggtgttgatctgaccgcaagggcgagagcgggaaagctggaccccgtcattggccgagatgctgagattcaacgcaccattcaggtcctgtccagacgcacgaagaacaacccggtcttgattggaagcgctggcactggcaagacggccgttctcgagggccttgcctctcgcatcgtgcgcggcgatgtgcccgagagtatcaagaacaagcgggtcatcagtctggatctgggtagtctgattgctggcgccaaattcagaggagacttcgaggagcgcttgaaaaaggttctgaccgaggtcgagcaagctgagggacaggttatcctctttatcgatgagctgcatattctactaggcctaggcaaggctgaagggtcgatagatgcctccaatctcctgaagcccgctctgtctagaggcgagctgcagtgctgtggcgctaccactcttgctgagtataggctcatcgagaaggatgtcgccttggctagacggttccaacctatccttgtcaacgaacctagcgtcgaggacacgatcagcattcttaggggcattaaagacaaatacgaagtgcatcatggagttcggatcacagacggagctctggtagctgcagcaacttactctaatcgctacatcaccgaccgttttctacccgacaaggctattgatttgatggacgaagctgcaagttcgctgcgcctacagcaagagagcaaacccgaggacatcatgcgccttgaccagaaaatcatgacaattcagatcgagttggagagcctgcggaaggaaaaggacgtagcgagtcgcgagcgccgtgagaaactcgaggcagacttacaaaggtatcaggaagaggagaaggctcttactgagagatgggataaagagaggggagagattgaagccctgaagaagatccaagaggatctggataaagcacgagttgaactcgagcaagctcaacgggatggtaactttggccgcgcctccgagctacgatttgggctcattcccaacctggaagagaaactaccaaaggagggcgaggactctgatggtcagcgcgcggacactctgatccatgattctgtgacagccgacgatatcgccggtgttgtttctcgagtcaccggcattcctgtatccaagttgacatctggacacatcgagaagctcattcacatggaagacacacttcgagtgtcagtgcgcgggcaagacgaggcattgaaagcagttgcagatgcagttcgaatgcagcgtgcaggcttgagcggcgataaccgtcctctcgcctctttcttcttcttgggtcctaccggagttggtaagacagaactttgcaaaaagctggcaagttttctcttctctaccgagcaagccgtggtcagattcgatatgagcgaattccaggagaaacacacaatctcgaggcttatcggggctccttcgggatatgtgggctatgacgacgctggccaactcactgaagccgtgcgacgaaagccctatgcggttctgctcttcgacgagtttgagaaggcccatcgtgatatctcggctttgctgctacaggtccttgatgaagggtaccttactgatgcacagggccacaaggtcgacttccggaacacgattattgtacttacgtcaaaccttggagccgatattctagtgggagcaaacccaatgcacccatataccgaaacaccagacggcgacatcagccctgatgttcgcaaagctgtacttgacgtcgtagccgcgaactacgcgcccgaattcctgaaccgtatcgactcgttcatcgttttcaaacgccttgctctcgaggcgctacgggatattgtcgatatccggctccgggagctacaacaacggcttgatgacaggcgtatcacgctgaatgttaacgacgagatccgcgtctggcttgcggagcgcggctatgacccaaagtttggcgcacgcccgctgaaccgtctgatcacgacagagattagcaatggactggctgataagattatcaggggagagttgaaacgtggtgacacggctggcgtgagcatcaaggaggacaagagcgggttggaagtctttgcagagaaatctgctgaataatgttatgaaaagtgtaaaacattgtaatttggtactcggaaaagcattgacggcgcattaagagcgaatgttggcgttttgttacttcattctggacagaacaagagactatacataggcggcgccatctcgactcaatactcattgtttcgattatatacgatgtaaatagatgtaaaaacatgtgagatatatacttgatttcaatcaaaccagcttgattaattgcgcgt

SEQ ID NO: 8667 - DNA, 2955 bp, Muscodor strobelii
  misc_feature: SGI cDNA ID NO. 562678
  misc_feature: Encodes the peptide sequence at SEQ ID NO 8668
atggcaaccgatggacttcgtagaagtaagacaatgttgggcaggtttccaacacggatcaaagattttgtgcatcgtcaccggcgcggcgcaaagagtgagcagcaactgataccgaaagaattagaacagtctgattcatcttccaaccttgcggccgagtcgcgtctcacacagcaagaattactgggactgcaacacgtgcgcagcctttctatccaggttaccctgaattttggtgctccactcagctattcatacagtcgagactacgaaggctcatcttcacttcagccaacagaggaactctgcgaaggacttctacatcatgttgaccattgtgcacgggagcttataacgcgcaaggattcgagtgctctagatcgcacagcaaatgatgggttggcaaagccgatgagatatgcgatacagatacagatcctccggaacgacattgggttcaataccgaaacttgggcttcgagagacttcagatcataccagagacaacccctcaacaccgaggccgccagagaaatcattctatcagtacactccatggttggcctattcatgagatatcacgacgacagcttcgtgtggaaagatgggcctgtacgggatgagccgggacagggaccggagacatttaattaccgacctggaaaggttcagcctttgacttgcataccgcggtcctttttcatcgagaagaagcaggcattcgagtcgattccaggctataccgtcaatttctctgtcactagcaggaatcaccatcgaacctcttctgaatggcacgaaaagatcgaggtcaacagtcagcaaacatcaccacttactcttgcgactgcagaaaacctattcttcgatgcatgttatgccgtggatggcgtcttcagatccgaaagaaagaaactggaggcttcgcacgaaacttgtatcgacccaagtggatgtaagcatggtcgtcatgccgatggcgacggcctgaagatgagcctcacggttagcaacaatcttgggcctgtctttggacacctggagcggacgacacagactagcatgaacgtattttcaaagcctcacttagaagactgcgttgagttcgttgatagagccaaagctgctatcatccaagtccgtcgagatgtggatgtccaactttctcgtatcaacgacttcgagttccggataatagaacttcgcggcagagggtggatattagatgaaccccaagttttccaggtcaaacaaaacagtgctcttagccgtcaaaacacacaagctatcttagaccggctccagacgggtgttgctgatattttgagaggtaacgctattgctgttcgtatgacagctcacaagcgtggtcattttattttcgacaagacgcttgtagcacgagaaccgatcgagaaatcagaaggtcgaagaaagtctcctaataaatccaaagcatatgtcttggaacggctcaagaaacggattgagcgtgatatcgaggcgatatgcaaagacacatgcacaattaccaatcatcagatggaagcaccaacttttgttggacttagttcgccctcacctaaggacagttcacctagaacaggaacaagcttcgtatcgccccggatcctaagcgcccccaatacaccttcggaaagctctggcggcagtcgagagtatttgacaacaaatcttattgaaactcgagaacaccaagctaagaataacgaatcaccatcaacgccgtctggaacggcctcacctatcccgataaggcaacatgctattacattacgagacccagaaactggattacgtatattccctttgtcaccacgcacgacgtttcgagcccatctaagaccctcgagcttccccaacactaagagcaagcttgatacggagaacttgaacccagtgcaattaatattgctacacaacgatcagatgctggacaggccatcaacaacacgagccgcttcagcgccaggcatctatcagaaagaccaagcctctcgtaccgaatcaccagtagagtcttcaggttctacgagaccgcaaaccccaagcctcgaatttgataccagtccatctgtgcgaagtagtctcttggtcacaccgaaaatatacagctcagctggtaacgacgttcgtctttcccctagatctacgcccgacgtggatgggggcgagaatcggtggttcgggaagacatcccatagccgaagaaggtcgttgatgtcacattcagtgtcacattctgaacacgcagagtctttgccgatctgtgagaaggaaatcctcccagatgaaccaaagcaaagccaagagcaagagcaagaatcggatctcgacaacattgagaatatcgatgaaatgccgcacgctgcagatcaggagatcgatgacttaatagctgaaagggggaaagatctgttgtccaataacaagagcacatcaacagtaatactagcaagccctagctcccccagcgagcacgacgctcctgtggaggaggaacaggaattagcgaaggtacagattgaacagagtctttccagccccgccacagaagaattttgccaatccaaacccgacttcgacttctcatccccgccaactgtcacaccaccagacgggagaagcgacgcatctccagtcctcgaaaaaagagaaatcgcagtgataagccctgatccggtagacgacgagtcagctctcagcacaacttcatcaccaccccgtcgccccatgaacctagcgatgcaagagcatcgcaagtccttcgggagcgcgggatatctaggaggatttcacgattcgagattacacggcataggactacgacgtgcgttgatgggtgctaagacgccgcctcctactttgtcgaggcgcggcactttttctaccagtgaggacggggatgagcggcctggcaccactttatga

SEQ ID NO: 8668 - protein, 984 aa, Muscodor strobelii
  misc_feature: SGI Peptide ID NO. 562678
  misc_feature (70)..(513): NCBI GI: 171696156 Blast Desc: protein product [Podospora anserina] gi|170948320|emb|CAP60484.1| protein product [Podospora anserina]
  misc_feature (87)..(513): NCBI GI: 116181684 Blast Desc: CHGG_01470 [Chaetomium globosum CBS 148.51] gi|88185767|gb|EAQ93235.1| CHGG_01470 [Chaetomium globosum CBS 148.51]
  misc_feature (103)..(645): NCBI GI: 145613483 Blast Desc: MGG_01601 [Magnaporthe grisea 70-15] gi|145020552|gb|EDK04681.1| MGG_01601 [Magnaporthe grisea 70-15]
  misc_feature (84)..(517): NCBI GI: 164428708 Blast Desc: NCU00949 [Neurospora crassa OR74A] gi|157072249|gb|EAA35906.2| [Neurospora crassa OR74A]
  misc_feature (71)..(511): NCBI GI: 256734545 Blast Desc: NECHADRAFT_65667 [Nectria haematococca mpVI 77-13-4]
  misc_feature (67)..(595): NCBI GI: 46107200 Blast Desc: FG00483.1 [Gibberella zeae PH-1]
  misc_feature (71)..(557): NCBI GI: 261356075 Blast Desc: conserved [Verticillium albo-atrum VaMs.102]
MATDGLRRSKTMLGRFPTRIKDFVHRHRRGAKSEQQLIPKELEQSDSSSNLAAESRLTQQELLGLQHVRSLSIQVTLNFGAPLSYSYSRDYEGSSSLQPTEELCEGLLHHVDHCARELITRKDSSALDRTANDGLAKPMRYAIQIQILRNDIGFNTETWASRDFRSYQRQPLNTEAAREIILSVHSMVGLFMRYHDDSFVWKDGPVRDEPGQGPETFNYRPGKVQPLTCIPRSFFIEKKQAFESIPGYTVNFSVTSRNHHRTSSEWHEKIEVNSQQTSPLTLATAENLFFDACYAVDGVFRSERKKLEASHETCIDPSGCKHGRHADGDGLKMSLTVSNNLGPVFGHLERTTQTSMNVFSKPHLEDCVEFVDRAKAAIIQVRRDVDVQLSRINDFEFRIIELRGRGWILDEPQVFQVKQNSALSRQNTQAILDRLQTGVADILRGNAIAVRMTAHKRGHFIFDKTLVAREPIEKSEGRRKSPNKSKAYVLERLKKRIERDIEAICKDTCTITNHQMEAPTFVGLSSPSPKDSSPRTGTSFVSPRILSAPNTPSESSGGSREYLTTNLIETREHQAKNNESPSTPSGTASPIPIRQHAITLRDPETGLRIFPLSPRTTFRAHLRPSSFPNTKSKLDTENLNPVQLILLHNDQMLDRPSTTRAASAPGIYQKDQASRTESPVESSGSTRPQTPSLEFDTSPSVRSSLLVTPKIYSSAGNDVRLSPRSTPDVDGGENRWFGKTSHSRRRSLMSHSVSHSEHAESLPICEKEILPDEPKQSQEQEQESDLDNIENIDEMPHAADQEIDDLIAERGKDLLSNNKSTSTVILASPSSPSEHDAPVEEEQELAKVQIEQSLSSPATEEFCQSKPDFDFSSPPTVTPPDGRSDASPVLEKREIAVISPDPVDDESALSTTSSPPRRPMNLAMQEHRKSFGSAGYLGGFHDSRLHGIGLRRALMGAKTPPPTLSRRGTFSTSEDGDERPGTTL

SEQ ID NO: 8669 - DNA, 3417 bp, Muscodor strobelii
  misc_feature: SGI EST ID NO. CUFF.20919.0
  misc_feature: Variant of the nucleotide sequence at SEQ ID NO 8667
gcctactcttttctttgattgtttcttcgggtctgatatcgttgtttcgctctcttctgttccttcgttccatcatagtggcccttctactttccctttcgagctgtgtttttacaggtttgacccctgtagtggcgtggtgtcgcctagatctcattgggccattgaagaaagatggcaaccgatggacttcgtagaagtaagacaatgttgggcaggtttccaacacggatcaaagattttgtgcatcgtcaccggcgcggcgcaaagagtgagcagcaactgataccgaaagaattagaacagtctgattcatcttccaaccttgcggccgagtcgcgtctcacacagcaagaattactgggactgcaacacgtgcgcagcctttctatccaggttaccctgaattttggtgctccactcagctattcatacagtcgagactacgaaggctcatcttcacttcagccaacagaggaactctgcgaaggacttctacatcatgttgaccattgtgcacgggagcttataacgcgcaaggattcgagtgctctagatcgcacagcaaatgatgggttggcaaagccgatgagatatgcgatacagatacagatcctccggaacgacattgggttcaataccgaaacttgggcttcgagagacttcagatcataccagagacaacccctcaacaccgaggccgccagagaaatcattctatcagtacactccatggttggcctattcatgagatatcacgacgacagcttcgtgtggaaagatgggcctgtacgggatgagccgggacagggaccggagacatttaattaccgacctggaaaggttcagcctttgacttgcataccgcggtcctttttcatcgagaagaagcaggcattcgagtcgattccaggctataccgtcaatttctctgtcactagcaggaatcaccatcgaacctcttctgaatggcacgaaaagatcgaggtcaacagtcagcaaacatcaccacttactcttgcgactgcagaaaacctattcttcgatgcatgttatgccgtggatggcgtcttcagatccgaaagaaagaaactggaggcttcgcacgaaacttgtatcgacccaagtggatgtaagcatggtcgtcatgccgatggcgacggcctgaagatgagcctcacggttagcaacaatcttgggcctgtctttggacacctggagcggacgacacagactagcatgaacgtattttcaaagcctcacttagaagactgcgttgagttcgttgatagagccaaagctgctatcatccaagtccgtcgagatgtggatgtccaactttctcgtatcaacgacttcgagttccggataatagaacttcgcggcagagggtggatattagatgaaccccaagttttccaggtcaaacaaaacagtgctcttagccgtcaaaacacacaagctatcttagaccggctccagacgggtgttgctgatattttgagaggtaacgctattgctgttcgtatgacagctcacaagcgtggtcattttattttcgacaagacgcttgtagcacgagaaccgatcgagaaatcagaaggtcgaagaaagtctcctaataaatccaaagcatatgtcttggaacggctcaagaaacggattgagcgtgatatcgaggcgatatgcaaagacacatgcacaattaccaatcatcagatggaagcaccaacttttgttggacttagttcgccctcacctaaggacagttcacctagaacaggaacaagcttcgtatcgccccggatcctaagcgcccccaatacaccttcggaaagctctggcggcagtcgagagtatttgacaacaaatcttattgaaactcgagaacaccaagctaagaataacgaatcaccatcaacgccgtctggaacggcctcacctatcccgataaggcaacatgctattacattacgagacccagaaactggattacgtatattccctttgtcaccacgcacgacgtttcgagcccatctaagaccctcgagcttccccaacactaagagcaagcttgatacggagaacttgaacccagtgcaattaatattgctacacaacgatcagatgctggacaggccatcaacaacacgagccgcttcagcgccaggcatctatcagaaagaccaagcctctcgtaccgaatcaccagtagagtcttcaggttctacgagaccgcaaaccccaagcctcgaatttgataccagtccatctgtgcgaagtagtctcttggtcacaccgaaaatatacagctcagctggtaacgacgttcgtctttcccctagatctacgcccgacgtggatgggggcgagaatcggtggttcgggaagacatcccatagccgaagaaggtcgttgatgtcacattcagtgtcacattctgaacacgcagagtctttgccgatctgtgagaaggaaatcctcccagatgaaccaaagcaaagccaagagcaagagcaagaatcggatctcgacaacattgagaatatcgatgaaatgccgcacgctgcagatcaggagatcgatgacttaatagctgaaagggggaaagatctgttgtccaataacaagagcacatcaacagtaatactagcaagccctagctcccccagcgagcacgacgctcctgtggaggaggaacaggaattagcgaaggtacagattgaacagagtctttccagccccgccacagaagaattttgccaatccaaacccgacttcgacttctcatccccgccaactgtcacaccaccagacgggagaagcgacgcatctccagtcctcgaaaaaagagaaatcgcagtgataagccctgatccggtagacgacgagtcagctctcagcacaacttcatcaccaccccgtcgccccatgaacctagcgatgcaagagcatcgcaagtccttcgggagcgcgggatatctaggaggatttcacgattcgagattacacggcataggactacgacgtgcgttgatgggtgctaagacgccgcctcctactttgtcgaggcgcggcactttttctaccagtgaggacggggatgagcggcctggcaccactttatgacttgggtattcgccctaccacgctgagtggagggccaggggaggaagggcaaatagggtgatgacgagaaccagaagcgagaactttacgaatctctttgggtcatagcgatagagggaccaggggttgcatttgggtatcgtggaaaggagggcatgatatatggcgataaaaaagatataagcatgcatatggctctttaagttcggactattaaatgaggcaattattgttaatttccatactattataaaccttatattattaacggtgtatttacgtacgtaa

SEQ ID NO: 8670 - DNA, 1890 bp, Muscodor strobelii
  misc_feature: SGI cDNA ID NO. 562679
  misc_feature: Encodes the peptide sequence at SEQ ID NO 8671
atgaacgtattttcaaagcctcacttagaagactgcgttgagttcgttgatagagccaaagctgctatcatccaagtccgtcgagatgtggatgtccaactttctcgtatcaacgacttcgagttccggataatagaacttcgcggcagagggtggatattagatgaaccccaagttttccaggtcaaacaaaacagtgctcttagccgtcaaaacacacaagctatcttagaccggctccagacgggtgttgctgatattttgagaggtaacgctattgctgttcgtatgacagctcacaagcgtggtcattttattttcgacaagacgcttgtagcacgagaaccgatcgagaaatcagaaggtcgaagaaagtctcctaataaatccaaagcatatgtcttggaacggctcaagaaacggattgagcgtgatatcgaggcgatatgcaaagacacatgcacaattaccaatcatcagatggaagcaccaacttttgttggacttagttcgccctcacctaaggacagttcacctagaacaggaacaagcttcgtatcgccccggatcctaagcgcccccaatacaccttcggaaagctctggcggcagtcgagagtatttgacaacaaatcttattgaaactcgagaacaccaagctaagaataacgaatcaccatcaacgccgtctggaacggcctcacctatcccgataaggcaacatgctattacattacgagacccagaaactggattacgtatattccctttgtcaccacgcacgacgtttcgagcccatctaagaccctcgagcttccccaacactaagagcaagcttgatacggagaacttgaacccagtgcaattaatattgctacacaacgatcagatgctggacaggccatcaacaacacgagccgcttcagcgccaggcatctatcagaaagaccaagcctctcgtaccgaatcaccagtagagtcttcaggttctacgagaccgcaaaccccaagcctcgaatttgataccagtccatctgtgcgaagtagtctcttggtcacaccgaaaatatacagctcagctggtaacgacgttcgtctttcccctagatctacgcccgacgtggatgggggcgagaatcggtggttcgggaagacatcccatagccgaagaaggtcgttgatgtcacattcagtgtcacattctgaacacgcagagtctttgccgatctgtgagaaggaaatcctcccagatgaaccaaagcaaagccaagagcaagagcaagaatcggatctcgacaacattgagaatatcgatgaaatgccgcacgctgcagatcaggagatcgatgacttaatagctgaaagggggaaagatctgttgtccaataacaagagcacatcaacagtaatactagcaagccctagctcccccagcgagcacgacgctcctgtggaggaggaacaggaattagcgaaggtacagattgaacagagtctttccagccccgccacagaagaattttgccaatccaaacccgacttcgacttctcatccccgccaactgtcacaccaccagacgggagaagcgacgcatctccagtcctcgaaaaaagagaaatcgcagtgataagccctgatccggtagacgacgagtcagctctcagcacaacttcatcaccaccccgtcgccccatgaacctagcgatgcaagagcatcgcaagtccttcgggagcgcgggatatctaggaggatttcacgattcgagattacacggcataggactacgacgtgcgttgatgggtgctaagacgccgcctcctactttgtcgaggcgcggcactttttctaccagtgaggacggggatgagcggcctggcaccactttatga

SEQ ID NO: 8671 - protein, 629 aa, Muscodor strobelii
  misc_feature: SGI Peptide ID NO. 562679
  misc_feature (3)..(158): NCBI GI: 171696156 Blast Desc: protein product [Podospora anserina] gi|170948320|emb|CAP60484.1| protein product [Podospora anserina]
  misc_feature (1)..(158): NCBI GI: 116181684 Blast Desc: CHGG_01470 [Chaetomium globosum CBS 148.51] gi|88185767|gb|EAQ93235.1| CHGG_01470 [Chaetomium globosum CBS 148.51]
  misc_feature (1)..(162): NCBI GI: 164428708 Blast Desc: NCU00949 [Neurospora crassa OR74A] gi|157072249|gb|EAA35906.2| [Neurospora crassa OR74A]
  misc_feature (1)..(290): NCBI GI: 145613483 Blast Desc: MGG_01601 [Magnaporthe grisea 70-15] gi|145020552|gb|EDK04681.1| MGG_01601 [Magnaporthe grisea 70-15]
  misc_feature (3)..(156): NCBI GI: 256734545 Blast Desc: NECHADRAFT_65667 [Nectria haematococca mpVI 77-13-4]
  misc_feature (3)..(240): NCBI GI: 46107200 Blast Desc: FG00483.1 [Gibberella zeae PH-1]
  misc_feature (3)..(160): NCBI GI: 261356075 Blast Desc: conserved [Verticillium albo-atrum VaMs.102]
MNVFSKPHLEDCVEFVDRAKAAIIQVRRDVDVQLSRINDFEFRIIELRGRGWILDEPQVFQVKQNSALSRQNTQAILDRLQTGVADILRGNAIAVRMTAHKRGHFIFDKTLVAREPIEKSEGRRKSPNKSKAYVLERLKKRIERDIEAICKDTCTITNHQMEAPTFVGLSSPSPKDSSPRTGTSFVSPRILSAPNTPSESSGGSREYLTTNLIETREHQAKNNESPSTPSGTASPIPIRQHAITLRDPETGLRIFPLSPRTTFRAHLRPSSFPNTKSKLDTENLNPVQLILLHNDQMLDRPSTTRAASAPGIYQKDQASRTESPVESSGSTRPQTPSLEFDTSPSVRSSLLVTPKIYSSAGNDVRLSPRSTPDVDGGENRWFGKTSHSRRRSLMSHSVSHSEHAESLPICEKEILPDEPKQSQEQEQESDLDNIENIDEMPHAADQEIDDLIAERGKDLLSNNKSTSTVILASPSSPSEHDAPVEEEQELAKVQIEQSLSSPATEEFCQSKPDFDFSSPPTVTPPDGRSDASPVLEKREIAVISPDPVDDESALSTTSSPPRRPMNLAMQEHRKSFGSAGYLGGFHDSRLHGIGLRRALMGAKTPPPTLSRRGTFSTSEDGDERPGTTL

SEQ ID NO: 8672 - DNA, 3417 bp, Muscodor strobelii; identical to SEQ ID NO: 8669
  misc_feature: SGI EST ID NO. CUFF.20919.0
  misc_feature: Variant of the nucleotide sequence at SEQ ID NO 8670

SEQ ID NO: 8673 - DNA, 1779 bp, Muscodor strobelii
  misc_feature: SGI cDNA ID NO. 562680
  misc_feature: Encodes the peptide sequence at SEQ ID NO 8674
atggtcgcaagacaaccagacatgcttctggacgaccagtccgacatcgtgtccagcgaagaagattacggctcatcgagcgacgaagacgtagaactcgcgactggcaagaaaactgttcgcgaaaaggacgaggacgaagaggatcttgagcgcttcgttctcggtgatgctaccaatttccgcgagaacctcttcagagacgactatgcagaggagggacccgaccacggtgggagcaggacgttcgatcacgacgaagcagcaggcgacgaggaattagccgatgccgatttattcacgttcgacgtcgggagaagccctgtagacgacctccagatcaccattgtccccgatgcccaggtctcgcaggccgggcccaaagaggcggcggcatgggaagacagcgacgacgagcgattgacaatctcgctagccaacgtcacccagctgcggaagcttcgtgtcagtgaagccgaggatgtcatcagcggcaccgagtatatatcacgtttaaggcagcagtatttgcgcctcaactctatgcccgactgggcgcgacaggccgaggaaccacctaagaaacgtagacgacgatcttccgcggcgagcactgactctgacgcctcagccgcggagggaggaggcaacggcttcgaacccgatgcattgcctctcaacacgctactccgtgacgccggtgccatcggtacaagcagaaatgcaaagtcaaagaagcttcgccccgaagtcatcgacatacaaagatctcgcgatataccagacgctcacaaagacgtcacatcattagccttccaccccgaataccctgtcctactttcttctagcacgtcttcaatgctctacctgcatcatgttgcgcccaccgcgcacccgaaaccaaaccccatgttaacgtcggcccaagtcaaacaggtggccgtccgacacgccgagttctcctccgacggacgcaagatcttccttgccggtcgtcggaaatacatacactcctgggacatcgagacagggacgatacagaagacgagcaaaattatagggcataaagaagagcagaaaacttgggaacgatttaagctcagcccgtgcgggcgatacctcggtctcatcgcctcgacaaggaaaggcggcggtgttgtgaacgtcttgaacgttcataccatgcaatggattaccgccgccagactagacagtcgaggtggtataatagatttttgctggtggagaacgggaaacggccttacgattctaggcaaaggaggccaagtgggagagtatagtatggtcgcgagacgatttctcgcggtatggaatgatgagggatcgaacggcggcactgctatagctctgggagggaccaatggtcctgatctcctcggtgacgatctatggattgcaataggctctaactcgggcgttgtaaatatctacaatcgccatgccctaatttccccatccgatgaggacgagctaaacatcaagcaacgacccgagccaacccgggccctcatgcaactcactacgcccatcacgacattagctttcagtcccgatgggcagttactcgctgtcgcttcgcggttcaagagagacgctctgaaattggtccatcttcctagctgcacagtttataggaactggcccacggaacagactcctttgggaagaatagatgctatagcattcaacaataagagcgatatagtagccattggcaacgacgctggaaagatcaggatgtgggagattaggagctaa

SEQ ID NO: 8674 - protein, 592 aa, Muscodor strobelii
  misc_feature: SGI Peptide ID NO. 562680
  misc_feature (11)..(592): NCBI GI: 256734544 Blast Desc: NECHADRAFT_32036 [Nectria haematococca mpVI 77-13-4]
  misc_feature (42)..(592): NCBI GI: 46107204 Blast Desc: FG00485.1 [Gibberella zeae PH-1]
  misc_feature (37)..(592): NCBI GI: 85118193 Blast Desc: NCU03018 [Neurospora crassa OR74A] gi|28927212|gb|EAA36168.1| conserved [Neurospora crassa OR74A] gi|38566974|emb|CAE76275.1| conserved [Neurospora crassa]
  misc_feature (42)..(591): NCBI GI: 116181688 Blast Desc: CHGG_01472 [Chaetomium globosum CBS 148.51] gi|88185769|gb|EAQ93237.1| CHGG_01472 [Chaetomium globosum CBS 148.51]
  misc_feature (40)..(592): NCBI GI: 145613479 Blast Desc: MGG_01602 [Magnaporthe grisea 70-15] gi|145020550|gb|EDK04679.1| MGG_01602 [Magnaporthe grisea 70-15]
  misc_feature (19)..(592): NCBI GI: 154318744 Blast Desc: BC1G_02761 [Botryotinia fuckeliana B05.10] gi|150857891|gb|EDN33083.1| BC1G_02761 [Botryotinia fuckeliana B05.10]
  misc_feature (12)..(592): NCBI GI: 156045399 Blast Desc: SS1G_09888 [Sclerotinia sclerotiorum 1980] gi|154694283|gb|EDN94021.1| SS1G_09888 [Sclerotinia sclerotiorum 1980]
  misc_feature (17)..(592): NCBI GI: 261356072 Blast Desc: U3 small nucleolar RNA-associated protein [Verticillium albo-atrum VaMs.102]
  misc_feature (43)..(591): NCBI GI: 171696154 Blast Desc: protein product [Podospora anserina] gi|170948319|emb|CAP60483.1| protein product [Podospora anserina]
  misc_feature (28)..(591): NCBI GI: 255948160 Blast Desc: Pc22g08340 [Penicillium chrysogenum Wisconsin 54-1255] gi|211591864|emb|CAP98122.1| Pc22g08340 [Penicillium chrysogenum Wisconsin 54-1255]
MVARQPDMLLDDQSDIVSSEEDYGSSSDEDVELATGKKTVREKDEDEEDLERFVLGDATNFRENLFRDDYAEEGPDHGGSRTFDHDEAAGDEELADADLFTFDVGRSPVDDLQITIVPDAQVSQAGPKEAAAWEDSDDERLTISLANVTQLRKLRVSEAEDVISGTEYISRLRQQYLRLNSMPDWARQAEEPPKKRRRRSSAASTDSDASAAEGGGNGFEPDALPLNTLLRDAGAIGTSRNAKSKKLRPEVIDIQRSRDIPDAHKDVTSLAFHPEYPVLLSSSTSSMLYLHHVAPTAHPKPNPMLTSAQVKQVAVRHAEFSSDGRKIFLAGRRKYIHSWDIETGTIQKTSKIIGHKEEQKTWERFKLSPCGRYLGLIASTRKGGGVVNVLNVHTMQWITAARLDSRGGIIDFCWWRTGNGLTILGKGGQVGEYSMVARRFLAVWNDEGSNGGTAIALGGTNGPDLLGDDLWIAIGSNSGVVNIYNRHALISPSDEDELNIKQRPEPTRALMQLTTPITTLAFSPDGQLLAVASRFKRDALKLVHLPSCTVYRNWPTEQTPLGRIDAIAFNNKSDIVAIGNDAGKIRMWEIRS

SEQ ID NO: 8675 - DNA, 2238 bp, Muscodor strobelii
  misc_feature: SGI EST ID NO. CUFF.20922.0
  misc_feature: Variant of the nucleotide sequence at SEQ ID NO 8673
ttgtagttcagcaacacaaaccaaaaattccacgatggtcgcaagacaaccagacatgcttctggacgaccagtccgacatcgtgtccagcgaagaagattacggctcatcgagcgacgaagacgtagaactcgcgactggcaagaaaactgttcgcgaaaaggacgaggacgaagaggatcttgagcgcttcgttctcggtgatgctaccaatttccgcgagaacctcttcagagacgactatgcagaggagggacccgaccacggtgggagcaggacgttcgatcacgacgaagcagcaggcgacgaggaattagccgatgccgatttattcacgttcgacgtcgggagaagccctgtagacgacctccagatcaccattgtccccgatgcccaggtctcgcaggccgggcccaaagaggcggcggcatgggaagacagcgacgacgagcgattgacaatctcgctagccaacgtcacccagctgcggaagcttcgtgtcagtgaagccgaggatgtcatcagcggcaccgagtatatatcacgtttaaggcagcagtatttgcgcctcaactctatgcccgactgggcgcgacaggccgaggaaccacctaagaaacgtagacgacgatcttccgcggcgagcactgactctgacgcctcagccgcggagggaggaggcaacggcttcgaacccgatgcattgcctctcaacacgctactccgtgacgccggtgccatcggtacaagcagaaatgcaaagtcaaagaagcttcgccccgaagtcatcgacatacaaagatctcgcgatataccagacgctcacaaagacgtcacatcattagccttccaccccgaataccctgtcctactttcttctagcacgtcttcaatgctctacctgcatcatgttgcgcccaccgcgcacccgaaaccaaaccccatgttaacgtcggcccaagtcaaacaggtggccgtccgacacgccgagttctcctccgacggacgcaagatcttccttgccggtcgtcggaaatacatacactcctgggacatcgagacagggacgatacagaagacgagcaaaattatagggcataaagaagagcagaaaacttgggaacgatttaagctcagcccgtgcgggcgatacctcggtctcatcgcctcgacaaggaaaggcggcggtgttgtgaacgtcttgaacgttcataccatgcaatggattaccgccgccagactagacagtcgaggtggtataatagatttttgctggtggagaacgggaaacggccttacgattctaggcaaaggaggccaagtgggagagtatagtatggtcgcgagacgatttctcgcggtatggaatgatgagggatcgaacggcggcactgctatagctctgggagggaccaatggtcctgatctcctcggtgacgatctatggattgcaataggctctaactcgggcgttgtaaatatctacaatcgccatgccctaatttccccatccgatgaggacgagctaaacatcaagcaacgacccgagccaacccgggccctcatgcaactcactacgcccatcacgacattagctttcagtcccgatgggcagttactcgctgtcgcttcgcggttcaagagagacgctctgaaattggtccatcttcctagctgcacagtttataggaactggcccacggaacagactcctttgggaagaatagatgctatagcattcaacaataagagcgatatagtagccattggcaacgacgctggaaagatcaggatgtgggagattaggagctaaagcagtggtattaacagtattatactaccaaatttttcaagaggaagcctgcaatatgcctattattatgcaatattttcgtcttcgtagtagagaatgctaaagaatggaggctttgagaactcggagtgacacccaaagtacccctgtacataaagagcccccattaaggttactttgccgcccaacttgcacaagtcccgtcctgaccgccgcatgaaagccgcatgaaatgggccacgacaccaaatcaaaagacaccgcgtagatgtctggtactagacgccattcgctatgcggaaagggttgtatgtacacatgttcgatccttgtaggtagctgtgtttgatcgaatcagcattggaatttaccttgttgtcatgccacctcagctcagcccaaagaggtcaacaagactgccggct

SEQ ID NO: 8676 - DNA, 2331 bp, Muscodor strobelii
  misc_feature: SGI cDNA ID NO. 562681
  misc_feature: Encodes the peptide sequence at SEQ ID NO 8677
atgcaaagcctaagatttatgagcggccgcttgaggcaacgggtcggtggttgtcgttctttcaatactcctaagacccatcttacctcaaatcgcgcccgcttctccacggccggcttgaaagatatactgcgggtatccgaagaggtcacagaagcactcgctaccgacaaaccagtagtagcgctggagtccacgatatacacacatggagctctggggaatgatctggacctagaaggcattgttcgaaggaatggaggtgtccctgcagtgtgcggtatcttaggtggcgtgccaattgttggcctcactcctgatgaagtagcccgcatggtcgaaggctctccaaagaaggcatctcgcagagatctcgcctatatcataggatctggtatgaggggcaaagagatcaacggcggtactactattgccgggacaatgattctgtcaagattagctggaatacgagtctttggcactggagggcttggaggagttcatagaggcggtcacatttccttcgatattagtgccgacttgacagagcttggaaggacgcgagtggcagtcgtctcttctggcagcaaagggttcttagacattccgaggactcttgaatacttggaaacgcagggtgtcatggtctcgacatttgctgatggtaggattggcgacgttgacctccccgcgttctgggcaagagagagcgggataaagagccctttcgtggtagaagatgaagcacatgctgcagcaatctttctcgcgcaagaaaggttgaacgttgaaacgggcatgttatttactaaccctatcccggaagaatattccatccctcgtgatgagatggatgtcgtcatcgagcaagcagtacgcgagtcggacgaacagggtgctcgtggctggcagaatacgccatttatcttgaaacgaatccgagagctcacaagtgatagaagcacagctgccaacaagtttttggtgcgagctaacgtggagcgagctaccaaagttgcgacggaaatttctaagatgatcgagaacccatcgacactcgacacaccggcacagcagtggagctataacgtagatatcccaaagagccaaaaggttgcggcaacagaggccacatctacagtcgacatcgttgttgctggttcggttgccgtagatttgagctgcgactataatggtgtagactcccgcgaccatccatcaccgcaccccaacacgtcaaatccggcgcgagtcacacagtcaataggaggcgtgggccgtaatgtagcacttgcagctcacaaaatcaataagcatacaaaagtacaactctatagcatggttggcgatgacctggccggatcgactgtactagcttctctagaatcgtgcggaatggacgtaacccgtattgaacgtttatctcaagacaagcacccaaagagtcggacggcgcagtacgtctccgtcaatgatgcgaacaaagatcttgtgcttgcgatggcggacatggatatcttcacttctcagtccttttcgcctgcgtgggcatcggcgatgaaaacctccaacccgaaatggcttgtggtcgacgccaactggcgagatcgcgatgtaagatcatggatgcagacgggaaagcaatatggagcacatgttgcctttgagccagtatcaagagagaagtctacgcggcttttctgtgtggagaaaggacttgacgctttaggggtgtttcctcatgccactgttgatctcacaacccctaatcaatacgaactggccgcgatgcacgcagctgctcaatccaatgagtatttcgatgacccacgatggtggcagattatcgacgcctttggaatgagaggtgcaagagatcgcttcgttaaactaacgtctgctggtatgacggatgcgggcattccacagcaggctgtccgattgctcccttatatcccgacgatcatcacgaagatgggcagtgatggagccctcttgactacgattcttaggaaagacgaccctcgactctataatacagcccacgagccattcatcctttcaaggtgtgtcaatgaccatccagacgttggaggcgtgtacatgcgactatatccttctatcgagcaagtcccagacattgtgtctgtcaatggcgttggggacacgttcctgggcgcgcttatcgcgggcctctctcagggaggacgagttgagaatctaatcgatgtggcccagaaagctgctgtattaacattgcgtagctctgagtctgtgagtgagaggttaggttctttggagagcgagctgatcatggctgcgtctctctaa

SEQ ID NO: 8677 - protein, 776 aa, Muscodor strobelii
  misc_feature: SGI Peptide ID NO. 562681
  misc_feature (48)..(343): Pfam Id: PF04227 Pfam Desc: Indigoidine synthase A like protein
  misc_feature (385)..(766): Pfam Id: PF00294 Pfam Desc: pfkB family carbohydrate kinase
  misc_feature (385)..(473): Pfam Id: PF00294 Pfam Desc: pfkB family carbohydrate kinase
  misc_feature (651)..(766): Pfam Id: PF00294 Pfam Desc: pfkB family carbohydrate kinase
  misc_feature (6)..(773): NCBI GI: 85118202 Blast Desc: NCU03020 [Neurospora crassa OR74A] gi|28927214|gb|EAA36170.1| NCU03020 [Neurospora crassa OR74A] gi|38566972|emb|CAE76273.1| conserved [Neurospora crassa]
  misc_feature (1)..(775): NCBI GI: 46107206 Blast Desc: FG00486.1 [Gibberella zeae PH-1]
  misc_feature (36)..(759): NCBI GI: 256734544 Blast Desc: NECHADRAFT_32036 [Nectria haematococca mpVI 77-13-4]
  misc_feature (44)..(770): NCBI GI: 171696150 Blast Desc: protein product [Podospora anserina] gi|170948317|emb|CAP60481.1| protein product [Podospora anserina]
  misc_feature (24)..(770): NCBI GI: 261356057 Blast Desc: IdgA domain-containing protein [Verticillium albo-atrum VaMs.102]
  misc_feature (26)..(760): NCBI GI: 145613479 Blast Desc: MGG_01602 [Magnaporthe grisea 70-15] gi|145020550|gb|EDK04679.1| MGG_01602 [Magnaporthe grisea 70-15]
  misc_feature (148)..(770): NCBI GI: 116181698 Blast Desc: CHGG_01477 [Chaetomium globosum CBS 148.51] gi|88185774|gb|EAQ93242.1| CHGG_01477 [Chaetomium globosum CBS 148.51]
  misc_feature (34)..(768): NCBI GI: 115400715 Blast Desc: conserved [Aspergillus terreus NIH2624] gi|114191612|gb|EAU33312.1| conserved [Aspergillus terreus NIH2624]
  misc_feature (18)..(766): NCBI GI: 238501912 Blast Desc: IdgA domain protein [Aspergillus flavus NRRL3357] gi|220692427|gb|EED48774.1| IdgA domain protein [Aspergillus flavus NRRL3357]
  misc_feature (18)..(766): NCBI GI: 169769442 Blast Desc: [Aspergillus oryzae RIB40] gi|83767049|dbj|BAE57189.1| protein product [Aspergillus oryzae]
  misc_feature (39)..(766): SWISSPROT Homolog: EC 2.7.1.83 Pseudouridine kinase
MQSLRFMSGRLRQRVGGCRSFNTPKTHLTSNRARFSTAGLKDILRVSEEVTEALATDKPVVALESTIYTHGALGNDLDLEGIVRRNGGVPAVCGILGGVPIVGLTPDEVARMVEGSPKKASRRDLAYIIGSGMRGKEINGGTTIAGTMILSRLAGIRVFGTGGLGGVHRGGHISFDISADLTELGRTRVAVVSSGSKGFLDIPRTLEYLETQGVMVSTFADGRIGDVDLPAFWARESGIKSPFVVEDEAHAAAIFLAQERLNVETGMLFTNPIPEEYSIPRDEMDVVIEQAVRESDEQGARGWQNTPFILKRIRELTSDRSTAANKFLVRANVERATKVATEISKMIENPSTLDTPAQQWSYNVDIPKSQKVAATEATSTVDIVVAGSVAVDLSCDYNGVDSRDHPSPHPNTSNPARVTQSIGGVGRNVALAAHKINKHTKVQLYSMVGDDLAGSTVLASLESCGMDVTRIERLSQDKHPKSRTAQYVSVNDANKDLVLAMADMDIFTSQSFSPAWASAMKTSNPKWLVVDANWRDRDVRSWMQTGKQYGAHVAFEPVSREKSTRLFCVEKGLDALGVFPHATVDLTTPNQYELAAMHAAAQSNEYFDDPRWWQIIDAFGMRGARDRFVKLTSAGMTDAGIPQQAVRLLPYIPTIITKMGSDGALLTTILRKDDPRLYNTAHEPFILSRCVNDHPDVGGVYMRLYPSIEQVPDIVSVNGVGDTFLGALIAGLSQGGRVENLIDVAQKAAVLTLRSSESVSERLGSLESELIMAASL

SEQ ID NO: 8678 - DNA, 2779 bp, Muscodor strobelii
  misc_feature: SGI EST ID NO. CUFF.20929.0
  misc_feature: Variant of the nucleotide sequence at SEQ ID NO 8676
ggggtctgaaggaaactgcgcgacggcaaatatttccgacctcaacgtttacgagactatcgtcttctcaagattagccattttcatatctccctatgatcaacaaagcaccatagcgcacgtatttgatgtgcatgattgtcttgtatttaaagttcatataaatatgtggcataaaacgtgcgcgcagttgttgagcgattgtgtgggcttgtagctcacggaccaccatacttagttcttgatcaccctgctcatcggcaaactactgagtatcttcatgatctctaagttgtcctgctctaggtcatcgatcacatcgcttcgaccatgcaaagcctaagatttatgagcggccgcttgaggcaacgggtcggtggttgtcgttctttcaatactcctaagacccatcttacctcaaatcgcgcccgcttctccacggccggcttgaaagatatactgcgggtatccgaagaggtcacagaagcactcgctaccgacaaaccagtagtagcgctggagtccacgatatacacacatggagctctggggaatgatctggacctagaaggcattgttcgaaggaatggaggtgtccctgcagtgtgcggtatcttaggtggcgtgccaattgttggcctcactcctgatgaagtagcccgcatggtcgaaggctctccaaagaaggcatctcgcagagatctcgcctatatcataggatctggtatgaggggcaaagagatcaacggcggtactactattgccgggacaatgattctgtcaagattagctggaatacgagtctttggcactggagggcttggaggagttcatagaggcggtcacatttccttcgatattagtgccgacttgacagagcttggaaggacgcgagtggcagtcgtctcttctggcagcaaagggttcttagacattccgaggactcttgaatacttggaaacgcagggtgtcatggtctcgacatttgctgatggtaggattggcgacgttgacctccccgcgttctgggcaagagagagcgggataaagagccctttcgtggtagaagatgaagcacatgctgcagcaatctttctcgcgcaagaaaggttgaacgttgaaacgggcatgttatttactaaccctatcccggaagaatattccatccctcgtgatgagatggatgtcgtcatcgagcaagcagtacgcgagtcggacgaacagggtgctcgtggctggcagaatacgccatttatcttgaaacgaatccgagagctcacaagtgatagaagcacagctgccaacaagtttttggtgcgagctaacgtggagcgagctaccaaagttgcgacggaaatttctaagatgatcgagaacccatcgacactcgacacaccgtgagctttgggctctcttgtatacttcatgggctagtctgaccgatcaggattagggcacagcagtggagctataacgtagatatcccaaagagccaaaaggttgcggcaacagaggccacatctacagtcgacatcgttgttgctggttcggttgccgtagatttgagctgcgactataatggtgtagactcccgcgaccatccatcaccgcaccccaacacgtcaaatccggcgcgagtcacacagtcaataggaggcgtgggccgtaatgtagcacttgcagctcacaaaatcaataagcatacaaaagtacaactctatagcatggttggcgatgacctggccggatcgactgtactagcttctctagaatcgtgcggaatggacgtaacccgtattgaacgtttatctcaagacaagcacccaaagagtcggacggcgcagtacgtctccgtcaatgatgcgaacaaagatcttgtgcttgcgatggcggacatggatatcttcacttctcagtccttttcgcctgcgtgggcatcggcgatgaaaacctccaacccgaaatggcttgtggtcgacgccaactggcgagatcgcgatgtaagatcatggatgcagacgggaaagcaatatggagcacatgttgcctttgagccagtatcaagagagaagtctacgcggcttttctgtgtggagaaaggacttgacgctttaggggtgtttcctcatgccactgttgatctcacaacccctaatcaatacgaactggccgcgatgcacgcagctgctcaatccaatgagtatttcgatgacccacgatggtggcagattatcgacgcctttggaatgagaggtgcaagagatcgcttcgttaaactaacgtctgctggtatgacggatgcgggcattccacagcaggctgtccgattgctcccttatatcccgacgatcatcacgaagatgggcagtgatggagccctcttgactacgattcttaggaaagacgaccctcgactctataatacagcccacgagccattcatcctttcaaggtgtgtcaatgaccatccagacgttggaggcgtgtacatgcgactatatccttctatcgagcaagtcccagacattgtgtctgtcaatggcgttggggacacgttcctgggcgcgcttatcgcgggcctctctcagggaggacgagttgagaatctaatcgatgtggcccagaaagctgctgtattaacattgcgtagctctgagtctgtgagtgagaggttaggttctttggagagcgagctgatcatggctgcgtctctctaatcagatcaatataatttgactaataatacaaacacaaaaatataagccaaagtcacaaatgt

SEQ ID NO: 8679 - DNA, 687 bp, Muscodor strobelii
  misc_feature: SGI cDNA ID NO. 562682
  misc_feature: Encodes the peptide sequence at SEQ ID NO 8680
atgaaaattacgcgtttcaccatttcactagtccatcaacgatattttgctgcaatcgatgcgccacagccctacacgcctttaggcggagacattctcgaagtcgcattggatgtctctgccgatggcaaactgaatcaacctccgtacaaggcggatagcccaagtttgatccataatatcaccatcttcctccatagctacgacacaggtagaaacttcaccatcacgaatggtacagcgaccgacaacaacgcaactctcggcgatatcctgctgtcggagcctgggtcaacagtgaagcatgtaaagtggacgtggccccaatgtttgatcggcgacggcaagtctgacaataacgaccgtggaaactacaatatttccatccgacagaatttccggttaaacgacgaagaacattataccattttcgatctcccgatatccgtgaccaacactatcaatttcgtgggcaacaatgcagactgcgactcgatcaataatccattgctcgcgcctgaagacattgactacaatgagacgaacagcgtcggggttctgtttgcgccgagtgatgcgacggtcgtccaacaaacgactgggcaaggtgcaaaacttgagagagactggagttctgccatcgcgagtttgactacagttctagccgtgatcttcgtatatatctga

SEQ ID NO: 8680 - protein, 228 aa, Muscodor strobelii
  misc_feature: SGI Peptide ID NO. 562682
  misc_feature (19)..(225): NCBI GI: 116181694 Blast Desc: CHGG_01475 [Chaetomium globosum CBS 148.51] gi|88185772|gb|EAQ93240.1| CHGG_01475 [Chaetomium globosum CBS 148.51]
  misc_feature (16)..(197): NCBI GI: 171696152 Blast Desc: protein product [Podospora anserina] gi|170948318|emb|CAP60482.1| protein product [Podospora anserina]
  misc_feature (27)..(197): NCBI GI: 261356068 Blast Desc: conserved [Verticillium albo-atrum VaMs.102]
  misc_feature (16)..(227): NCBI GI: 154318732 Blast Desc: BC1G_02755 [Botryotinia fuckeliana B05.10] gi|150857885|gb|EDN33077.1| BC1G_02755 [Botryotinia fuckeliana B05.10]
  misc_feature (6)..(194): NCBI GI: 46107208 Blast Desc: FG00487.1 [Gibberella zeae PH-1]
  misc_feature (20)..(197): NCBI GI: 145613477 Blast Desc: MGG_01603 [Magnaporthe grisea 70-15] gi|145020549|gb|EDK04678.1| MGG_01603 [Magnaporthe grisea 70-15]
  misc_feature (11)..(173): NCBI GI: 115433717 Blast Desc: conserved [Aspergillus terreus NIH2624] gi|114189847|gb|EAU31547.1| conserved [Aspergillus terreus NIH2624]
  misc_feature (4)..(129): NCBI GI: 38566973 Blast Desc: [Neurospora crassa]
  misc_feature (16)..(174): NCBI GI: 121712936 Blast Desc: conserved [Aspergillus clavatus NRRL 1] gi|119402232|gb|EAW12653.1| conserved [Aspergillus clavatus NRRL 1]
  misc_feature (17)..(136): NCBI GI: 156045387 Blast Desc: SS1G_09882 [Sclerotinia sclerotiorum 1980] gi|154694277|gb|EDN94015.1| SS1G_09882 [Sclerotinia sclerotiorum 1980]
MKITRFTISLVHQRYFAAIDAPQPYTPLGGDILEVALDVSADGKLNQPPYKADSPSLIHNITIFLHSYDTGRNFTITNGTATDNNATLGDILLSEPGSTVKHVKWTWPQCLIGDGKSDNNDRGNYNISIRQNFRLNDEEHYTIFDLPISVTNTINFVGNNADCDSINNPLLAPEDIDYNETNSVGVLFAPSDATVVQQTTGQGAKLERDWSSAIASLTTVLAVIFVYI

SEQ ID NO: 8681 - DNA, 3252 bp, Muscodor strobelii
  misc_feature: SGI EST ID NO. CUFF.20961.2
  misc_feature: Variant of the nucleotide sequence at SEQ ID NO 8679
accagtttacggttcgacgtcacaacccctaactttccagcaaaccggtacgcacgtttatcaaacacattctcgtcgagcgtacaatgcagcaacctcccgcacttcactcgcagaaagttgaatcttgacatgaaaattacgcgtttcaccatttcactagtccatcaacgatattttgctgcaagtaagtgccacactgggccatcactagatattatatacattgcatccagcactgcatgacccgatgcgaacctattttacatctatagttctttcttttctttgcgcaacctgtcatgcgaatgattttgtgatatcgaatggccaaatttttacacctggctttgccatagtcgatgcgccacagccctacacgcctttaggcggagacattctcgaagtcgcattggatgtctctgccgatggcaaactgaatcaacctccgtacaaggcggatagcccaagtttgatccataatatcaccatcttcctccatagctacgacacaggtagaaacttcaccatcacgaatggtacagcgaccgacaacaacgcaactctcggcgatatcctgctgtcggagcctgggtcaacagtgaagcatgtaaagtggacgtggccccaatgtttgatcggcgacggcaagtctgacaataacgaccgtggaaactacaatatttccatccgacagaatttccggttaaacgacgaagaacattataccattttcgatctcccgatatccgtgaccaacactatcaatttcgtgggcaacaatgcagactgcgactcgatcaataatccattgctcgcgcctgaagacattgactacaatgagacgaacagcgtcggggttctgtttgcgccgagtgatgcgacggtcgtccaacaaacgactgggcaaggtgcaaaacttgagagagactggagttctgccatcgcgagtttgactacagttctagccgtgatcttcgtatatatctgatgttcaacgttccgttcaacgttgcgcacgaccatacaaccaggaagacgtgaaatatgaaatttaacccctatttaatccctttctggtactatcgccaattccttcagtttctatgatgttactagggttgggttaaataccaagaatggcatacaacgagacgttgacggtggatgtagcagcatttccgcaattagtaaccttttcacctttcttattatgaggactttgcagtaggaacgtagaaataatattagatgacgtttttccggcctcagaatccttttacgatgcagagcttgtctattctagggactaagcatcttggagcaccctggttcccccggcgcgcctaagcaagctactgcattcctaagacttgctccccgcatatcaacctcagctgtcatccagcaccttgtcatcagcatacgagaagcctcggcaactaggttcatgcggggagcggtcagttttaccatcaaaatggattcgatgatcaattgtgatgcagggtcttgaattcaatcataaatgttttcaagagaaaagcggatgtatctgattcctttctctcccccatccgaatcagcatatttaaccactacgcgtgaggaattctccgtttccgatccggagtagggaagtctaaggatttggcaactgaaaaggaagactaactggagtccaaaatgcctattcataaaggcttcctgccccgcgaaggtctcacggccgacccgattttcaagttgatcggccggaccgccttaaatccaatcctcctattgccccttttactcgcggcaaagtttaccaagaagggcgaggatctgactatgctacatcccacggctttctcgcgcgtcaagaccctcttctacatcggtctcgtccgtttcttgtcgggctacctatctgatggcgttgtcaacaactggaccaaggatatttatgactggcccaatgagattgctgtggttacaggaggttccggcggaattggcggacatgtggtgaaacttctggcagagcgaggaacccaggttgtggtattggacatcatccccatgacattcgaagcaggccccaaagtgcactattacaagtgtgatataacatcaatcgccagccttgcagaagttgcaaagaagattcgtgcagaagtcggggagccgacgatcctgatcaacaatgcaggtgttgcccgaggaaagagtatactagagacaagtgaaaaggacctaaagttcacattcgacgtcaacacgttcgcgcattacaacacggtaaaggagtttcttcctgcaatgattaagaaggatcatggcatggtagtgaccgtggcttcatatgcagcttggctacccgtgccaaatatggtggactattcaatgtccaaatcggcagcccatgcgtttcacgagggtctctctgctgagcttaaaacaagatacaatgcgcctaaagtcagaacagtcctggtaaaccaaggctatactaaaactccgttgttcactggatacaagaacgacgcaggtttcctggttccctcgctcgaacctgagtctgtggcagatgcgatctgcaagcaggttttcactggccgaagtggtcaggtcattatgccgacgttcggaagatccttacaacttctccaagcgatgcctcactggtatgcgtaccgtctccgcacagattcgaaggatatcatgtcgaactggaacggccgacaggtagttaaggatctcgataaattctacacggataaggacaaagaacttgaaaaggctggctctgatgttgaaggcagtacggtgctagtaccagaggcagaatgagaaatatcgatgtgccagatccgaaattttacttctcaagctagatgaagccggttcagtctaaatgcttgtattgccgcggattcatataaatgttaggatgtctgtgtccttgagacgcgatagctcgagaagcgtatattcaattattgttaagagatgtgcaggattcgatatgctacatgtatgcttatgtgtatgtgaagtgtcacaacacatttcgtaggatgtgcacataattggatccacgcgtcttcagttcattccaagaatacataagagaccaattcgcgccacacgatgtgacgcgtgaaacacttaaagaagcaaatatttcagttagggactgcagcagcctatcgttcctaagaaagactcgcagaagaatgtcagtttaggatggttgtcagtactgtc

SEQ ID NO: 8682 - DNA, 1149 bp, Muscodor strobelii
  misc_feature: SGI cDNA ID NO. 562683
  misc_feature: Encodes the peptide sequence at SEQ ID NO 8683
atgcctattcataaaggcttcctgccccgcgaaggtctcacggccgacccgattttcaagttgatcggccggaccgccttaaatccaatcctcctattgccccttttactcgcggcaaagtttaccaagaagggcgaggatctgactatgctacatcccacggctttctcgcgcgtcaagaccctcttctacatcggtctcgtccgtttcttgtcgggctacctatctgatggcgttgtcaacaactggaccaaggatatttatgactggcccaatgagattgctgtggttacaggaggttccggcggaattggcggacatgtggtgaaacttctggcagagcgaggaacccaggttgtggtattggacatcatccccatgacattcgaagcaggccccaaagtgcactattacaagtgtgatataacatcaatcgccagccttgcagaagttgcaaagaagattcgtgcagaagtcggggagccgacgatcctgatcaacaatgcaggtgttgcccgaggaaagagtatactagagacaagtgaaaaggacctaaagttcacattcgacgtcaacacgttcgcgcattacaacacggtaaaggagtttcttcctgcaatgattaagaaggatcatggcatggtagtgaccgtggcttcatatgcagcttggctacccgtgccaaatatggtggactattcaatgtccaaatcggcagcccatgcgtttcacgagggtctctctgctgagcttaaaacaagatacaatgcgcctaaagtcagaacagtcctggtaaaccaaggctatactaaaactccgttgttcactggatacaagaacgacgcaggtttcctggttccctcgctcgaacctgagtctgtggcagatgcgatctgcaagcaggttttcactggccgaagtggtcaggtcattatgccgacgttcggaagatccttacaacttctccaagcgatgcctcactggtatgcgtaccgtctccgcacagattcgaaggatatcatgtcgaactggaacggccgacaggtagttaaggatctcgataaattctacacggataaggacaaagaacttgaaaaggctggctctgatgttgaaggcagtacggtgctagtaccagaggcagaatga

SEQ ID NO: 8683 - protein, 382 aa, Muscodor strobelii
  misc_feature: SGI Peptide ID NO. 562683
  misc_feature (93)..(252): Pfam Id: PF00106 Pfam Desc: short chain dehydrogenase
  misc_feature (130)..(252): Pfam Id: PF00106 Pfam Desc: short chain dehydrogenase
  misc_feature (93)..(122): Pfam Id: PF00106 Pfam Desc: short chain dehydrogenase
  misc_feature (95)..(204): Pfam Id: PF01370 Pfam Desc: NAD dependent epimerase/dehydratase family
  misc_feature (1)..(378): NCBI GI: 261356069 Blast Desc: dehydrogenase/reductase SDR family member 8 [Verticillium albo-atrum VaMs.102]
  misc_feature (1)..(357): NCBI GI: 154318734 Blast Desc: BC1G_02756 [Botryotinia fuckeliana B05.10] gi|150857886|gb|EDN33078.1| BC1G_02756 [Botryotinia fuckeliana B05.10]
  misc_feature (1)..(378): NCBI GI: 156045389 Blast Desc: SS1G_09883 [Sclerotinia sclerotiorum 1980] gi|154694278|gb|EDN94016.1| SS1G_09883 [Sclerotinia sclerotiorum 1980]
  misc_feature (3)..(350): NCBI GI: 73665491 Blast Desc: [Sclerotinia sclerotiorum]
  misc_feature (1)..(378): NCBI GI: 39951923 Blast Desc: MGG_01604 [Magnaporthe grisea 70-15] gi|145020548|gb|EDK04677.1| MGG_01604 [Magnaporthe grisea 70-15]
  misc_feature (1)..(381): NCBI GI: 46107210 Blast Desc: FG00488.1 [Gibberella zeae PH-1]
  misc_feature (1)..(379): NCBI GI: 256735255 Blast Desc: NECHADRAFT_90141 [Nectria haematococca mpVI 77-13-4]
  misc_feature (1)..(368): NCBI GI: 116181700 Blast Desc: CHGG_01478 [Chaetomium globosum CBS 148.51] gi|88185775|gb|EAQ93243.1| CHGG_01478 [Chaetomium globosum CBS 148.51]
  misc_feature (7)..(353): NCBI GI: 171696148 Blast Desc: protein product [Podospora anserina] gi|170948316|emb|CAP60480.1| protein product [Podospora anserina]
  misc_feature (1)..(380): NCBI GI: 169599715 Blast Desc: SNOG_02681 [Phaeosphaeria nodorum SN15] gi|111068292|gb|EAT89412.1| SNOG_02681 [Phaeosphaeria nodorum SN15]
MPIHKGFLPREGLTADPIFKLIGRTALNPILLLPLLLAAKFTKKGEDLTMLHPTAFSRVKTLFYIGLVRFLSGYLSDGVVNNWTKDIYDWPNEIAVVTGGSGGIGGHVVKLLAERGTQVVVLDIIPMTFEAGPKVHYYKCDITSIASLAEVAKKIRAEVGEPTILINNAGVARGKSILETSEKDLKFTFDVNTFAHYNTVKEFLPAMIKKDHGMVVTVASYAAWLPVPNMVDYSMSKSAAHAFHEGLSAELKTRYNAPKVRTVLVNQGYTKTPLFTGYKNDAGFLVPSLEPESVADAICKQVFTGRSGQVIMPTFGRSLQLLQAMPHWYAYRLRTDSKDIMSNWNGRQVVKDLDKFYTDKDKELEKAGSDVEGSTVLVPEAE

SEQ ID NO: 8684 - DNA, 3252 bp, Muscodor strobelii; identical to SEQ ID NO: 8681
  misc_feature: SGI EST ID NO. CUFF.20961.2
  misc_feature: Variant of the nucleotide sequence at SEQ ID NO 8682

SEQ ID NO: 8685 - DNA, 1158 bp, Muscodor strobelii
  misc_feature: SGI cDNA ID NO. 562684
  misc_feature: Encodes the peptide sequence at SEQ ID NO 8686
atgcctattcataaaggcttcctgccccgcgaaggtctcacggccgacccgattttcaagttgatcgcaaagcagggccggaccgccttaaatccaatcctcctattgccccttttactcgcggcaaagtttaccaagaagggcgaggatctgactatgctacatcccacggctttctcgcgcgtcaagaccctcttctacatcggtctcgtccgtttcttgtcgggctacctatctgatggcgttgtcaacaactggaccaaggatatttatgactggcccaatgagattgctgtggttacaggaggttccggcggaattggcggacatgtggtgaaacttctggcagagcgaggaacccaggttgtggtattggacatcatccccatgacattcgaagcaggccccaaagtgcactattacaagtgtgatataacatcaatcgccagccttgcagaagttgcaaagaagattcgtgcagaagtcggggagccgacgatcctgatcaacaatgcaggtgttgcccgaggaaagagtatactagagacaagtgaaaaggacctaaagttcacattcgacgtcaacacgttcgcgcattacaacacggtaaaggagtttcttcctgcaatgattaagaaggatcatggcatggtagtgaccgtggcttcatatgcagcttggctacccgtgccaaatatggtggactattcaatgtccaaatcggcagcccatgcgtttcacgagggtctctctgctgagcttaaaacaagatacaatgcgcctaaagtcagaacagtcctggtaaaccaaggctatactaaaactccgttgttcactggatacaagaacgacgcaggtttcctggttccctcgctcgaacctgagtctgtggcagatgcgatctgcaagcaggttttcactggccgaagtggtcaggtcattatgccgacgttcggaagatccttacaacttctccaagcgatgcctcactggtatgcgtaccgtctccgcacagattcgaaggatatcatgtcgaactggaacggccgacaggtagttaaggatctcgataaattctacacggataaggacaaagaacttgaaaaggctggctctgatgttgaaggcagtacggtgctagtaccagaggcagaatga

SEQ ID NO: 8686 - protein, 385 aa, Muscodor strobelii
  misc_feature: SGI Peptide ID NO. 562684
  misc_feature (96)..(255): Pfam Id: PF00106 Pfam Desc: short chain dehydrogenase
  misc_feature (133)..(255): Pfam Id: PF00106 Pfam Desc: short chain dehydrogenase
  misc_feature (96)..(125): Pfam Id: PF00106 Pfam Desc: short chain dehydrogenase
  misc_feature (98)..(207): Pfam Id: PF01370 Pfam Desc: NAD dependent epimerase/dehydratase family
  misc_feature (1)..(381): NCBI GI: 261356069 Blast Desc: dehydrogenase/reductase SDR family member 8 [Verticillium albo-atrum VaMs.102]
  misc_feature (1)..(360): NCBI GI: 154318734 Blast Desc: BC1G_02756 [Botryotinia fuckeliana B05.10] gi|150857886|gb|EDN33078.1| BC1G_02756 [Botryotinia fuckeliana B05.10]
  misc_feature (1)..(381): NCBI GI: 156045389 Blast Desc: SS1G_09883 [Sclerotinia sclerotiorum 1980] gi|154694278|gb|EDN94016.1| SS1G_09883 [Sclerotinia sclerotiorum 1980]
  misc_feature (3)..(353): NCBI GI: 73665491 Blast Desc: [Sclerotinia sclerotiorum]
  misc_feature (1)..(381): NCBI GI: 39951923 Blast Desc: MGG_01604 [Magnaporthe grisea 70-15] gi|145020548|gb|EDK04677.1| MGG_01604 [Magnaporthe grisea 70-15]
  misc_feature (1)..(384): NCBI GI: 46107210 Blast Desc: FG00488.1 [Gibberella zeae PH-1]
  misc_feature (1)..(382): NCBI GI: 256735255 Blast Desc: NECHADRAFT_90141 [Nectria haematococca mpVI 77-13-4]
  misc_feature (1)..(371): NCBI GI: 116181700 Blast Desc: CHGG_01478 [Chaetomium globosum CBS 148.51] gi|88185775|gb|EAQ93243.1| CHGG_01478 [Chaetomium globosum CBS 148.51]
  misc_feature (7)..(356): NCBI GI: 171696148 Blast Desc: protein product [Podospora anserina] gi|170948316|emb|CAP60480.1| protein product [Podospora anserina]
  misc_feature (1)..(383): NCBI GI: 169599715 Blast Desc: SNOG_02681 [Phaeosphaeria nodorum SN15] gi|111068292|gb|EAT89412.1| SNOG_02681 [Phaeosphaeria nodorum SN15]
MPIHKGFLPREGLTADPIFKLIAKQGRTALNPILLLPLLLAAKFTKKGEDLTMLHPTAFSRVKTLFYIGLVRFLSGYLSDGVVNNWTKDIYDWPNEIAVVTGGSGGIGGHVVKLLAERGTQVVVLDIIPMTFEAGPKVHYYKCDITSIASLAEVAKKIRAEVGEPTILINNAGVARGKSILETSEKDLKFTFDVNTFAHYNTVKEFLPAMIKKDHGMVVTVASYAAWLPVPNMVDYSMSKSAAHAFHEGLSAELKTRYNAPKVRTVLVNQGYTKTPLFTGYKNDAGFLVPSLEPESVADAICKQVFTGRSGQVIMPTFGRSLQLLQAMPHWYAYRLRTDSKDIMSNWNGRQVVKDLDKFYTDKDKELEKAGSDVEGSTVLVPEAE

SEQ ID NO: 8687 - DNA, 3252 bp, Muscodor strobelii; identical to SEQ ID NO: 8681
  misc_feature: SGI EST ID NO. CUFF.20961.2
  misc_feature: Variant of the nucleotide sequence at SEQ ID NO 8685

SEQ ID NO: 8688 - DNA, 951 bp, Muscodor strobelii
  misc_feature: SGI cDNA ID NO. 562685
  misc_feature: Encodes the peptide sequence at SEQ ID NO 8689
atgcccgtcccccgatcagagtatctcagcaatgtctggaaagacggcacatttgatggtcgtgtcgtctttgtgaccggcggagctggcactatctgcagtgctcagactagagcattggtctacctcggtgccaatgcctgcattatagggcgcaatgtagagaagacggagaccattgctgctgacatcgccacatcccgcaagggagcaaaagtcatcgggattggcggctgtgatgttcgagatcctgaaagtttgaataaagcagccgagcgatgcgtaaaggagttgggagctattgattttgttattgccggagcagccggaaatttcgtagcgccgatcaactacctaagctctaatggcttcaagagtgtcatggacatagacgtccttgggacattcaacaccgtcaaggcgacaatgccgtatcttgttgaatcagcaaaacgcaaccctaacccaagccccaatgggcttaccggtggccgaatcatatacgtgtctgcaacattccattataccggaatgcccatgcaagcgcacgtttctgctgcaaagtcttcggtggactcgatcagcgcatctgtagctcttgagtacgggccttttggtgtcacgtctaatgtcatttctcctggtggtattgagggtaccgagggcatggagcgtctcgccaatagcaaaatggattatagagaatcagcgagacacataccttccggtcgttggggcactattcgggatatcgccgatgccactgtattcttatttagcgatgctggcaactatgtcaatggagatgtgctcgtggtagatggagcggactggaggaataagggtatgggagtcggccgagatgcatctatgagatatcccgatttcttgacgaacgacgaatatgctaaattcgtaaagagcggccgaaaggagaagcccaagctatag

SEQ ID NO: 8689 - protein, 316 aa, Muscodor strobelii
  misc_feature: SGI Peptide ID NO. 562685
  misc_feature (21)..(203): Pfam Id: PF00106 Pfam Desc: short chain dehydrogenase
  misc_feature (1)..(316): NCBI GI: 261357493 Blast Desc: peroxisomal 2,4-dienoyl-CoA reductase SPS19 [Verticillium albo-atrum VaMs.102]
  misc_feature (1)..(316): NCBI GI: 85106074 Blast Desc: sporulation protein SPS19 [Neurospora crassa OR74A] gi|28923686|gb|EAA32855.1| sporulation protein SPS19 [Neurospora crassa OR74A]
  misc_feature (6)..(313): NCBI GI: 39940204 Blast Desc: conserved [Magnaporthe grisea 70-15] gi|59802857|gb|AAX07643.1| sporulation protein-like protein [Magnaporthe grisea] gi|145010605|gb|EDJ95261.1| conserved grisea
  misc_feature (1)..(316): NCBI GI: 171676968 Blast Desc: protein product [Podospora anserina] gi|170936551|emb|CAP61211.1| protein product [Podospora anserina]
  misc_feature (1)..(312): NCBI GI: 116196642 Blast Desc: CHGG_04919 [Chaetomium globosum CBS 148.51] gi|88180832|gb|EAQ88300.1| CHGG_04919 [Chaetomium globosum CBS 148.51]
  misc_feature (1)..(316): NCBI GI: 256734571 Blast Desc: [Nectria haematococca mpVI 77-13-4]
  misc_feature (1)..(311): NCBI GI: 46106067 Blast Desc: FG00407.1 [Gibberella zeae PH-1]
  misc_feature (1)..(316): NCBI GI: 226291106 Blast Desc: sporulation protein SPS19 [Paracoccidioides brasiliensis Pb18]
  misc_feature (1)..(316): NCBI GI: 261197702 Blast Desc: sporulation protein SPS19 [Ajellomyces dermatitidis SLH14081] gi|239595216|gb|EEQ77797.1| sporulation protein SPS19 [Ajellomyces dermatitidis SLH14081] gi|239607634|gb|EEQ84621.1|
  misc_feature (1)..(316): NCBI GI: 225562042 Blast Desc: oxidoreductase [Ajellomyces capsulatus G186AR]
  misc_feature (13)..(305): SWISSPROT Homolog: EC 1.3.1.34 2,4-dienoyl-CoA reductase (NADPH)
MPVPRSEYLSNVWKDGTFDGRVVFVTGGAGTICSAQTRALVYLGANACIIGRNVEKTETIAADIATSRKGAKVIGIGGCDVRDPESLNKAAERCVKELGAIDFVIAGAAGNFVAPINYLSSNGFKSVMDIDVLGTFNTVKATMPYLVESAKRNPNPSPNGLTGGRIIYVSATFHYTGMPMQAHVSAAKSSVDSISASVALEYGPFGVTSNVISPGGIEGTEGMERLANSKMDYRESARHIPSGRWGTIRDIADATVFLFSDAGNYVNGDVLVVDGADWRNKGMGVGRDASMRYPDFLTNDEYAKFVKSGRKEKPKL

SEQ ID NO: 8690 - DNA, 1623 bp, Muscodor strobelii
  misc_feature: SGI EST ID NO. CUFF.20932.0
  misc_feature: Variant of the nucleotide sequence at SEQ ID NO 8688
gtgcactaatcctgacttttagcattatctacaatcccatcaacaagatagtggacaccaagtaggcccatagcgaatagctaaaacgggagctggagcagtttcgacagtaatcacttcatgggaccttgaggtgctcgttgaaccccggattcaggccccaatcccgttgtcaagagtccagactcaccttaccggaaatggacctattattataacaaaatctggggcatcaatacggtggggcggccgaggtatcttgacattccttcaggaccctgcagtcgtagcttttctgattgaacgagagaccgacatttctcatctcatcagtaatcacattcgattcccgttctatctggtcacaagtccgtcttccagtccgattctgatcgtttgtataaaaattccatcattcctgtcttaataattctttctttcgtgttgtacatcgtgtgggtcagccaaaccaaaacatgcccgtcccccgatcagagtatctcagcaatgtctggaaagacggcacatttgatggtcgtgtcgtctttgtgaccggcggagctggcactatctgcagtgctcagactagagcattggtctacctcggtgccaatgcctgcattatagggcgcaatgtagagaagacggagaccattgctgctgacatcgccacatcccgcaagggagcaaaagtcatcgggattggcggctgtgatgttcgagatcctgaaagtttgaataaagcagccgagcgatgcgtaaaggagttgggagctattgattttgttattgccggagcagccggaaatttcgtagcgccgatcaactacctaagctctaatggcttcaagagtgtcatggacatagacgtccttgggacattcaacaccgtcaaggcgacaatgccgtatcttgttgaatcagcaaaacgcaaccctaacccaagccccaatgggcttaccggtggccgaatcatatacgtgtctgcaacattccattataccggaatgcccatgcaagcgcacgtttctgctgcaaagtcttcggtggactcgatcagcgcatctgtagctcttgagtacgggccttttggtgtcacgtctaatgtcatttctcctggtggtattgagggtaccgagggcatggagcgtctcgccaatagcaaaatggattatagagaatcagcgagacacataccttccggtcgttggggcactattcgggatatcgccgatgccactgtattcttatttagcgatgctggcaactatgtcaatggagatgtgctcgtggtagatggagcggactggaggaataagggtatgggagtcggccgagatgcatctatgagatatcccgatttcttgacgaacgacgaatatgctaaattcgtaaagagcggccgaaaggagaagcccaagctatagatgatggcgttcagatagggagatgcgaggaacacaaccccacgcacctagctaatgtcttagacattatactgatatactcgatgcagaagtacaacagggcacctgtctcggtccgggaaacgatcagaactcttctcatttggtattaggcagaatataggtaaaatggtaatcgcggaatgaatgactgacg

SEQ ID NO: 8691 - DNA, 657 bp, Muscodor strobelii
  misc_feature: SGI cDNA ID NO. 562686
  misc_feature: Reduced expression when VOC is produced
  misc_feature: Encodes the peptide sequence at SEQ ID NO 8692
atggcatccaggaaggtgtccgtcctgaagttcgtcgggaccacctctctcggtctcctgacgggagcatcatataccctctccgcgtacacaatccccgcgctgctcgagcacgattcagcctctaacgccgccaatgccctccgctcgctcaagacgattgtgtccaggcacctgacagctctggccggcctgtccggatccgcctttcttctagcattttccttctcgccaagaggctacaggcacccgtatcttctctacatttcgctcttctgcttcggtttcggctccccgcttgccgactatctcacccccgcgctcttcgatacatcttctgctagctctccatccattgcggagcgacgctcggccctcgctcaagcccgtttagaaaaggccgctgcccgccgcatggagcagagctacgagatgctgagtgatgaacatagcgacgaaggtaccgccagtgccagtggtgaagacctcgaggaggatatcaatggagaagaagtccgcaacgaggtcgccttgttcatcaagaaccagattgtgcggacgacgatcgcagctgtgggctttgcgatggccactgtcggcatttggggtgacggtgcgcatcgagctgcagatacactggtcgtcgaagtctattaa

SEQ ID NO: 8692 - protein, 218 aa, Muscodor strobelii
  misc_feature: SGI Peptide ID NO. 562686
  misc_feature (1)..(205): NCBI GI: 85105720 Blast Desc: NCU08676 [Neurospora crassa OR74A] gi|28923617|gb|EAA32789.1| [Neurospora crassa OR74A]
  misc_feature (1)..(205): NCBI GI: 156057795 Blast Desc: SS1G_04629 [Sclerotinia sclerotiorum 1980] gi|154702414|gb|EDO02153.1| SS1G_04629 [Sclerotinia sclerotiorum 1980]
  misc_feature (1)..(205): NCBI GI: 154323486 Blast Desc: BC1G_00142 [Botryotinia fuckeliana B05.10] gi|150842371|gb|EDN17564.1| BC1G_00142 [Botryotinia fuckeliana B05.10]
  misc_feature (1)..(205): NCBI GI: 261357494 Blast Desc: [Verticillium albo-atrum VaMs.102]
  misc_feature (1)..(218): NCBI GI: 171688296 Blast Desc: protein product [Podospora anserina] gi|170944110|emb|CAP70220.1| protein product [Podospora anserina]
  misc_feature (6)..(209): NCBI GI: 46107332 Blast Desc: FG00549.1 [Gibberella zeae PH-1]
  misc_feature (1)..(209): NCBI GI: 256735228 Blast Desc: [Nectria haematococca mpVI 77-13-4]
  misc_feature (1)..(208): NCBI GI: 145602250 Blast Desc: MGG_12948 [Magnaporthe grisea 70-15] gi|145010683|gb|EDJ95339.1| MGG_12948 [Magnaporthe grisea 70-15]
  misc_feature (6)..(204): NCBI GI: 121712926 Blast Desc: conserved [Aspergillus clavatus NRRL 1] gi|119402227|gb|EAW12648.1| conserved [Aspergillus clavatus NRRL 1]
  misc_feature (6)..(205): NCBI GI: 258571900 Blast Desc: [Uncinocarpus reesii 1704] gi|237905023|gb|EEP79424.1| [Uncinocarpus reesii 1704]
  misc_feature: Useful for introducing or modulating the production of volatile compounds
MASRKVSVLKFVGTTSLGLLTGASYTLSAYTIPALLEHDSASNAANALRSLKTIVSRHLTALAGLSGSAFLLAFSFSPRGYRHPYLLYISLFCFGFGSPLADYLTPALFDTSSASSPSIAERRSALAQARLEKAAARRMEQSYEMLSDEHSDEGTASASGEDLEEDINGEEVRNEVALFIKNQIVRTTIAAVGFAMATVGIWGDGAHRAADTLVVEVY

SEQ ID NO: 8693 - DNA, 2544 bp, Muscodor strobelii
  misc_feature: SGI EST ID NO. CUFF.20964.0
  misc_feature: Variant of the nucleotide sequence at SEQ ID NO 8691
cgcccgtctaggataaactttagcccatacatgtcgttttagtccggacccagctgaaactaccagctaaacgctttctcgtcggttcgacaactaagaactgtcccttatcttaacggtctaactccgtcatcacatccagccttgatctacggacctgcaccacgtctcaatacctccctcctcatgccaccttaaccgccgtgcatcaatcgaccctaccctcgacgcccaacctctaatcctcttcgattgctgagaaccatggcatccaggaaggtgtccgtcctgaagttcgtcgggaccacctctctcggtctcctgacgggagcatcatataccctctccgcgtacacaatccccgcgctgctcgagcacgattcagcctctaacgccgccaatgccctccgctcgctcaagacgattgtgtccaggcacctgacagctctggccggcctgtccggatccgcctttcttctagcattttccttctcgccaagaggctacaggcacccgtatcttctctacatttcgctcttctgcttcggtttcggctccccgcttgccgactatctcacccccgcgctcttcgatacatcttctgctagctctccatccattgcggagcgacgctcggccctcgctcaagcccgtttagaaaaggccgctgcccgccgcatggagcagagctacgagatgctgagtgatgaacatagcgacgaaggtaccgccagtgccagtggtgaagacctcgaggaggatatcaatggagaagaagtccgcaacgaggtcgccttgttcatcaagaaccagattgtgcggacgacgatcgcagctgtgggctttgcgatggccactgtcggcatttggggtgacggtgcgcatcgagctgcagatacactggtcgtcgaagtctattaaagcccaaagtatagcgctttggtaatggtaaatgagacacaaacaccctgaaatgggtaggcaggacggccgtcctggtgaagtggcttgttagaggttgaacggggagacctgattacagagacttcaataatggggagggtatcattgtagaaacctttctattggaggtacgagataacgagggagacacatgtcttcgctcgctacatgctctccgctctcttacgataatgcgattggagtatttggcgcacaggagacactcaagcaagaaggaaaggagaaaaatgaaaagtcttcatatatctacccaaatcagctccgagatttggattattcggaaaaatcaattatagtccttgacagtaccgagtcattgtgactataaccagcaacactcctcaaacatttagatacattatttacccgtcaccaagtttagtagcatggacttgaagtgtgaagcacgcggcatattgataatgcagaatcttgaaattgacatcttgacatccccttgctgatgaaagagacaccgataacctaattcacgaaaaatacttacaagttattcgacagctgagttgaatttggagagtgatgatctgtgactgatctaactatcattcgtggagcactgtgcatatcgatttcgacttccatttcatctacgttgaaatatgtgtgagaattcatatagaaaagatgattaagatacaattatgatgaatctgccttcaatccaaagaaccatttccgtagtcgtctgcatcagtcccagggctatacgaaacccactttagatatgcttgtatctatgcatccatagcatcacgtccattaagtagaacgatacaggtcgaaatcgcaaccaactcatcgacttcgtctccatttagaaccaccacagcgtctttgtcgaatccaaagccagccacacgaccgacttcaacacgttgctggttcagacacttatagaggataccaatccgaccctgagtcatatcccaaaagtacggaatactgtggcgaacaaaggcctcatgtttcttatcctcggccgtattctcatcgacgggacacagctcaatagtatgacgactgtgcttgctgccaggcgggaagcgaatcgtcgaattgtcaaaggatacaaaagtgatatttaaatcacagactttttccccttgaccgttggtcatggtcttgacagtgcgcatcatgttaccgatgctcccgatttgataagacggtgttgcgccctcggacatctttttggctacctgacttgtttcgtcgaggaacgcatggctgaagtcgccccagggatttttcattttgcctgtgagctcgaaaatcctggcgtcggttttgaagtggatgcatcccttgagatagaatattttcgtgggattgagatgtacggacttgttgactggaaagtcgtctgggtgaaatgggtgaggcatggttggtctgtatgacttgttctccctgcgggtgattgtcgttcgacttaacagttggttcttctattttgatgctggagacgtgtattctcgagattaatctaagttgcttctctcattctaccctcaccgcagtgtttttgacgtcggcctg

SEQ ID NO: 8694 - DNA, 651 bp, Muscodor strobelii
  misc_feature: SGI cDNA ID NO. 562687
  misc_feature: Reduced expression when VOC is produced
  misc_feature: Encodes the peptide sequence at SEQ ID NO 8695
atgcctcacccatttcacccagacgactttccagtcaacaagtccgtacatctcaatcccacgaaaatattctatctcaagggatgcatccacttcaaaaccgacgccaggattttcgagctcacaggcaaaatgaaaaatccctggggcgacttcagccatgcgttcctcgacgaaacaagtcaggtagccaaaaagatgtccgagggcgcaacaccgtcttatcaaatcgggagcatcggtaacatgatgcgcactgtcaagaccatgaccaacggtcaaggggaaaaagtctgtgatttaaatatcacttttgtatcctttgacaattcgacgattcgcttcccgcctggcagcaagcacagtcgtcatactattgagctgtgtcccgtcgatgagaatacggccgaggataagaaacatgaggcctttgttcgccacagtattccgtacttttgggatatgactcagggtcggattggtatcctctataagtgtctgaaccagcaacgtgttgaagtcggtcgtgtggctggctttggattcgacaaagacgctgtggtggttctaaatggagacgaagtcgatgagttggttgcgatttcgacctgtatcgttctacttaatggacgtgatgctatggatgcatag

SEQ ID NO: 8695 - protein, 216 aa, Muscodor strobelii
  misc_feature: SGI Peptide ID NO. 562687
  misc_feature (105)..(213): NCBI GI: 212544011 Blast Desc: PMAA_049600 [Penicillium marneffei ATCC 18224] gi|210067067|gb|EEA21160.1| PMAA_049600 [Penicillium marneffei ATCC 18224]
  misc_feature (105)..(213): NCBI GI: 242788316 Blast Desc: TSTA_039570 [Talaromyces stipitatus ATCC 10500] gi|218721341|gb|EED20760.1| TSTA_039570 [Talaromyces stipitatus ATCC 10500]
  misc_feature: Useful for introducing or modulating the production of volatile compounds
MPHPFHPDDFPVNKSVHLNPTKIFYLKGCIHFKTDARIFELTGKMKNPWGDFSHAFLDETSQVAKKMSEGATPSYQIGSIGNMMRTVKTMTNGQGEKVCDLNITFVSFDNSTIRFPPGSKHSRHTIELCPVDENTAEDKKHEAFVRHSIPYFWDMTQGRIGILYKCLNQQRVEVGRVAGFGFDKDAVVVLNGDEVDELVAISTCIVLLNGRDAMDA

SEQ ID NO: 8696 - DNA, 495 bp, Muscodor strobelii
  misc_feature: SGI cDNA ID NO. 562688
  misc_feature: Encodes the peptide sequence at SEQ ID NO 8697
atgatggccacaccgacgctatcaagcgcagcctcgtcctccgcggtagaagcgacctgttccgaatacggccttactaatgctgagttcaaggagttgcatactcgctgtgtcgctgcaaaagcaaccgcatactgtccttatagcgaattcagagtgggcgcctcactcatatctctcgatggtacatatatcaacggtgccaatgttgagaatgcttcatatccggtcggaacctgcgcggagcgtgtggcatttggcaaggccgtgacggaaggacaccacaaaattagagcagtcgccgttgcgacggacatcacacctccggctagtccatgcggaatgtgtcgtcagtttattcgagagttctgtggcctggaagcccctatcatcatgttcgataaagatgataactacgtcgttatgcggctcggcgaattattgcccgtatcttttggtcctgaagcactcccccggccctcgagaatgagatga

SEQ ID NO: 8697 - protein, 164 aa, Muscodor strobelii
  misc_feature: SGI Peptide ID NO. 562688
  misc_feature (28)..(132): Pfam Id: PF00383 Pfam Desc: Cytidine and deoxycytidylate deaminase zinc-binding region
  misc_feature (9)..(159): NCBI GI: 145605339 Blast Desc: MGG_09940 [Magnaporthe grisea 70-15] gi|145013157|gb|EDJ97798.1| MGG_09940 [Magnaporthe grisea 70-15]
  misc_feature (5)..(158): NCBI GI: 154290352 Blast Desc: BC1G_15730 [Botryotinia fuckeliana B05.10] gi|150847752|gb|EDN22945.1| BC1G_15730 [Botryotinia fuckeliana B05.10]
  misc_feature (4)..(157): NCBI GI: 85117456 Blast Desc: NCU08359 [Neurospora crassa OR74A] gi|28927068|gb|EAA36026.1| conserved [Neurospora crassa OR74A]
  misc_feature (2)..(158): NCBI GI: 156050789 Blast Desc: SS1G_07982 [Sclerotinia sclerotiorum 1980] gi|154692382|gb|EDN92120.1| SS1G_07982 [Sclerotinia sclerotiorum 1980]
  misc_feature (15)..(162): NCBI GI: 116181992 Blast Desc: CHGG_01624 [Chaetomium globosum CBS 148.51] gi|88185921|gb|EAQ93389.1| CHGG_01624 [Chaetomium globosum CBS 148.51]
  misc_feature (25)..(159): NCBI GI: 226283723 Blast Desc: conserved [Paracoccidioides brasiliensis Pb01]
  misc_feature (2)..(151): NCBI GI: 46106109 Blast Desc: FG00409.1 [Gibberella zeae PH-1]
  misc_feature (25)..(154): NCBI GI: 145235827 Blast Desc: An03g06870 [Aspergillus niger] gi|134058251|emb|CAK38443.1| protein product [Aspergillus niger]
  misc_feature (25)..(159): NCBI GI: 226288225 Blast Desc: cytidine deaminase [Paracoccidioides brasiliensis Pb18]
  misc_feature (21)..(159): NCBI GI: 238507535 Blast Desc: cytidine deaminase, [Aspergillus flavus NRRL3357] gi|220689682|gb|EED46033.1| cytidine deaminase, [Aspergillus flavus NRRL3357]
  misc_feature (40)..(159): SWISSPROT Homolog: EC 3.5.4.5 Cytidine deaminase
MMATPTLSSAASSSAVEATCSEYGLTNAEFKELHTRCVAAKATAYCPYSEFRVGASLISLDGTYINGANVENASYPVGTCAERVAFGKAVTEGHHKIRAVAVATDITPPASPCGMCRQFIREFCGLEAPIIMFDKDDNYVVMRLGELLPVSFGPEALPRPSRMR

SEQ ID NO: 8698 - DNA, 1375 bp, Muscodor strobelii
  misc_feature: SGI EST ID NO. CUFF.20980.2
  misc_feature: Variant of the nucleotide sequence at SEQ ID NO 8696
tatgagtactggttggcattaaaagcagcataatcttgatgatgtcggttcgtacaccactcttgtcttctacgcaggcaaggtttgaaatgaaacgaaatgccacacacaaaacaactcgatcttggagccgcacttggctgcaggctatagcgtcaagccccggcataccccaagtgccttacggctgatggccatgaactccaagtagaacatcaaaccttctcttacagtaaggcaatgaagtggagataatcaaaggaagggaaccgttgggtgtgagttgaatcagtgaagttcggcggcagacggcgcattccagcgccggcatcccccactaaatgtagcgcaaacggcaatgaaactacaaacgtctagatagcgcaaaagaagagcaaaatctcaattacttcaactgaatgctcttattaccaacgtgcaccgcgccgtcgcacaattagacgaatcatgatggccacaccgacgctatcaagcgcagcctcgtcctccgcggtagaagcgacctgttccgaatacggccttactaatgctgagttcaaggagttgcatactcgctgtgtcgctgcaaaagcaaccgcatactgtccttatagcgaattcagagtgggcgcctcactcatatctctcgatggtacatatatcaacggtgccaatgttgagaatgcttcatatccggtcggaacctgcgcggagcgtgtggcatttggcaaggccgtgacggaaggacaccacaaaattagagcagtcgccgttgcgacggacatcacacctccggctagtccatgcggaatgtgtcgtcagtttattcgagagttctgtggcctggaagcccctatcatcatgttcgataaagatgataactacgtcgttatgcggctcggcgaattattgcccgtatcttttggtcctgaagcactcccccggccctcgagaatgagatgatagctgaggaacacacaacttcatgtgattgcctctggctattaaatttgattatagggcgatcctcagccagtttacaaacaacgccgtttcgcctgtgtgaagctgctctatcgtgcagatcaagattcggcaaagacacgcttcacatatgctcgatctcacctcgcctgagtctggatctgatggcatcatacatttactggattggttagatttataattcgatagagatagactttgatttctagcagcaacgcatattgtcctgttcagatatcgaggcttagaatcaattgagagataaactacaccgtgatgtactgagatgttatctttgacgacaataagaccgtgcgtatgttgaatgtctccattcaaaccgtgtttgatgtttccatagctcattcat

SEQ ID NO: 8699 - DNA, 456 bp, Muscodor strobelii
  misc_feature: SGI cDNA ID NO. 562689
  misc_feature: Encodes the peptide sequence at SEQ ID NO 8700
atgatggccacaccgacgctatcaagcgcagcctcgtcctccgcggtagaagcgacctgttccgaatacggccttactaatgctgagttcaaggagttgcatactcgctgtgtcgctgcaaaagcaaccgcatactgtccttatagcgaattcagagtgggcgcctcactcatatctctcgatggtacatatatcaacggtgccaatgttgagaatgcttcatatccggtcggaacctgcgcggagcgtgtggcatttggcaaggccgtgacggaaggacaccacaaaattagagcagtcgccgttgcgacggacatcacacctccggctagtccatgcggaatgtgtcgtcagtttattcgagagttctgtggcctggaagcccctatcatcatgttcgataaagatgataactacgtcgttatgcggctcggcgaagtaggtttggccatctaa

SEQ ID NO: 8700 - protein, 151 aa, Muscodor strobelii
  misc_feature: SGI Peptide ID NO. 562689
  misc_feature (28)..(132): Pfam Id: PF00383 Pfam Desc: Cytidine and deoxycytidylate deaminase zinc-binding region
  misc_feature (1)..(144): NCBI GI: 145605339 Blast Desc: MGG_09940 [Magnaporthe grisea 70-15] gi|145013157|gb|EDJ97798.1| MGG_09940 [Magnaporthe grisea 70-15]
  misc_feature (5)..(147): NCBI GI: 154290352 Blast Desc: BC1G_15730 [Botryotinia fuckeliana B05.10] gi|150847752|gb|EDN22945.1| BC1G_15730 [Botryotinia fuckeliana B05.10]
  misc_feature (4)..(147): NCBI GI: 85117456 Blast Desc: NCU08359 [Neurospora crassa OR74A] gi|28927068|gb|EAA36026.1| conserved [Neurospora crassa OR74A]
  misc_feature (2)..(144): NCBI GI: 46106109 Blast Desc: FG00409.1 [Gibberella zeae PH-1]
  misc_feature (2)..(147): NCBI GI: 156050789 Blast Desc: SS1G_07982 [Sclerotinia sclerotiorum 1980] gi|154692382|gb|EDN92120.1| SS1G_07982 [Sclerotinia sclerotiorum 1980]
  misc_feature (15)..(147): NCBI GI: 116181992 Blast Desc: CHGG_01624 [Chaetomium globosum CBS 148.51] gi|88185921|gb|EAQ93389.1| CHGG_01624 [Chaetomium globosum CBS 148.51]
  misc_feature (24)..(147): NCBI GI: 119484038 Blast Desc: cytidine deaminase, [Neosartorya fischeri NRRL 181] gi|119410078|gb|EAW20025.1| cytidine deaminase, [Neosartorya fischeri NRRL 181]
  misc_feature (25)..(147): NCBI GI: 145235827 Blast Desc: An03g06870 [Aspergillus niger] gi|134058251|emb|CAK38443.1| protein product [Aspergillus niger]
  misc_feature (24)..(147): NCBI GI: 70982805 Blast Desc: cytidine deaminase [Aspergillus fumigatus Af293] gi|66844555|gb|EAL84892.1| cytidine deaminase, [Aspergillus fumigatus Af293] gi|159123814|gb|EDP48933.1| cytidine deaminase,
  misc_feature (16)..(147): NCBI GI: 238507535 Blast Desc: cytidine deaminase, [Aspergillus flavus NRRL3357] gi|220689682|gb|EED46033.1| cytidine deaminase, [Aspergillus flavus NRRL3357]
  misc_feature (40)..(147): SWISSPROT Homolog: EC 3.5.4.5 Cytidine deaminase
MMATPTLSSAASSSAVEATCSEYGLTNAEFKELHTRCVAAKATAYCPYSEFRVGASLISLDGTYINGANVENASYPVGTCAERVAFGKAVTEGHHKIRAVAVATDITPPASPCGMCRQFIREFCGLEAPIIMFDKDDNYVVMRLGEVGLAI

SEQ ID NO: 8701 - DNA, 1375 bp, Muscodor strobelii; identical to SEQ ID NO: 8698
  misc_feature: SGI EST ID NO. CUFF.20980.2
  misc_feature: Variant of the nucleotide sequence at SEQ ID NO 8699

SEQ ID NO: 8702 - DNA, 2136 bp, Muscodor strobelii
  misc_feature: SGI cDNA ID NO. 562690
  misc_feature: Encodes the peptide sequence at SEQ ID NO 8703
atggaccaagcagagatacccgcgctcctggcgcgactggccagcgacgaagatgcttcgcggaaaatggcagtcttcaagctacagtcatctatcaacgacccctcgttcgccgacgtcttcattaacactggaggtctgctcatcctgcggcggctcatcatgtcttccggcggcaacaccctcgcctactccctgcagagcctgagccggctgctcgaagtcgacatgggctgggagatcttcgagaaccctacctccggcgaccttgtcgaccgcattgtcgagctgatcgtcacgaaccccctcgtcaacatcctgcgtggcgcaatgtcgattctcgtttctctcgtcagccactcgcctgccgactcggcccctggcacctttggcttccgcgcactgcggccagccatcgccgtctacccctccttcttcgatctcgtcgtccagaagctgcagtccgccgaccacgctctgtgcgccaccactttgactcttatcaatgctctcattagggatgctgtctcgagcgaagataaagatttcgaaagcaccaagacgggcactggcgaagagtggcccaagttcatcaagagattgcaggacctgggccttatcaaggccgtctacagcctcatgcagagtgcggctctccaagacctggcccagccactgctagagttccaatcccttactaaggttttgctcaagaagtggagagaagtcagggtcgatctggagcggccggagcaccgccgcgcattgaagagcgttcatcttgccagtgcgccgagcaaggactacttgaacgggagcaccgatgtgaaatctcaagatacgccagagtctggaaagaaaggaagccggagacacaaccccgagaaatggagaagactagggttcgagagcgaaagcccggcttcggaattccacaccgctggctttctgggcatgatggatcttacagactacgttcgcaaaaacgaggatgctttccagaagctactgttggagcaatccactcggccgttgcatgagcgctgtcctatagctcgcgctagtctggcagtcacgctcactttgttcgagcacttcgactgtggacggttagaagtggaggatactcggggtttacagctttctgacggacaacatcaagataagctgtttcggccattacttcttcaatggtcaagactacacacagcgggtcttcaagctttcctaaggctgtggaaaactacaggagcagaacaagacgatttcgacaaggttgtagagctggttcgtattctggttgaccaggttataggtcaagctagccggctaaaagacgtcgtcgaagtggaggaggagctccatgagtacgacctggcgcatctacgtgagctacagatgaatctcctcagcaactcgtttgaagataagtggggacagcacttcgacagagtacgcgaaagcttaaaacaagatgcccttgccttcatcaaagaacaacgagtgcgatgtcttctgcaaggatcatggttctctaagccaacaccacgcaaggatagcagaggtgagctctcgcaagatcgccgagtcactcatggaacactttggagatatgcaaagctctcccacaatcgacgatacctgcattggggtgattttgctcttcgaactggccaggaaccaagcttagagatgctcgaacagaaactagacttgaggaacattagttctgtttcctccaatgtaacagcacctgccaacgactcgagagccgattctctaacgaccgaccaccccgccaatcaacactctaccaagatcactatttatagctacctcaacgcagacgaagcctcgaaaggtggtgaaggtcaggaacaaacgtcgcttgtattatatcccctcaaccccactttggcttcggagtggctggatggcctgctcatgcttcttgaccaagctccgataacgacggaaacggacaaactcatcagtctagttagtgactatgggatgaagattcgactgcttaaggttcggatggaggccacttacgaggggccgtcccctgatgcaggtgttgtaccaagtagagaaggcttagatgatgattactactatgccattggcatgtga

SEQ ID NO: 8703 - protein, 711 aa, Muscodor strobelii
  misc_feature: SGI Peptide ID NO. 562690
  misc_feature (250)..(437): Pfam Id: PF04727 Pfam Desc: ELMO/CED-12 family
  misc_feature (1)..(709): NCBI GI: 39965418 Blast Desc: MGG_09944 [Magnaporthe grisea 70-15] gi|145013151|gb|EDJ97792.1| MGG_09944 [Magnaporthe grisea 70-15]
  misc_feature (1)..(709): NCBI GI: 256733112 Blast Desc: [Nectria haematococca mpVI 77-13-4]
  misc_feature (1)..(709): NCBI GI: 46124963 Blast Desc: FG06859.1 [Gibberella zeae PH-1]
  misc_feature (1)..(709): NCBI GI: 85112817 Blast Desc: NCU03264 [Neurospora crassa OR74A] gi|28926198|gb|EAA35181.1| conserved [Neurospora crassa OR74A]
  misc_feature (1)..(709): NCBI GI: 156050333 Blast Desc: SS1G_07753 [Sclerotinia sclerotiorum 1980] gi|154692154|gb|EDN91892.1| SS1G_07753 [Sclerotinia sclerotiorum 1980]
  misc_feature (1)..(709): NCBI GI: 171695124 Blast Desc: protein product [Podospora anserina] gi|170947804|emb|CAP59967.1| protein product [Podospora anserina]
  misc_feature (55)..(709): NCBI GI: 154295045 Blast Desc: BC1G_13651 [Botryotinia fuckeliana B05.10] gi|150844427|gb|EDN19620.1| BC1G_13651 [Botryotinia fuckeliana B05.10]
  misc_feature (1)..(709): NCBI GI: 238845047 Blast Desc: ELMO/CED-12 family protein [Microsporum canis CBS 113480]
  misc_feature (1)..(709): NCBI GI: 261203351 Blast Desc: ELMO/CED-12 family protein [Ajellomyces dermatitidis SLH14081] gi|239586674|gb|EEQ69317.1| ELMO/CED-12 family protein [Ajellomyces dermatitidis SLH14081]
  misc_feature (1)..(707): NCBI GI: 240278893 Blast Desc: ELMO/CED-12 family protein [Ajellomyces capsulatus H143]
MDQAEIPALLARLASDEDASRKMAVFKLQSSINDPSFADVFINTGGLLILRRLIMSSGGNTLAYSLQSLSRLLEVDMGWEIFENPTSGDLVDRIVELIVTNPLVNILRGAMSILVSLVSHSPADSAPGTFGFRALRPAIAVYPSFFDLVVQKLQSADHALCATTLTLINALIRDAVSSEDKDFESTKTGTGEEWPKFIKRLQDLGLIKAVYSLMQSAALQDLAQPLLEFQSLTKVLLKKWREVRVDLERPEHRRALKSVHLASAPSKDYLNGSTDVKSQDTPESGKKGSRRHNPEKWRRLGFESESPASEFHTAGFLGMMDLTDYVRKNEDAFQKLLLEQSTRPLHERCPIARASLAVTLTLFEHFDCGRLEVEDTRGLQLSDGQHQDKLFRPLLLQWSRLHTAGLQAFLRLWKTTGAEQDDFDKVVELVRILVDQVIGQASRLKDVVEVEEELHEYDLAHLRELQMNLLSNSFEDKWGQHFDRVRESLKQDALAFIKEQRVRCLLQGSWFSKPTPRKDSRGELSQDRRVTHGTLWRYAKLSHNRRYLHWGDFALRTGQEPSLEMLEQKLDLRNISSVSSNVTAPANDSRADSLTTDHPANQHSTKITIYSYLNADEASKGGEGQEQTSLVLYPLNPTLASEWLDGLLMLLDQAPITTETDKLISLVSDYGMKIRLLKVRMEATYEGPSPDAGVVPSREGLDDDYYYAIGM

SEQ ID NO: 8704 - DNA, 2963 bp, Muscodor strobelii
  misc_feature: SGI EST ID NO. CUFF.20937.0
  misc_feature: Variant of the nucleotide sequence at SEQ ID NO 8702
tttgagaggctccgcgagcttcttttcaacccatcgcaacatttgcgaggttgagtcgagatctcctctctatgttcatcgatacaggcggcgcatcagatgcacagatgaacactctagttcgtgcgtccagcgccgtcctgttgtaaactataccggccaggaacatcacaacatcaccagctccccgcgccgagtcgtcgcaatccaacacaatccaacacaatccaacacaatccaacacaatccaacacaatccaacacaatccaacacaatccaacacaatccaacacaatccaacacaatccaacacaatccaacacaatccaacacaatcccgaaggctacgaacgctggggcgcgactgccacagacatggaccaagcagagatacccgcgctcctggcgcgactggccagcgacgaagatgcttcgcggaaaatggcagtcttcaagctacagtcatctatcaacgacccctcgttcgccgacgtcttcattaacactggaggtctgctcatcctgcggcggctcatcatgtcttccggcggcaacaccctcgcctactccctgcagagcctgagccggctgctcgaagtcgacatgggctgggagatcttcgagaaccctacctccggcgaccttgtcgaccgcattgtcgagctgatcgtcacgaaccccctcgtcaacatcctgcgtggcgcaatgtcgattctcgtttctctcgtcagccactcgcctgccgactcggcccctggcacctttggcttccgcgcactgcggccagccatcgccgtctacccctccttcttcgatctcgtcgtccagaagctgcagtccgccgaccacgctctgtgcgccaccactttgactcttatcaatgctctcattagggatgctgtctcgagcgaagataaagatttcgaaagcaccaagacgggcactggcgaagagtggcccaagttcatcaagagattgcaggacctgggccttatcaaggccgtctacagcctcatgcagagtgcggctctccaagacctggcccagccactgctagagttccaatcccttactaaggttttgctcaagaagtggagagaagtcagggtcgatctggagcggccggagcaccgccgcgcattgaagagcgttcatcttgccagtgcgccgagcaaggactacttgaacgggagcaccgatgtgaaatctcaagatacgccagagtctggaaagaaaggaagccggagacacaaccccgagaaatggagaagactagggttcgagagcgaaagcccggcttcggaattccacaccgctggctttctgggcatgatggatcttacagactacgttcgcaaaaacgaggatgctttccagaagctactgttggagcaatccactcggccgttgcatgagcgctgtcctatagctcgcgctagtctggcagtcacgctcactttgttcgagcacttcgactgtggacggttagaagtggaggatactcggggtttacagctttctgacggacaacatcaagataagctgtttcggccattacttcttcaatggtcaagactacacacagcgggtcttcaagctttcctaaggctgtggaaaactacaggagcagaacaagacgatttcgacaaggttgtagagctggttcgtattctggttgaccaggttataggtcaagctagccggctaaaagacgtcgtcgaagtggaggaggagctccatgagtacgacctggcgcatctacgtgagctacagatgaatctcctcagcaactcgtttgaagataagtggggacagcacttcgacagagtacgcgaaagcttaaaacaagatgcccttgccttcatcaaagaacaacgagtgcgatgtcttctgcaaggatcatggttctctaagccaacaccacgcaaggatagcagaggtgagctctcgcaagatcgccgagtcactcatggaacactttggagatatgcaaagctctcccacaatcgacgatacctgcattggggtgattttgctcttcgaactggccaggaaccaagcttagagatgctcgaacagaaactagacttgaggaacattagttctgtttcctccaatgtaacagcacctgccaacgactcgagagccgattctctaacgaccgaccaccccgccaatcaacactctaccaagatcactatttatagctacctcaacgcagacgaagcctcgaaaggtggtgaaggtcaggaacaaacgtcgcttgtattatatcccctcaaccccactttggcttcggagtggctggatggcctgctcatgcttcttgaccaagctccgataacgacggaaacggacaaactcatcagtctagttagtgactatgggatgaagattcgactgcttaaggttcggatggaggccacttacgaggggccgtcccctgatgcaggtgttgtaccaagtagagaaggcttagatgatgattactactatgccattggcatgtgaggcacccggtctctgcgagcaatcgctattctcttgttattttctttttaattcacaaaaggaggcccagaaagcgagaggcgtttggagtttgccctctacatctactgcgtgaggcaatgtaccacgaaaccatctgtaagagtatgacgatacatgtgccacaggactggccgtatcatgttccacttggtgtattctagcatagagaaaaccaattgggcaatgtgacagactctgtgtccgttactttactatcatttcctcgtctaccaagtgtgaaaatattgtccacattgaaaaatgatcagtgattatctatgtcgatgggatgcagtagtcgcgtcgcactgcgtctcaaaagcaacagatacctgcaagtacccagctcgacaggcaagaagacgacgagtctgcagtccatcatacaagccatgtgattcgatctccg

SEQ ID NO: 8705 - DNA, 1350 bp, Muscodor strobelii
  misc_feature: SGI cDNA ID NO. 562691
  misc_feature: Encodes the peptide sequence at SEQ ID NO 8706
atgccgtcccgccaatccagtccccccaccagctctactgtcgagcgatcaaataaaggcctactaaggggaggtgtatggcactgcaattgctccccgcgacttccagctgtcgttaggactgtcgttaaaccaaacaagaacaagggaagaaagttctatgtctgccccgtagagaaaaacgaaggaaatcgatgcgacttctatttgtggtctgaagacgcacgagagcgagagaagaactctctcatgacaaacaaccgcagcgagatgaagtcaccacctaagaagcagatgacaatccacgaagccatcagtccgcggaaagaaaagcgaaagtcgggtgaggtcacgaatctcaccaggctggaggatctacagtcggttgtcaaaggagagtcttcaaccgcctcaaagcgagcgccgaaaccggttagcaccaacaagtcattcgcaagtgctgggagttcgactttgaaaggcgacagtattggtacatcttcgcgaccagagcaagtgatttatgacccaacaccaagcgcatcaagcgaagacgaagacgatgatgaggtggtggaggtgactcctttgaaaggaaaggggaaaggaaaggaagttgtgtacaaccaaccacagtctagcgcaatggcaaagtccttggctacaccaagcgcaggctctaagaggaagcgcccagctggggacaatgacaattttctcgatgaactctcgtcgggcgccgaagaggagtttatcgccatgaccgacaaatctactaaattcaaggacgaatacatcacgcctaaaacctctcgcgctgttgatgttgagaacggaatgcctacaccgtcactcaccgacaagggcaaatcggtacaaagaaaattgttcccagagaaagttacagagtcgagtggtccatcgactagtaagcgacagcgattagaagatggcccctccacttcacaaccacaaaagcccgacgatgctacaccacacgggaaggctgaaagtggcccatcaccgtcaccaactccaatctccccagcagcagcaaatttgacgcaagacgtcatgtcacttctcaaggatgagaagattaacaaggatacgcgcaacgcagtgcgcgaagtccttgacaaatacaaggcgcgagcaaagggactagagcaagggcgaaatgcctctcgcgaggagctgaagaaaagccaggcaaaaattgtcgagcttcaggcaaatattgacgagctccagtccaagattgtcgagctccaatccaagaccgcgcttcttcagaataatagagtccaaacgcgaacaagccttatggacatctatcacagggcttaa

SEQ ID NO: 8706 - protein, 449 aa, Muscodor strobelii
  misc_feature: SGI Peptide ID NO. 562691
  misc_feature (27)..(75): Pfam Id: PF06839 Pfam Desc: GRF zinc finger
  misc_feature (12)..(446): NCBI GI: 256732637 Blast Desc: NECHADRAFT_79032 [Nectria haematococca mpVI 77-13-4]
  misc_feature (2)..(420): NCBI GI: 154319253 Blast Desc: BC1G_02578 [Botryotinia fuckeliana B05.10] gi|150857009|gb|EDN32201.1| BC1G_02578 [Botryotinia fuckeliana B05.10]
  misc_feature (1)..(446): NCBI GI: 46125491 Blast Desc: FG07123.1 [Gibberella zeae PH-1]
  misc_feature (17)..(107): NCBI GI: 242822712 Blast Desc: conserved [Talaromyces stipitatus ATCC 10500] gi|218712864|gb|EED12289.1| conserved [Talaromyces stipitatus ATCC 10500]
  misc_feature (17)..(96): NCBI GI: 212546657 Blast Desc: conserved [Penicillium marneffei ATCC 18224] gi|210065002|gb|EEA19097.1| conserved [Penicillium marneffei ATCC 18224]
  misc_feature (20)..(93): NCBI GI: 119195959 Blast Desc: CIMG_02354 [Coccidioides immitis RS]
  misc_feature (19)..(90): NCBI GI: 121705112 Blast Desc: ACLA_035960 [Aspergillus clavatus NRRL 1] gi|119398965|gb|EAW09393.1| ACLA_035960 [Aspergillus clavatus NRRL 1]
  misc_feature (19)..(93): NCBI GI: 119492543 Blast Desc: NFIA_069110 [Neosartorya fischeri NRRL 181] gi|119411797|gb|EAW21740.1| NFIA_069110 [Neosartorya fischeri NRRL 181]
  misc_feature (1)..(90): NCBI GI: 255944807 Blast Desc: Pc20g06430 [Penicillium chrysogenum Wisconsin 54-1255] gi|211587906|emb|CAP85972.1| Pc20g06430 [Penicillium chrysogenum Wisconsin 54-1255]
  misc_feature (2)..(83): NCBI GI: 226288264 Blast Desc: [Paracoccidioides brasiliensis Pb18]
MPSRQSSPPTSSTVERSNKGLLRGGVWHCNCSPRLPAVVRTVVKPNKNKGRKFYVCPVEKNEGNRCDFYLWSEDAREREKNSLMTNNRSEMKSPPKKQMTIHEAISPRKEKRKSGEVTNLTRLEDLQSVVKGESSTASKRAPKPVSTNKSFASAGSSTLKGDSIGTSSRPEQVIYDPTPSASSEDEDDDEVVEVTPLKGKGKGKEVVYNQPQSSAMAKSLATPSAGSKRKRPAGDNDNFLDELSSGAEEEFIAMTDKSTKFKDEYITPKTSRAVDVENGMPTPSLTDKGKSVQRKLFPEKVTESSGPSTSKRQRLEDGPSTSQPQKPDDATPHGKAESGPSPSPTPISPAAANLTQDVMSLLKDEKINKDTRNAVREVLDKYKARAKGLEQGRNASREELKKSQAKIVELQANIDELQSKIVELQSKTALLQNNRVQTRTSLMDIYHRA

SEQ ID NO: 8707 - DNA, 1989 bp, Muscodor strobelii
  misc_feature: SGI EST ID NO. CUFF.20940.0
  misc_feature: Variant of the nucleotide sequence at SEQ ID NO 8705
attaaagcccaaggttccgtcaattccgctctactgagaacaacgttatttctagcaatacttacatgatttcgccattctagatcgctgagcgagctgcattcaattttcaaggctctgcttcatataataccctcaaaacaggttgctcttttgcataggatcaggcacctagcgggtttggacaggtccgccctttgtcactatgccgtcccgccaatccagtccccccaccagctctactgtcgagcgatcaaataaaggcctactaaggggaggtgtatggcactgcaattgctccccgcgacttccagctgtcgttaggactgtcgttaaaccaaacaagaacaagggaagaaagttctatgtctgccccgtagagaaaaacgaaggaaatcgatgcgacttctatttgtggtctgaagacgcacgagagcgagagaagaactctctcatgacaaacaaccgcagcgagatgaagtcaccacctaagaagcagatgacaatccacgaagccatcagtccgcggaaagaaaagcgaaagtcgggtgaggtcacgaatctcaccaggctggaggatctacagtcggttgtcaaaggagagtcttcaaccgcctcaaagcgagcgccgaaaccggttagcaccaacaagtcattcgcaagtgctgggagttcgactttgaaaggcgacagtattggtacatcttcgcgaccagagcaagtgatttatgacccaacaccaagcgcatcaagcgaagacgaagacgatgatgaggtggtggaggtgactcctttgaaaggaaaggggaaaggaaaggaagttgtgtacaaccaaccacagtctagcgcaatggcaaagtccttggctacaccaagcgcaggctctaagaggaagcgcccagctggggacaatgacaattttctcgatgaactctcgtcgggcgccgaagaggagtttatcgccatgaccgacaaatctactaaattcaaggacgaatacatcacgcctaaaacctctcgcgctgttgatgttgagaacggaatgcctacaccgtcactcaccgacaagggcaaatcggtacaaagaaaattgttcccagagaaagttacagagtcgagtggtccatcgactagtaagcgacagcgattagaagatggcccctccacttcacaaccacaaaagcccgacgatgctacaccacacgggaaggctgaaagtggcccatcaccgtcaccaactccaatctccccagcagcagcaaatttgacgcaagacgtcatgtcacttctcaaggatgagaagattaacaaggatacgcgcaacgcagtgcgcgaagtccttgacaaatacaaggcgcgagcaaagggactagagcaagggcgaaatgcctctcgcgaggagctgaagaaaagccaggcaaaaattgtcgagcttcaggcaaatattgacgagctccagtccaagattgtcgagctccaatccaagaccgcgcttcttcagaataatagagtccaaacgcgaacaagccttatggacatctatcacagggcttaagactcagtgcgtttgcttttcacaaggaatgaataaggctcttgcatcgtcatggttaagggagaccggatagatgaggagcgttataatgacgaagacgatgggcccgtattaatgaagctttgataccagactttcggaaagttatggatatgataagcaatgtaggcgtgggatgaaacatagtgattatggcaaaggcgaacaacatgtggtggccttcccgggatttggaaatctcgtgacgcattttcctaggaaggaataaggataccctttgtgttattacagtatgagtctgcctcgcaagacggggcaaaatgcccacagattctatacaaacaatcattctcgttgcaccatgagttcttattcttcatatacagctgataactgctggcttgggcgtagtcttgcttgcgagaatgcatttg

SEQ ID NO: 8708 - DNA, 504 bp, Muscodor strobelii
  misc_feature: SGI cDNA ID NO. 562692
  misc_feature: Encodes the peptide sequence at SEQ ID NO 8709
atgacagactgcattactatctccattggagtagttgctttgatcttaagccccttggtgaagaaaaggatcagcaaatcgatgtcagtgcacttgggcgccagcaccggctacggaaatggcgggaagctggaagccctccgtgttcctcccgaaggaaaaccagtcagggtctcgatcgagactgcagtcggtcggtgccaagttgggccccatgcacaactcattgaggtcccaatactttcagaattctggaatgcagaaaacgagcaccagcatgagaagcatcacattggcaagggcccaaatagctttgaccctgactacgagggttattggtgtatttggtggtgcaatgatgctacaagcagtggagcaatgctccagaacaccaacattcctcaggaattccttgcaatagttggggcttgtccggcgtatggggatatcttctaccaccgtgttgatgaggacgaagccgaagtgttgttgtgctgggattga

SEQ ID NO: 8709 - protein, 167 aa, Muscodor strobelii
  misc_feature: SGI Peptide ID NO. 562692
MTDCITISIGVVALILSPLVKKRISKSMSVHLGASTGYGNGGKLEALRVPPEGKPVRVSIETAVGRCQVGPHAQLIEVPILSEFWNAENEHQHEKHHIGKGPNSFDPDYEGYWCIWWCNDATSSGAMLQNTNIPQEFLAIVGACPAYGDIFYHRVDEDEAEVLLCWD

SEQ ID NO: 8710 - DNA, 1173 bp, Muscodor strobelii
  misc_feature: SGI cDNA ID NO. 562693
  misc_feature: Encodes the peptide sequence at SEQ ID NO 8711
atggaatcggctgcgcagtgcttgactgctccgatcgagtcgggctccacggctgccatcgcaacatcggctatagcaactctcgggctgctgtggatgacacgtcgagcgctatggccccagcagcagcagatcatcaaaggcgccctcactactagcataaacaagctatcgaaggctgaaattgcacaagtatcctacccgccaaattttttcccgggcgcccgcgacgtagatacgccatatggtaccatcagagtttacgagtttgggccggaagagggccagaaagtgctattaattcatggcatcagcacctcttgtatgacattgggcgacgtaacaaattctctcgttgagaaaggatgtcgcgttatgttgtttgacctctttggacgaggttatagcgacgcgcctggcgatctcccttatgatacacgtctgtttgtttcgcaagttctgcttgtgttggcctcttcacctttgccatggacaggtaaaaatgggcttagaatcattggctattcacttggtggtgctattgcggccaactttgcagcgactttcccagaaatggtagaatctctgattcttcttgcgcctgcaggtgtaattcgtcatgagaatataggccgagccagtcggctcatttttacttctggtttagtaccagagcgtattttggcatggctaactaaaagccggctgcggtcgcctattgcaaacgcggtgaagaagaagcagaagaaagtcttatcacccattgatgacaaagaggacttcgtggatgttgccgtacaagaagccgcagcgacatcgacggacgcgccaactgcctttgagctagaagttacgcgcttcgtccactggagtctcgacttcaaccccggatttgtgcctgcgatgatgtcgactatgcggtatgcgccactgatggatcagcagccatactggcgcaaactacgacaacggaagcttggtaccacagcagtcatcgttggccggaaagatacactcgtgcaacacgaagactacgaggaagatgtcctacctctgcttggtgggcgcgagaatgtcttttggcgcatgatagatgaaggtggacacaacttcccttttacccaccctcaacagacactgaaactcattcacgagttttggaatatggagtag

SEQ ID NO: 8711 - protein, 390 aa, Muscodor strobelii
  misc_feature: SGI Peptide ID NO. 562693
  misc_feature (123)..(385): Pfam Id: PF00561 Pfam Desc: alpha/beta hydrolase fold
  misc_feature (15)..(390): NCBI GI: 256733126 Blast Desc: NECHADRAFT_68433 [Nectria haematococca mpVI 77-13-4]
  misc_feature (30)..(387): NCBI GI: 46125009 Blast Desc: FG06882.1 [Gibberella zeae PH-1]
  misc_feature (20)..(387): NCBI GI: 39965398 Blast Desc: MGG_09942 [Magnaporthe grisea 70-15] gi|145013155|gb|EDJ97796.1| MGG_09942 [Magnaporthe grisea 70-15]
  misc_feature (42)..(388): NCBI GI: 145610141 Blast Desc: MGG_12616 [Magnaporthe grisea 70-15] gi|145017511|gb|EDK01874.1| MGG_12616 [Magnaporthe grisea 70-15]
  misc_feature (22)..(386): NCBI GI: 255943001 Blast Desc: Pc18g04340 [Penicillium chrysogenum Wisconsin 54-1255] gi|211587002|emb|CAP94658.1| Pc18g04340 [Penicillium chrysogenum Wisconsin 54-1255]
  misc_feature (16)..(388): NCBI GI: 212540580 Blast Desc: alpha/beta hydrolase family protein, [Penicillium marneffei ATCC 18224] gi|210067744|gb|EEA21836.1| alpha/beta hydrolase family protein, [Penicillium marneffei ATCC 18224]
  misc_feature (22)..(388): NCBI GI: 145238718 Blast Desc: An07g09320 [Aspergillus niger] gi|134076501|emb|CAK39697.1| protein product [Aspergillus niger]
  misc_feature (11)..(387): NCBI GI: 171683891 Blast Desc: protein product [Podospora anserina] gi|170941906|emb|CAP67558.1| protein product [Podospora anserina]
  misc_feature (7)..(388): NCBI GI: 242801483 Blast Desc: alpha/beta hydrolase family protein, [Talaromyces stipitatus ATCC 10500] gi|218717122|gb|EED16543.1| alpha/beta hydrolase family protein, [Talaromyces stipitatus ATCC 10500]
  misc_feature (41)..(388): NCBI GI: 85113693 Blast Desc: NCU03158 [Neurospora crassa OR74A] gi|28926351|gb|EAA35328.1| conserved [Neurospora crassa OR74A]
MESAAQCLTAPIESGSTAAIATSAIATLGLLWMTRRALWPQQQQIIKGALTTSINKLSKAEIAQVSYPPNFFPGARDVDTPYGTIRVYEFGPEEGQKVLLIHGISTSCMTLGDVTNSLVEKGCRVMLFDLFGRGYSDAPGDLPYDTRLFVSQVLLVLASSPLPWTGKNGLRIIGYSLGGAIAANFAATFPEMVESLILLAPAGVIRHENIGRASRLIFTSGLVPERILAWLTKSRLRSPIANAVKKKQKKVLSPIDDKEDFVDVAVQEAAATSTDAPTAFELEVTRFVHWSLDFNPGFVPAMMSTMRYAPLMDQQPYWRKLRQRKLGTTAVIVGRKDTLVQHEDYEEDVLPLLGGRENVFWRMIDEGGHNFPFTHPQQTLKLIHEFWNME

SEQ ID NO: 8712 - DNA, 3424 bp, Muscodor strobelii
  misc_feature: SGI EST ID NO. CUFF.20953.0
  misc_feature: Variant of the nucleotide sequence at SEQ ID NO 8710
acaaggccacagatcctagtttggtccaagcagttataataggacaagacatcggcctttggagtggtaatcggcggcacatggaaatcgccgaatgcttcatgctaatccctataaatatgatgcggtatcgaggcagattcaaacattcatcgtatcccaggatcgaagtgcatgaaaatgaccaaggtgaggttttggtagagaaatggaaggcttggtctttagcagaatcatggaaaaggcttatattccactgcttcactcgggatgctcaatcatcaatgacaacactgtctagtccgctcatgagctacgcggagatgacacttccactccccgaggctcgtgaactttggttcgccaaaacagcggaagaatggaaaaacgagtatcttgccagattttctggtgaaaataaacagctgccgtctcttggagatcttcttcgtggttttgatccacatcttgctgatcacaagggcttagatgttcagtatagtctatggatataccttcacgccttttggagcctgatctatgaatggcggcgcttgtgttcagtcctccggtctgatccgttctcgagcagccagtccgctggatcagatctcatccttaactccagacatcaagagttgtgtaaaaacttgacaaatttccaactaatgacgtcggactggcatgcttatttctccgctcaggaggctttgttactgaatctacttggggtcaatctgtacgtatcgcttgacgatcttcaattatttgccgggaaggacggcgaagagccagcgcggaaagcctatcccatacttcaacaatggtcggaaacagctgagtgtcgacgagctctctggcatgcaggccaagttctgcggcatgcaaagacgtttccgtgtggccatctgaagggtttctacgctgcggctgtacttcatgcggcactagcgttatggacttacggcgttgtgacacgagcgaggaatcgatattccgggagcgtgatacgcgaagccgtctttattgatggcgaagaaacgatgctggtacaacgattcatcagctttgggcctgggagacctgtgatccgaagtcccaaatccgaccatgtcgaattagcagtagatgatcctcgagcaactatggaaactgcggagaacattctgagaagaaattacgactcgggtcaagaaattctgtcgccgatggtggaaaacatttgttacttgttgaaacaactaggaggcgccgcgtgggctgtgggcttgggatgaggacataggtcataagaacggctgggcactacgacacgaccttatcgaagaggagttatggataccatttcacccagaatagcagcacataatgtacgttatatgaaacatatcatgtcagtacgaaacttgacgcaatattcaaacaactattatcgaagctttctagttcatgaagttcacctgtggtgaattcttaggtaagtgctgcgagttgcttcagtagtaacctaagaatgcaagggatcagttgggtgctccacacgtgtctcggctttggtattttatcgaaagtctccgttatatatcaggccttgcgatgagtctttcgagttgtcctcaatctcttcgaaattatacgttagcctcgaaggagataggaatgttggcgccacctcaatggcggacctcggaaaccccagaattacatagcggggcttttcgctttgtgcattcatgtgatcacgactggaccgtaatgtctcacactcactttctacgaccacattcccatcatagaacaacattaattgcaaatcacttgttttctgatcagttccacatcgcacaagtgattgtagactgctgtccttggcgaggagcttgtccgaaaaccttgccagtcagagatttaggctaggttttcgtcaagcaaatatcagtgccatcccaagacttacacagggaggtcgcgttgactgcgttatgagataaatcttgcgtcatggaatcggctgcgcagtgcttgactgctccgatcgagtcgggctccacggctgccatcgcaacatcggctatagcaactctcgggctgctgtggatgacacgtcgagcgctatggccccagcagcagcagatcatcaaaggcgccctcactactagcataaacaagctatcgaaggctgaaattgcacaagtatcctacccgccaaattttttcccgggcgcccgcgacgtagatacgccatatggtaccatcagagtttacgagtttgggccggaagagggccagaaagtgctattaattcatggcatcagcacctcttgtatgacattgggcgacgtaacaaattctctcgttgagaaaggatgtcgcgttatgttgtttgacctctttggacgaggttatagcgacgcgcctggcgatctcccttatgatacacgtctgtttgtttcgcaagttctgcttgtgttggcctcttcacctttgccatggacaggtaaaaatgggcttagaatcattggctattcacttggtggtgctattgcggccaactttgcagcgactttcccagaaatggtagaatctctgattcttcttgcgcctgcaggtgtaattcgtcatgagaatataggccgagccagtcggctcatttttacttctggtttagtaccagagcgtattttggcatggctaactaaaagccggctgcggtcgcctattgcaaacgcggtgaagaagaagcagaagaaagtcttatcacccattgatgacaaagaggacttcgtggatgttgccgtacaagaagccgcagcgacatcgacggacgcgccaactgcctttgagctagaagttacgcgcttcgtccactggagtctcgacttcaaccccggatttgtgcctgcgatgatgtcgactatgcggtatgcgccactgatggatcagcagccatactggcgcaaactacgacaacggaagcttggtaccacagcagtcatcgttggccggaaagatacactcgtgcaacacgaagactacgaggaagatgtcctacctctgcttggtgggcgcgagaatgtcttttggcgcatgatagatgaaggtggacacaacttcccttttacccaccctcaacagacactgaaactcattcacgagttttggaatatggagtagatattagctaggggcttatgagcgagaccagttccagagtttcatggtaattactagattagacaagcgtagacgaccatttcacgattgatacactgcatgggtttcattaatatacagttattacagccacagaattaatacgtaggacctgcctgattttctgactaatcttctcggagccattttagcaaagagataacagctaccaatgggcaaactaccttagaaatctattgagtagtcgtac

SEQ ID NO: 8713 - DNA, 1860 bp, Muscodor strobelii
  misc_feature: SGI cDNA ID NO. 562694
  misc_feature: Encodes the peptide sequence at SEQ ID NO 8714
atggctatcaagccagacttaagtccctatccagtctcaaacgaagtgacagcacagaaccaatacgatgaccatcaagatgcgccgttctctgattttctccaaaatgtgttgtacgcgccgtctctagatccatcccggctagtcgatgcccaaggtttaactgttttggatttctgtgacaatgaaaactacgaactgaccgatgttgatttcggaatgctcgatcactggaactccgaagagcaatcttccacaatgacacaagctgtctccccacaaacagatgattcttcagtagatatgaccactatccgacgaaaactggttaagatttgggctgaatcaccttggcgatggaatcccgataaagatcacggtttcggtttccaggcacaatcatttgcttctaccgagctcatggatatatttgtacatactttcctcgctgcgcatctctgctctgttgcgaacttcattcatttcggtactttaaagttcagcgcacaatcacctgaatggcttgctgtggccgcagcttctggcgcaattctaactcctatccctgcattgagaaagttcggagttgctttgcaagaagcggttcggttggccattcctgcaagattcgaagagaaaaacaaggccacagatcctagtttggtccaagcagttataataggacaagacatcggcctttggagtggtaatcggcggcacatggaaatcgccgaatgcttcatgctaatccctataaatatgatgcggtatcgaggcagattcaaacattcatcgtatcccaggatcgaagtgcatgaaaatgaccaaggtgaggttttggtagagaaatggaaggcttggtctttagcagaatcatggaaaagtccgctcatgagctacgcggagatgacacttccactccccgaggctcgtgaactttggttcgccaaaacagcggaagaatggaaaaacgagtatcttgccagattttctggtgaaaataaacagctgccgtctcttggagatcttcttcgtggttttgatccacatcttgctgatcacaagggcttagatgttcagtatagtctatggatataccttcacgccttttggagcctgatctatgaatggcggcgcttgtgttcagtcctccggtctgatccgttctcgagcagccagtccgctggatcagatctcatccttaactccagacatcaagagttgtgtaaaaacttgacaaatttccaactaatgacgtcggactggcatgcttatttctccgctcaggaggctttgttactgaatctacttggggtcaatctgtacgtatcgcttgacgatcttcaattatttgccgggaaggacggcgaagagccagcgcggaaagcctatcccatacttcaacaatggtcggaaacagctgagtgtcgacgagctctctggcatgcaggccaagttctgcggcatgcaaagacgtttccgtgtggccatctgaagggtttctacgctgcggctgtacttcatgcggcactagcgttatggacttacggcgttgtgacacgagcgaggaatcgatattccgggagcgtgatacgcgaagccgtctttattgatggcgaagaaacgatgctggtacaacgattcatcagctttgggcctgggagacctgtgatccgaagtcccaaatccgaccatgtcgaattagcagtagatgatcctcgagcaactatggaaactgcggagaacattctgagaagaaattacgactcgggtcaagaaattctgtcgccgatggtggaaaacatttgttacttgttgaaacaactaggaggcgccgcgtgggctgtgggcttgggatga

SEQ ID NO: 8714 - protein, 619 aa, Muscodor strobelii
  misc_feature: SGI Peptide ID NO. 562694
  misc_feature (29)..(617): NCBI GI: 256733126 Blast Desc: NECHADRAFT_68433 [Nectria haematococca mpVI 77-13-4]
  misc_feature (11)..(619): NCBI GI: 261356391 Blast Desc: C6 transcription factor RegA [Verticillium albo-atrum VaMs.102]
  misc_feature (15)..(540): NCBI GI: 171696022 Blast Desc: protein product [Podospora anserina] gi|170948253|emb|CAP60417.1| protein product [Podospora anserina]
  misc_feature (28)..(617): NCBI GI: 39965481 Blast Desc: MGG_09950 [Magnaporthe grisea 70-15] gi|145013142|gb|EDJ97783.1| MGG_09950 [Magnaporthe grisea 70-15]
  misc_feature (134)..(617): NCBI GI: 46125009 Blast Desc: FG06882.1 [Gibberella zeae PH-1]
  misc_feature (128)..(523): NCBI GI: 164427720 Blast Desc: NCU02787 [Neurospora crassa OR74A] gi|157071858|gb|EAA34707.2| [Neurospora crassa OR74A]
  misc_feature (64)..(613): NCBI GI: 145237156 Blast Desc: An07g01380 [Aspergillus niger] gi|134075691|emb|CAK96583.1| protein product [Aspergillus niger]
  misc_feature (30)..(613): NCBI GI: 115399834 Blast Desc: conserved [Aspergillus terreus NIH2624] gi|114191172|gb|EAU32872.1| conserved [Aspergillus terreus NIH2624]
  misc_feature (133)..(613): NCBI GI: 119488497 Blast Desc: C2H2 type zinc finger domain protein [Neosartorya fischeri NRRL 181] gi|119410857|gb|EAW20802.1| C2H2 type zinc finger domain protein [Neosartorya fischeri NRRL 181]
  misc_feature (133)..(613): NCBI GI: 146324564 Blast Desc: C6 and C2H2 transcription factor RegA-like [Aspergillus fumigatus Af293] gi|129555409|gb|EBA27208.1| C6 and C2H2 transcription factor RegA-like, [Aspergillus fumigatus
MAIKPDLSPYPVSNEVTAQNQYDDHQDAPFSDFLQNVLYAPSLDPSRLVDAQGLTVLDFCDNENYELTDVDFGMLDHWNSEEQSSTMTQAVSPQTDDSSVDMTTIRRKLVKIWAESPWRWNPDKDHGFGFQAQSFASTELMDIFVHTFLAAHLCSVANFIHFGTLKFSAQSPEWLAVAAASGAILTPIPALRKFGVALQEAVRLAIPARFEEKNKATDPSLVQAVIIGQDIGLWSGNRRHMEIAECFMLIPINMMRYRGRFKHSSYPRIEVHENDQGEVLVEKWKAWSLAESWKSPLMSYAEMTLPLPEARELWFAKTAEEWKNEYLARFSGENKQLPSLGDLLRGFDPHLADHKGLDVQYSLWIYLHAFWSLIYEWRRLCSVLRSDPFSSSQSAGSDLILNSRHQELCKNLTNFQLMTSDWHAYFSAQEALLLNLLGVNLYVSLDDLQLFAGKDGEEPARKAYPILQQWSETAECRRALWHAGQVLRHAKTFPCGHLKGFYAAAVLHAALALWTYGVVTRARNRYSGSVIREAVFIDGEETMLVQRFISFGPGRPVIRSPKSDHVELAVDDPRATMETAENILRRNYDSGQEILSPMVENICYLLKQLGGAAWAVGLG

SEQ ID NO: 8715 - DNA, 2169 bp, Muscodor strobelii
  misc_feature: SGI EST ID NO. CUFF.20956.0
  misc_feature: Variant of the nucleotide sequence at SEQ ID NO 8713
ttagaattgatgccgttaatcccgtgagatatgcgggtgaattgcgccaggaatgacgagaccctggttcctggcaccgcgttcacctaaaggtcgccgaaccctgtattacaactttgccgtgacttgcttcacttctattgacaactctgagaacctatggcagccacatgcatcataactctgcaagttctatcgaggacggacttgatttcacgtccgaatttcttgctgtgactaaatataaggacttctagacaccaataatgtcagcagactcaagccgacccccctttgggtaaaatcgacatgtcaacttcttcattatctcacttattgcaaagtactgagtctcaagatgccccttcagcaaatgctagccgagaccacaacactgtcggcccgcgcgagcttttacaggttggaacaaacaattcatcatcatcgtcatcaatttctctaccactcccgcctgtcatctcatctctgccgcaaggtgaaaaccagctaccacatccaagtatctcaggccagttgcatggcggtccagcaaactccaacacaccgactagtcatgtgacacccgggctataccagtgtgcggactgcaaaaaacgatacagtcgtccagagcaccttgctcgacatatccaaacgcatactctaggcaaacgatttgcttgccaagtgtgtggcaaggcttttgcacgtgcagatcttctcaagcgacatactgcaaatcacgaaaatgatggtgatagcacgaagaagcgccgccgcatagatgcgtccccaagcgcaagccgtgtatcgcatgcatgtagaccatgtgcggcggcgagagtcaagtgcgaggagatcaaaccttgtcgtcggtgtcagaaaagaggcttgacatgcgagactccatcaaccgaggatcgatccgaggcggcaatgcatctgctacatttgtctggagatatctcttcccggacacccggtacagatacatctcaagtggcgaactcgctgcccattctaaccaatgcactccatactctccagagtgatgtgtccagtatggctatcaagccagacttaagtccctatccagtctcaaacgaagtgacagcacagaaccaatacgatgaccatcaagatgcgccgttctctgattttctccaaaatgtgttgtacgcgccgtctctagatccatcccggctagtcgatgcccaaggtttaactgttttggatttctgtgacaatgaaaactacgaactgaccgatgttgatttcggaatgctcgatcactggaactccgaagagcaatcttccacaatgacacaagctgtctccccacaaacagatgattcttcagtagatatgaccactatccgacgaaaactggttaagatttgggctgaatcaccttggcgatggaatcccgataaagatcacggtttcggtttccaggcacagggcaatttacctataccttttagggatccagcgagtcgtcaatttcaaaacagcaagaaacaaatggaccgagtaatacaagacaagggtgagtagtattgtagactgccctcttgttctggttcgtcttggcaagagcgaatgccgaactacggaggaactcgacgcgattattacgatgcctacgcatgttttgctgggtgtctcctgcatagggattactaacatacaatattgtctagtggatttatcaagtcgtgacaaaatccttgccatagtcttaagcacatgcagagaccacgctttgcggacgcgaactgcttcgtgagtgcataattcttacttcattcgtcccatgaatggtactttccccaaacaagacggcaataactcggaaccgaacaatgttgtgttgaataattctatcttagcggcttatagtaccatatcacattggatatgtgtcaaggtattgacgtgctacagatcatttgcttctaccgagctcatggatatatttgtacatactttcctcgctgcgcatctctgctctgttgcgaacttcattcatttcggtactttaaagttcagcgcacaatcacctgaatggcttgctgtggccgcagcttctggcgcaattctaactcctatccctgcattgagaaagttcggagttgctttgcaagaagcggttcggttggccattcc

SEQ ID NO: 8716 - DNA, 759 bp, Muscodor strobelii
  misc_feature: SGI cDNA ID NO. 562695
  misc_feature: Encodes the peptide sequence at SEQ ID NO 8717
atgtcgacttcccctgtggcacttataacagctggtagtgccggcctaggcgccgctacggcaaaactttttgcacagaatggatatcgtgttgtagtgaattacaacaataatgtccaacgagcagaagatctcctggctgaattaccggacttatctcctctaccaaaagagagcacgaatttcgctataatcaaagcggatttggccagtcgtgaagagctcaagagtctggtaaaggaaacgggtgataaatttggccggatagatgttcttttctcgaatggcggctggactagggccaggggctgggacagcatcgatgataactgccacgaggacgagtgggaccaggctttcaatatgaatgtgaaagctcacttatggctcatgcaagctgcaaaaccatacctgaatgagagcgaaggcgcatttatcactacggcttccctggcggcacttactgtgagtggaagttcgttggcgtacgctgttacgaaggctgcgcaggtacatcttgtcaaggctcttgctgttatggcggcgcccaaaatccgcgtgaattcggtatcaccgggcctgttgctcactgattgggcgaatcgtttcacagacgagcaaaaacaagctcatttgcagaaaactaagttaaagcgtattgttactgtcgaagatgttgcggaacaggtctttacgtttgcaaagagcaaaagtacaacgggtgttaacatcatcatggatgctggattcaatctgtaa

SEQ ID NO: 8717 - protein, 252 aa, Muscodor strobelii
  misc_feature: SGI Peptide ID NO. 562695
  misc_feature (5)..(182): Pfam Id: PF00106 Pfam Desc: short chain dehydrogenase
  misc_feature (7)..(249): Pfam Id: PF01370 Pfam Desc: NAD dependent epimerase/dehydratase family
  misc_feature (5)..(252): NCBI GI: 261356392 Blast Desc: short-chain dehydrogenase [Verticillium albo-atrum VaMs.102]
  misc_feature (1)..(252): NCBI GI: 156056052 Blast Desc: SS1G_05378 [Sclerotinia sclerotiorum 1980] gi|154703162|gb|EDO02901.1| SS1G_05378 [Sclerotinia sclerotiorum 1980]
  misc_feature (1)..(252): NCBI GI: 154310393 Blast Desc: BC1G_07116 [Botryotinia fuckeliana B05.10] gi|150851448|gb|EDN26641.1| BC1G_07116 [Botryotinia fuckeliana B05.10]
  misc_feature (3)..(252): NCBI GI: 85117464 Blast Desc: NCU08361 [Neurospora crassa OR74A] gi|28927070|gb|EAA36028.1| conserved [Neurospora crassa OR74A]
  misc_feature (2)..(252): NCBI GI: 256733127 Blast Desc: NECHADRAFT_92754 [Nectria haematococca mpVI 77-13-4]
  misc_feature (1)..(249): NCBI GI: 189211201 Blast Desc: oxidoreductase ucpA [Pyrenophora tritici-repentis Pt-1C-BFP] gi|187978024|gb|EDU44650.1| oxidoreductase ucpA [Pyrenophora tritici-repentis Pt-1C-BFP]
  misc_feature (1)..(252): NCBI GI: 67524527 Blast Desc: AN2721.2 [Aspergillus nidulans FGSC A4] gi|40743833|gb|EAA63019.1| AN2721.2 [Aspergillus nidulans FGSC A4] gi|259486368|tpe|CBF84149.1| TPA: short chain dehydrogenase,
  misc_feature (1)..(252): NCBI GI: 119494109 Blast Desc: short-chain dehydrogenase [Neosartorya fischeri NRRL 181] gi|119412136|gb|EAW22077.1| short-chain dehydrogenase [Neosartorya fischeri NRRL 181]
  misc_feature (1)..(252): NCBI GI: 256721045 Blast Desc: NECHADRAFT_44529 [Nectria haematococca mpVI 77-13-4]
  misc_feature (2)..(252): NCBI GI: 169609552 Blast Desc: SNOG_07868 [Phaeosphaeria nodorum SN15] gi|111064214|gb|EAT85334.1| SNOG_07868 [Phaeosphaeria nodorum SN15]
  misc_feature (24)..(250): SWISSPROT Homolog: EC 1.1.1.100 3-oxoacyl-[acyl-carrier-protein] reductase
MSTSPVALITAGSAGLGAATAKLFAQNGYRVVVNYNNNVQRAEDLLAELPDLSPLPKESTNFAIIKADLASREELKSLVKETGDKFGRIDVLFSNGGWTRARGWDSIDDNCHEDEWDQAFNMNVKAHLWLMQAAKPYLNESEGAFITTASLAALTVSGSSLAYAVTKAAQVHLVKALAVMAAPKIRVNSVSPGLLLTDWANRFTDEQKQAHLQKTKLKRIVTVEDVAEQVFTFAKSKSTTGVNIIMDAGFNL

SEQ ID NO: 8718 - DNA, 1598 bp, Muscodor strobelii
  misc_feature: SGI EST ID NO. CUFF.20959.0
  misc_feature: Variant of the nucleotide sequence at SEQ ID NO 8716
taactaggctgacaaaccaccgaggcttacgacgctcgatctttataacactaacaccgaaccttatttcgtggagctttctttaacagttacgcatcttgttttaaaagcagtcgttggtaactatggtcacatataatgaatagtggactcagcaagattcttatttacatacttctcttacattcattctcccgtgtttataacattagtgaatttgaaatccaccttccgtcaatagtatacgttgcgatgctcaacccccggtacaggcgcaatcggccgtgtcaggttgacacaatctagaaagctcacgttactctcaagttccacttcggtaacatcagtgagacttcgccggataatatgccactaagaatatccacactgcgccgtgccggtagaagtagaaatggagtatgttaccatctccgctctatcggaatttccccgcgattacgctcgcaggggcccgctcggtgcgttttacacgaacacctgcatgttagactcgtgcctttgtctctgtctctcgactctagatctttgtttccaaggcgtccttattgggattagattcgcttagaatgtcgacttcccctgtggcacttataacagctggtagtgccggcctaggcgccgctacggcaaaactttttgcacagaatggatatcgtgttgtagtgaattacaacaataatgtccaacgagcagaagatctcctggctgaattaccggacttatctcctctaccaaaagagagcacgaatttcgctataatcaaagcggatttggccagtcgtgaagagctcaagagtctggtaaaggaaacgggtgataaatttggccggatagatgttcttttctcgaatggcggctggactagggccaggggctgggacagcatcgatgataactgccacgaggacgagtgggaccaggctttcaatatgaatgtgaaagctcacttatggctcatgcaagctgcaaaaccatacctgaatgagagcgaaggcgcatttatcactacggcttccctggcggcacttactgtgagtggaagttcgttggcgtacgctgttacgaaggctgcgcaggtacatcttgtcaaggctcttgctgttatggcggcgcccaaaatccgcgtgaattcggtatcaccgggcctgttgctcactgattgggcgaatcgtttcacagacgagcaaaaacaagctcatttgcagaaaactaagttaaagcgtattgttactgtcgaagatgttgcggaacaggtctttacgtttgcaaagagcaaaagtacaacgggtgttaacatcatcatggatgctggattcaatctgtaattcgacgatgttatcgatgacggaggtgcccgtgttcagctgtatgattgtcgattatagatgcctggattgatagttcgaggtctgggttgtagatccgtatgactggacgtgaaagtcccgtattctcatagcaatactgagctttgagttacgtggttgtaaacaagagaaaacctgtttgcgattcagcattcttttacaaactcgagtagcgtaccggcaataattgatttaaagtggcccggtttg

SEQ ID NO: 8719 - DNA, 1929 bp, Muscodor strobelii
  misc_feature: SGI cDNA ID NO. 562696
  misc_feature: Reduced expression when VOC is produced
  misc_feature: Encodes the peptide sequence at SEQ ID NO 8720
atgaggaggctggccaccgcgtctgccttctcacgcgccgccaaatgctcctcgaggacattctcgtccacacgtcccgtctcccgcatcttcgccaaccagcccttgagggcgaaggaagcccccgtccacctcagcaacaaataccctgtcattgaccacgagtacgatgccctcgttgtcggtgccggcggcgctggcttgcgagctgcctttggtctcgctgaggccggcttcaacaccgcctgcatctccaagctcttccccacgcgatctcacaccgtcgccgcccagggtggcatcaatgctgctctcggaaacatgcacgaggacgactggcgatggcacatgtacgacaccgtcaagggctcagactggctcggcgaccaggatgccattcactacatgacgcgagaggctcccgactccatcatcgagctcgagaactacggttgcccattctccagaactgaggacggaaagatttaccaacgtgcgttcggtggtcagtcccagaagtacggaaagggtggtcaagcttaccgatgctgcgctgccgccgatcgaaccggtcacgctctcctccacaccctctacggtcaatcgctgcgacacaacaccaactacttcatcgagttcttcgcgctcgatctcatcatggaggatggcgaatgccgtggtgtgctggcttacaaccaggaagacggcactctccatcgtttcctcgcgcaaaacacggttctggctactggtggatatggccgtgcctacttcagctgtacctcggcacacacgtgcaccggtgacggaatggccatggtcactcgcgctggtctccccaaccaagaccttgagttcgtgcagttccaccctactggtatctacggcgccggatgtctgatcactgagggttcccgtggcgagggtggctacctgttgaactctgagggtgagcgtttcatggagcgctatgctcccaccgccaaggatctggccagtcgtgacgttgtctctcggtccatgaccatggagatccgcgacggccgcggtgtcggtcctgacaaggaccacatctatctgcaattgagccatctgcccgctgagattcttgccgagcgtctccccggtatctcggagacggccgccatcttcgccggtgtcgatgtccgaaagcagcccattcccgtcttgcccacagtccactacaacatgggtggtattcccactcgctacactggtgaagtcctcactgtcgacgaggctggtaacgacaaagttgttccaggtttgtttgcctgcggtgaggctgcgtgtgtctccgtgcacggcgctaaccgtctcggtgccaactctctcttggatctcgtcgttttcggtcgtgctgtttcgcatactatccgtgacaatttcacacctggcgccaaggctaagcccatcagcgccgatgctggtgctgagtctatcgagactcttgatcaagtccgcaactccagtgggcccaagagcactgccgaggtccgattagccatgcagaaggccatgcagacagacgtcagtgtcttccgtacacaggagagcttggacgagggtgtcaagaaggtcacagaaatcgacagcttgttcccccaggttggtatcaaggaccgtggaatgatctggaactcagaccttgttgagactctcgagttaagaaatctgctcacttgcgcttcccaaactgccgttgctgcggccaacagaaaggagtcgcgtggtgctcacgcccgtgaggactaccccgaccgtgacgatgagaactggatgaagcacaccctcaccttccagaagcagccccatggtggtgtcgacttgacctaccgaaaggtcgttggaacgaccctcgacgaaaatgaatgcgcggctgttccgccattcaagagaacctactaa

SEQ ID NO: 8720 - protein, 642 aa, Muscodor strobelii
  misc_feature: SGI Peptide ID NO. 562696
  misc_feature (57)..(452): Pfam Id: PF00890 Pfam Desc: FAD binding domain
  misc_feature (57)..(441): Pfam Id: PF07992 Pfam Desc: Pyridine nucleotide-disulphide oxidoreductase
  misc_feature (507)..(642): Pfam Id: PF02910 Pfam Desc: Fumarate reductase/succinate dehydrogenase flavoprotein C-terminal domain
  misc_feature (57)..(87): Pfam Id: PF07992 Pfam Desc: Pyridine nucleotide-disulphide oxidoreductase
  misc_feature (19)..(642): NCBI GI: 145611728 Blast Desc: MGG_00168 [Magnaporthe grisea 70-15] gi|145018981|gb|EDK03260.1| MGG_00168 [Magnaporthe grisea 70-15]
  misc_feature (1)..(642): NCBI GI: 164424871 Blast Desc: succinate dehydrogenase flavoprotein subunit, mitochondrial precursor [Neurospora crassa OR74A] gi|157070700|gb|EDO65095.1| succinate dehydrogenase flavoprotein
  misc_feature (17)..(642): NCBI GI: 171687299 Blast Desc: protein product [Podospora anserina] gi|170943611|emb|CAP69263.1| protein product [Podospora anserina]
  misc_feature (2)..(642): NCBI GI: 116182026 Blast Desc: conserved [Chaetomium globosum CBS 148.51] gi|88185938|gb|EAQ93406.1| conserved [Chaetomium globosum CBS 148.51]
  misc_feature (1)..(642): NCBI GI: 225556434 Blast Desc: succinate dehydrogenase [Ajellomyces capsulatus G186AR]
  misc_feature (10)..(642): NCBI GI: 46125967 Blast Desc: FG07361.1 [Gibberella zeae PH-1]
  misc_feature (1)..(642): NCBI GI: 189204217 Blast Desc: succinate dehydrogenase flavoprotein subunit, mitochondrial precursor [Pyrenophora tritici-repentis Pt-1C-BFP] gi|187985543|gb|EDU51031.1| succinate dehydrogenase flavoprotein
  misc_feature (1)..(642): NCBI GI: 156050553 Blast Desc: conserved [Sclerotinia sclerotiorum 1980] gi|154692264|gb|EDN92002.1| conserved [Sclerotinia sclerotiorum 1980]
  misc_feature (9)..(642): NCBI GI: 256732647 Blast Desc: [Nectria haematococca mpVI 77-13-4]
  misc_feature (1)..(642): NCBI GI: 226288251 Blast Desc: succinate dehydrogenase flavoprotein subunit [Paracoccidioides brasiliensis Pb18]
  misc_feature (19)..(642): SWISSPROT Homolog: EC 1.3.5.1 Succinate dehydrogenase (ubiquinone)
  misc_feature: Useful for introducing or modulating the production of volatile compounds
MRRLATASAFSRAAKCSSRTFSSTRPVSRIFANQPLRAKEAPVHLSNKYPVIDHEYDALVVGAGGAGLRAAFGLAEAGFNTACISKLFPTRSHTVAAQGGINAALGNMHEDDWRWHMYDTVKGSDWLGDQDAIHYMTREAPDSIIELENYGCPFSRTEDGKIYQRAFGGQSQKYGKGGQAYRCCAAADRTGHALLHTLYGQSLRHNTNYFIEFFALDLIMEDGECRGVLAYNQEDGTLHRFLAQNTVLATGGYGRAYFSCTSAHTCTGDGMAMVTRAGLPNQDLEFVQFHPTGIYGAGCLITEGSRGEGGYLLNSEGERFMERYAPTAKDLASRDVVSRSMTMEIRDGRGVGPDKDHIYLQLSHLPAEILAERLPGISETAAIFAGVDVRKQPIPVLPTVHYNMGGIPTRYTGEVLTVDEAGNDKVVPGLFACGEAACVSVHGANRLGANSLLDLVVFGRAVSHTIRDNFTPGAKAKPISADAGAESIETLDQVRNSSGPKSTAEVRLAMQKAMQTDVSVFRTQESLDEGVKKVTEIDSLFPQVGIKDRGMIWNSDLVETLELRNLLTCASQTAVAAANRKESRGAHAREDYPDRDDENWMKHTLTFQKQPHGGVDLTYRKVVGTTLDENECAAVPPFKRTY

SEQ ID NO: 8721 - DNA, 2619 bp, Muscodor strobelii
  misc_feature: SGI EST ID NO. CUFF.21220.1
  misc_feature: Variant of the nucleotide sequence at SEQ ID NO 8719
cagaagcgcagcgattggcccgagccctaattggccgccctccaagctccggcgaatgttcaaaggcatcatcacttttcgccatcggaacttgcaggacaagagcctcaaattgctgcatttttgttgctgctgccactgccgggcgcgacgaccacacatctcccctccttctgcagtccgcgctctctctcctgtaatatcgttctttctcttcagatatggcgccctcattcgcaatgaggaggctggccaccgcgtctgccttctcacgcgccgccaaatgctcctcgaggacattctcgtccacacgtcccgtctcccgcatcttcgccaaccagcccttgagggcgaaggaagcccccgtccacctcagcaacaaataccctgtcattgaccacgagtacgatgccctcgttgtcggtgccggcggcgctggcttgcgagctgcctttggtctcgctgaggccggcttcaacaccgcctgcatctccaagctcttccccacgcgatctcacaccgtcgccgcccagggtggcatcaatgctgctctcggaaacatgcacgaggacgactggcgatggcacatgtacgacaccgtcaagggctcagactggctcggcgaccaggatgccattcactacatgacgcgagaggctcccgactccatcatcgagctcgagaactacggttgcccattctccagaactgaggacggaaagatttaccaacgtgcgttcggtggtcagtcccagaagtacggaaagggtggtcaagcttaccgatgctgcgctgccgccgatcgaaccggtcacgctctcctccacaccctctacggtcaatcgctgcgacacaacaccaactacttcatcgagttcttcgcgctcgatctcatcatggaggatggcgaatgccgtggtgtgctggcttacaaccaggaagacggcactctccatcgtttcctcgcgcaaaacacggttctggctactggtggatatggccgtgcctacttcagctgtacctcggcacacacgtgcaccggtgacggaatggccatggtcactcgcgctggtctccccaaccaagaccttgagttcgtgcagttccaccctactggtatctacggcgccggatgtctgatcactgagggttcccgtggcgagggtggctacctgttgaactctgagggtgagcgtttcatggagcgctatgctcccaccgccaaggatctggccagtcgtgacgttgtctctcggtccatgaccatggagatccgcgacggccgcggtgtcggtcctgacaaggaccacatctatctgcaattgagccatctgcccgctgagattcttgccgagcgtctccccggtatctcggagacggccgccatcttcgccggtgtcgatgtccgaaagcagcccattcccgtcttgcccacagtccactacaacatgggtggtattcccactcgctacactggtgaagtcctcactgtcgacgaggctggtaacgacaaagttgttccaggtttgtttgcctgcggtgaggctgcgtgtgtctccgtgcacggcgctaaccgtctcggtgccaactctctcttggatctcgtcgttttcggtcgtgctgtttcgcatactatccgtgacaatttcacacctggcgccaaggctaagcccatcagcgccgatgctggtgctgagtctatcgagactcttgatcaagtccgcaactccagtgggcccaagagcactgccgaggtccgattagccatgcagaaggccatgcagacagacgtcagtgtcttccgtacacaggagagcttggacgagggtgtcaagaaggtcacagaaatcgacagcttgttcccccaggttggtatcaaggaccgtggaatgatctggaactcagaccttgttgagactctcgagttaagaaatctgctcacttgcgcttcccaaactgccgttgctgcggccaacagaaaggagtcgcgtggtgctcacgcccgtgaggactaccccgaccgtgacgatgagaactggatgaagcacaccctcaccttccagaagcagccccatggtggtgtcgacttgacctaccgaaaggtcgttggaacgaccctcgacgaaaatgaatgcgcggctgttccgccattcaagagaacctactaaatgatgtgtgaagattagaataaggggcgtgataatcagaaatgaaggttgccataatccgccgtacgatgttgaagatagcattggcgaaacagcattggtagtggcgtgcggaaattgtacctagacatgtcttttggcaaatattgtataaagctctttttttagttccaagttttggcaggttcttcatcaatccatgtgagattgcaggtcacagcacacacagtctactatattatggcgatgacggccctcgttaatggtatcaggagaaactcaactatctcattttgccgctcttcagcaaggcgctatgtcaccagtcttcccaggttattcatatattgatatagctcatcctaccatgatagatgatagctgacaagattacggtataatgctggactcgataaccactgaattgccttcggtgtccaggcagtgtatg

SEQ ID NO: 8722 - DNA, 966 bp, Muscodor strobelii
  misc_feature: SGI cDNA ID NO. 562698
  misc_feature: Reduced expression when VOC is produced
  misc_feature: Encodes the peptide sequence at SEQ ID NO 8723
atggcgagacccgctttcagcagcctccacctcttgcacattcctgttaccaacatctgcgtcgttactggtgctgccttgtcgaaaaaactaggtaatatcttcgtaaacatgtcgcgagagatccctgtgctaatcgctgccaccaagaccatcgacggggcgagcaagactgcctacatggcaagtctagcgggggacgatgacttatcaaactcggtagagcctggagctcacctaccacgactttcggccaaagatgagcagactcgaaaaaggaacaacgaagcaacggcagcatgcattcgtaaatccattctcgacctacaaactttttccaaatcgaccgtcttacgcctcgacgaatcatattcatccgtgcttcaaaagctaagctctctccagaacgctattgtcggtattaaagagctcgcggctgcatcgcaagagatcaatgacgggttcgtcaccgagtcgcaaactctagcaagcgagatcacttctcagctcggtgtatacgaccattccgaagagcagcgcgagcgcatccaaactctccaagctcgcatcaacgcaggacgagataaaatacaaattttgagcaaacgagttgatatcgtacgtgagcgcatcgacagctgggagaaagctgataaggcatggcaagagagaacaaggaaacgactaaaagtcttgtggattatcattttggtaattgctctggcggtattgttcatgttcgtcgggattcagtacgccgggtcccctgtggacttgaacacgctgaaggaatcaattgccgtctcgcgacataatgacacgccagacatggacgatattctcggaaataagagcaaaagcgcagctgccatgacggacgagctccggcaagttcttgctcgcaggagagatcacggagcggaggcgatcaacaacgaggctattcgaatactcgatgaattatga

SEQ ID NO: 8723 - protein, 321 aa, Muscodor strobelii
  misc_feature: SGI Peptide ID NO. 562698
  misc_feature (33)..(253): NCBI GI: 85111525 Blast Desc: NCU02641 [Neurospora crassa OR74A] gi|28925733|gb|EAA34742.1| [Neurospora crassa OR74A]
  misc_feature (73)..(276): NCBI GI: 261356131 Blast Desc: conserved [Verticillium albo-atrum VaMs.102]
  misc_feature (97)..(253): NCBI GI: 116182022 Blast Desc: CHGG_01639 [Chaetomium globosum CBS 148.51] gi|88185936|gb|EAQ93404.1| CHGG_01639 [Chaetomium globosum CBS 148.51]
  misc_feature (81)..(252): NCBI GI: 256732646 Blast Desc: NECHADRAFT_100070 [Nectria haematococca mpVI 77-13-4]
  misc_feature (66)..(248): NCBI GI: 39975353 Blast Desc: MGG_00177 [Magnaporthe grisea 70-15] gi|145018970|gb|EDK03249.1| MGG_00177 [Magnaporthe grisea 70-15]
  misc_feature (102)..(261): NCBI GI: 46125969 Blast Desc: FG07362.1 [Gibberella zeae PH-1]
  misc_feature (89)..(252): NCBI GI: 154319233 Blast Desc: BC1G_02568 [Botryotinia fuckeliana B05.10] gi|150856999|gb|EDN32191.1| BC1G_02568 [Botryotinia fuckeliana B05.10]
  misc_feature (100)..(252): NCBI GI: 171687295 Blast Desc: protein product [Podospora anserina] gi|170943609|emb|CAP69261.1| protein product [Podospora anserina]
  misc_feature (102)..(244): NCBI GI: 156063410 Blast Desc: SS1G_01823 [Sclerotinia sclerotiorum 1980] gi|154697157|gb|EDN96895.1| SS1G_01823 [Sclerotinia sclerotiorum 1980]
  misc_feature (102)..(245): NCBI GI: 145235821 Blast Desc: An03g06840 [Aspergillus niger] gi|134058248|emb|CAK38440.1| [Aspergillus niger]
  misc_feature: Useful for introducing or modulating the production of volatile compounds
MARPAFSSLHLLHIPVTNICVVTGAALSKKLGNIFVNMSREIPVLIAATKTIDGASKTAYMASLAGDDDLSNSVEPGAHLPRLSAKDEQTRKRNNEATAACIRKSILDLQTFSKSTVLRLDESYSSVLQKLSSLQNAIVGIKELAAASQEINDGFVTESQTLASEITSQLGVYDHSEEQRERIQTLQARINAGRDKIQILSKRVDIVRERIDSWEKADKAWQERTRKRLKVLWIIILVIALAVLFMFVGIQYAGSPVDLNTLKESIAVSRHNDTPDMDDILGNKSKSAAAMTDELRQVLARRRDHGAEAINNEAIRILDEL

SEQ ID NO: 8724 - DNA, 1438 bp, Muscodor strobelii
  misc_feature: SGI EST ID NO. CUFF.21483.0
  misc_feature: Variant of the nucleotide sequence at SEQ ID NO 8722
caacatctgcgtcgttactggtgctgccttgtcgaaaaaactaggtaatatcttcgtaaacatgtcgcgagagatccctgtgctgtaagactcgtttgatgagatttgccttttcgaattaagtttgctcgcgcccgggtgtcttagtacccctttctgcttgtgtttaaagttgagacagtgtaaccatgtctttcggattcgcgggcatgcagccagcgataagctcaccaccgcgtcctcgtcatcagctgagacgctccataaccgagcagtcccctccctttagacattctcgggtccatcaatttctgccccggacagatcgccatcgagaggacaagttacacgcacaaactacttcgcctgcccgtagttcactagattttactcggcccagaatcgctgccaccaagaccatcgacggggcgagcaagactgcctacatggcaagtctagcgggggacgatgacttatcaaactcggtagagcctggagctcacctaccacgactttcggccaaagatgagcagactcgaaaaaggaacaacgaagcaacggcagcatgcattcgtaaatccattctcgacctacaaactttttccaaatcgaccgtcttacgcctcgacgaatcatattcatccgtgcttcaaaagctaagctctctccagaacgctattgtcggtattaaagagctcgcggctgcatcgcaagagatcaatgacgggttcgtcaccgagtcgcaaactctagcaagcgagatcacttctcagctcggtgtatacgaccattccgaagagcagcgcgagcgcatccaaactctccaagctcgcatcaacgcaggacgagataaaatacaaattttgagcaaacgagttgatatcgtacgtgagcgcatcgacagctgggagaaagctgataaggcatggcaagagagaacaaggaaacgactaaaagtcttgtggattatcattttggtaattgctctggcggtattgttcatgttcgtcgggattcagtacgccgggtcccctgtggacttgaacacgctgaaggaatcaattgccgtctcgcgacataatgacacgccagacatggacgatattctcggaaataagagcaaaagcgcagctgccatgacggacgagctccggcaagttcttgctcgcaggagagatcacggagcggaggcgatcaacaacgaggctattcgaatactcgatgaattatgattattttcagtacctatcctgcatacccatatatatacccttatttcgtttgacaccctcacggtgctcgtccgtttcctacctaccgactgagctacctattctattagtctgattgcatgattttagatacccataatgcaaaccacaataatttgagataagagctgtaagaaaaatatgcctagtcatatgtctcatcttgg

SEQ ID NO: 8725 - DNA, 354 bp, Muscodor strobelii
  misc_feature: SGI cDNA ID NO. 562699
  misc_feature: Encodes the peptide sequence at SEQ ID NO 8726
atgtctacagaagtcggtgccacagagctcagagctccgaaggtccctcagggcttgcgagtaaatggaaaacagtggcatgcgccgaagaaggcatttcggcccacctccggtctgacctcgtacgaagcccgcgcgaagcagcggacagcgatggctgcaatgaaggcgaaagagaaggagatgaaagaagaaaaggaggccgagagagtgcaacgagtgcagcgaatcaaagacaagcgagcggccaaggaggagaaggaaagatacgcaaagatggccgagaagatgcacaagaaacgagtcgagcgattaaagagaaaagagaagcggaacaagaagctcaattcatga

SEQ ID NO: 8726 - protein, 117 aa, Muscodor strobelii
  misc_feature: SGI Peptide ID NO. 562699
  misc_feature (12)..(117): Pfam Id: PF03879 Pfam Desc: Cgr1 family
  misc_feature (12)..(117): NCBI GI: 115449941 Blast Desc: ATEG_10388 [Aspergillus terreus NIH2624] gi|121733006|sp|Q0C7E6.1|CGR1_ASPTN RecName: Full=rRNA-processing protein cgrA gi|114187685|gb|EAU29385.1| ATEG_10388 [Aspergillus
  misc_feature (1)..(117): NCBI GI: 261203339 Blast Desc: [Ajellomyces dermatitidis SLH14081] gi|239586668|gb|EEQ69311.1| [Ajellomyces dermatitidis SLH14081]
  misc_feature (12)..(117): NCBI GI: 154288098 Blast Desc: nucleolar protein CgrA [Ajellomyces capsulatus NAm1] gi|150408485|gb|EDN04026.1| nucleolar protein CgrA [Ajellomyces capsulatus NAm1] gi|225560153|gb|EEH08435.1| HCBG_03724 G186AR]
  misc_feature (1)..(117): NCBI GI: 70982809 Blast Desc: rRNA processing protein CgrA [Aspergillus fumigatus Af293] gi|74624594|sp|Q9HEQ8.1|CGR1_ASPFU RecName: Full=rRNA-processing protein cgrA gi|12000391|gb|AAG28884.1| CGRA
  misc_feature (1)..(117): NCBI GI: 119484034 Blast Desc: rRNA processing protein CgrA [Neosartorya fischeri NRRL 181] gi|119410076|gb|EAW20023.1| rRNA processing protein CgrA [Neosartorya fischeri NRRL 181]
  misc_feature (12)..(117): NCBI GI: 239608295 Blast Desc: conserved [Ajellomyces dermatitidis ER-3]
  misc_feature (1)..(117): NCBI GI: 255939516 Blast Desc: Pc16g01090 [Penicillium chrysogenum Wisconsin 54-1255] gi|211585150|emb|CAP92779.1| Pc16g01090 [Penicillium chrysogenum Wisconsin 54-1255]
  misc_feature (18)..(117): NCBI GI: 39975351 Blast Desc: [Magnaporthe grisea 70-15] gi|145018969|gb|EDK03248.1| [Magnaporthe grisea 70-15]
  misc_feature (17)..(117): NCBI GI: 261356132 Blast Desc: [Verticillium albo-atrum VaMs.102]
  misc_feature (1)..(117): NCBI GI: 225683294 Blast Desc: [Paracoccidioides brasiliensis Pb03]
MSTEVGATELRAPKVPQGLRVNGKQWHAPKKAFRPTSGLTSYEARAKQRTAMAAMKAKEKEMKEEKEAERVQRVQRIKDKRAAKEEKERYAKMAEKMHKKRVERLKRKEKRNKKLNS

SEQ ID NO: 8727 - DNA, 1292 bp, Muscodor strobelii
  misc_feature: SGI EST ID NO. CUFF.21000.1
  misc_feature: Variant of the nucleotide sequence at SEQ ID NO 8725
caaagatcaatgctccgttgaagtacattcctatcatctcaaaatgtgtgaacgaagctctccccctaacaagagacggacgcgaatgagctggggacgagcgacgaggtattacctaagtgggtcccattttaagctggctagcccggttcgatcttatctacagtaggaccacccttcttatcaaggcctgcgaagtgggatgtatgattatttttgccatgttctgagtggccgccatcatcaacgccgagccaaagacaccaaatcgtcaactatatcaataggatcctgaagatcacttgtcgtcaataacctccatcaagttaccggcttcatatgtgctcgcctgactcgtcgccctccagagagaaaacatgtctacagaagtcggtgccacagagctcagagctccgaaggtccctcagggcttgcgagtaaatggtacgagggagctgcgcatcagtttgactgggccagaagctcacgtaacatctaggaaaacagtggcatgcgccgaagaaggcatttcggcccacctccggtctgacctcgtacgaagcccgcgcgaagcagcggacagcgatggctgcaatgaaggcgaaagagaaggagatgaaagaagaaaaggaggccgagagagtgcaacgagtgcagcgaatcaaagacaagcgagcggccaaggaggagaaggaaagatacgcaaagatggccgagaagatgcacaagaaacgagtcgagcgattaaagagaaaagagaagcggaacaagaagctcaattcatgagagtgtagcggaatccctcagcccatgctacaagctttgctgaacctcttccattcaccaggattccgagcctcgtcctaaattgggcacgagaactatgcgattacgatcgaaggcttgtcccgttaccaaaatctaatcgacaggtctcgcactcggcgcctctacgattgttcgatacggcgtgtcggttttaacccgcctactacaacctcgcgtaggtcagacctggactgttcgataccattccactctcagcgtcacggatgagaaacgtcagagacaccgttggggcatagacacctcacaattttgtgacgcaagatgactttgggaatactaattttctcaatacctaaaatatgaaaagcttcttcatctgcaatggctatgcagtgtagcttaatgtcgattgacatacaacctcctaaacttgctgtgccacatctttcgtgtcctgttcctgttcctgttgcatgcatgttcgccgtgatggaagtgttgac

SEQ ID NO: 8728 - DNA, 2946 bp, Muscodor strobelii
  misc_feature: SGI cDNA ID NO. 562700
  misc_feature: Reduced expression when VOC is produced
  misc_feature: Encodes the peptide sequence at SEQ ID NO 8729
atggcaaccgcttacacgacgcaaagcactgcattggaggacctcgccatcaggaacatgcacgacgaggtcgaggctgcccagagcgccgctactgcgctcacatcggatggaatggccttcgcaaccgccgccgccagccctcaaccgtctcccagaattaatcttcctccgcctccgaacccgccgttcaccttccctgctcaaccctcgtctgcgccttcctccttctccagagcaacaggtcggcggccgcagtctgcgatcgagctctcagcccaaggctccaataatggacttgaaccgcactatcagcccaggcgctcaccagcacctcccggattgtctttcaacaatgcacccgcgctcaattccgagactgtaaaccgccgtccacgaccactcgcgctacccgacttctccttcaaccctggagcaagcagccccaacgagcagccccaggtcagtccttcactgggacctgcctcgccaaggatgataccaccgggaggtcacatgggccatcgcagaggcggaagtgaatttgtgggcggcaaaccaaagactggagaggcaatcaccgtcatgagcacgagcccgacgaaagctgaggctgggttcccgtcacccagcttggcgccggcaccacgaacacatcgcagaggtcactcgcatagacgttctggtgcaatctcgagccatgacctttccaagatccttcaggccagccccaatccttcatccagaggcagcagcgctccaaccagccctgcagattttagcgacagccaccggggtttccccagcgccactgtgcaaccaggtgtcgcaccatccgtcagcgccgccaccgacagccctgatgccgaagccgagaagcaagagaagaattacgaggcctcggaagagtctggtcaatctacaccgcaaccgagccccaagcccgcgactcgtgcacgggtcggattctccgatacgctagaattcatcccacgtccgctctcgttggtttcaactgataccacgagcacagctaggccggggcattctctttctggcagcatttcttcaattgcatctattacgaattctgcgactgttgatcgcgatcaagcatccatactcggatcgcccgtgtcacagaataatggcagttctcgcccaagtaccgcgggagcggtattggaacgcactgccagccttcatgcttcagctgacggcattccagttcctcgcagacgaaactccattccggtcttaagtgacctagcacaagataagacatctacctcgccactgccgacaccaacgaggacgccgaagcgatggtcgttcttcgggtttgactcgttcgcaagcgctgggtcaccgacgaaagccaggcccgcgagttcaagctcttcggatacggcattaaagggcgctgcagaaagtgcactagcattcgatgacgatgatgcctttgactccagcagcagcgaagacagcggtcgcatcgaagagaagaagaagtccggcaagaaaaagaagaggagagtcaagacatgggcgggttcgatactgagccgcaaatcgaaatcgcgatcacagaagtcaaaagctcgaagtcgttctcgaacgcccccgatatcccgacaggcacaagacgaagcgggagaggatgatatgtcagataaaagtcaactctcttcccgagatgtggtcgaggtttcttcgaatcatgcagcatcagataccgaagtcacggctccacggcgtcggcatgttccagacgagacccctttcccgatgatagatttggacgcagcgcttggtccgttcaacaccccatctcgggatcctcagtgggacgaagctcaacgcaccggagctcaaccaaagcgagcgcttcatagcgcatctggactgcgaggctttagtggaccaggtatgcactaccatcggcgagccgagagtgcacctgaaatgccaccttttgaagccggacgcttcagcattcaccgctttggcagttcttcgactatggccgacgtctttgaggaagatgaggaagaagaagaaaggccgaagaagaaacctggaaaggatgacgctaccagcgagactggcgagacaggaagcacaaacaacagcgatgatcaagacttggatgatgcggactcgaccccaactcaagagcaagacagtgcatcaatcatcccgactcgatatgaagaaaccaaatctattgctacatcgcagagctcgatcaaagtcagaagtgagaagtcatttaccagtctccatgacgaagtcattgtggaagatgaagcctttacatacccctcaaagagggagtctactctcacagttccctcttcagaattgccagacccgccggcttcgtcgtcttcgcgtagggagctcaatgccaatggtccaccagatgcagcctcgatcatactcccagggccacctggaatgcctatcagcccgtataacatgagccacgcatcgtcattcccgtcgcctcgctcgcccatgtcatacgaggcccatagaatatcgaccgcaccatcttccattacagatgagaacacgttctattcactgttaatgggagaacctggacctgaggtggtgcggctctcggtggatgtgccttcactgacaagcacgaactctactatgacacgagagagcaacttcattgccggcgtcaggccgcgaaatatgccgttccacgatcaaaggccagcatcgttcacgtcgactgcttttggacgccgtaggtccagtctcgccagtctcagtcgtctgatcagcagcgcgcatggcgagcggagcaagttgagcatggaggtaccatttgacaatgaggccgataagaagggcaagacgagcaagtcgaaacggctcacaagaatgatgcagttttggaaaccaaaaggatccaatgggtcgtag

SEQ ID NO: 8729 - protein, 981 aa, Muscodor strobelii
  misc_feature: SGI Peptide ID NO. 562700
  misc_feature (82)..(976): NCBI GI: 261356134 Blast Desc: conserved [Verticillium albo-atrum VaMs.102]
  misc_feature (82)..(976): NCBI GI: 145611718 Blast Desc: MGG_00179 [Magnaporthe grisea 70-15] gi|145018968|gb|EDK03247.1| MGG_00179 [Magnaporthe grisea 70-15]
  misc_feature (71)..(979): NCBI GI: 116182018 Blast Desc: CHGG_01637 [Chaetomium globosum CBS 148.51] gi|88185934|gb|EAQ93402.1| CHGG_01637 [Chaetomium globosum CBS 148.51]
  misc_feature (42)..(970): NCBI GI: 164427841 Blast Desc: NCU02637 [Neurospora crassa OR74A] gi|157071906|gb|EAA34738.2| [Neurospora crassa OR74A]
  misc_feature (70)..(981): NCBI GI: 256733092 Blast Desc: NECHADRAFT_60125 [Nectria haematococca mpVI 77-13-4]
  misc_feature (68)..(975): NCBI GI: 46125973 Blast Desc: FG07364.1 [Gibberella zeae PH-1]
  misc_feature (134)..(981): NCBI GI: 154313875 Blast Desc: BC1G_05787 [Botryotinia fuckeliana B05.10] gi|150849369|gb|EDN24562.1| BC1G_05787 [Botryotinia fuckeliana B05.10]
  misc_feature (116)..(976): NCBI GI: 156061463 Blast Desc: SS1G_02876 [Sclerotinia sclerotiorum 1980] gi|154700278|gb|EDO00017.1| SS1G_02876 [Sclerotinia sclerotiorum 1980]
  misc_feature (60)..(974): NCBI GI: 189207617 Blast Desc: conserved [Pyrenophora tritici-repentis Pt-1C-BFP] gi|187976235|gb|EDU42861.1| conserved [Pyrenophora tritici-repentis Pt-1C-BFP]
  misc_feature (828)..(976): NCBI GI: 171687291 Blast Desc: protein product [Podospora anserina] gi|170943607|emb|CAP69259.1| protein product [Podospora anserina]
  misc_feature: Useful for introducing or modulating the production of volatile compounds
MATAYTTQSTALEDLAIRNMHDEVEAAQSAATALTSDGMAFATAAASPQPSPRINLPPPPNPPFTFPAQPSSAPSSFSRATGRRPQSAIELSAQGSNNGLEPHYQPRRSPAPPGLSFNNAPALNSETVNRRPRPLALPDFSFNPGASSPNEQPQVSPSLGPASPRMIPPGGHMGHRRGGSEFVGGKPKTGEAITVMSTSPTKAEAGFPSPSLAPAPRTHRRGHSHRRSGAISSHDLSKILQASPNPSSRGSSAPTSPADFSDSHRGFPSATVQPGVAPSVSAATDSPDAEAEKQEKNYEASEESGQSTPQPSPKPATRARVGFSDTLEFIPRPLSLVSTDTTSTARPGHSLSGSISSIASITNSATVDRDQASILGSPVSQNNGSSRPSTAGAVLERTASLHASADGIPVPRRRNSIPVLSDLAQDKTSTSPLPTPTRTPKRWSFFGFDSFASAGSPTKARPASSSSSDTALKGAAESALAFDDDDAFDSSSSEDSGRIEEKKKSGKKKKRRVKTWAGSILSRKSKSRSQKSKARSRSRTPPISRQAQDEAGEDDMSDKSQLSSRDVVEVSSNHAASDTEVTAPRRRHVPDETPFPMIDLDAALGPFNTPSRDPQWDEAQRTGAQPKRALHSASGLRGFSGPGMHYHRRAESAPEMPPFEAGRFSIHRFGSSSTMADVFEEDEEEEERPKKKPGKDDATSETGETGSTNNSDDQDLDDADSTPTQEQDSASIIPTRYEETKSIATSQSSIKVRSEKSFTSLHDEVIVEDEAFTYPSKRESTLTVPSSELPDPPASSSSRRELNANGPPDAASIILPGPPGMPISPYNMSHASSFPSPRSPMSYEAHRISTAPSSITDENTFYSLLMGEPGPEVVRLSVDVPSLTSTNSTMTRESNFIAGVRPRNMPFHDQRPASFTSTAFGRRRSSLASLSRLISSAHGERSKLSMEVPFDNEADKKGKTSKSKRLTRMMQFWKPKGSNGS

SEQ ID NO: 8730 - DNA, 4287 bp, Muscodor strobelii
  misc_feature: SGI EST ID NO. CUFF.21139.0
  misc_feature: Variant of the nucleotide sequence at SEQ ID NO 8728
cgggaccctgcactctgcctgcgctgtgtccgttctaggtagaatccctcgccgtgcgccaatcaagcgccaatcccccccgactcgcaccaggtgcacagcaaactgagggaaggagcaacagacgggacactgtcgactgtactgtacccgcaccctctcaacccggccgcatcttctcaatctcaatctcagtctcctccccgtccgcctggtcaaaccgtccttttccctcacatcgaccatcacatcacaacacactggcacgattccagcagctctccgtccacgggtgtgctctggtctcgtccgtccgctcctttttccatttctgcatttttagttgtgttccgtcccaaaagcatcgttgtctcgttctgctttgatttgagcattggagccatctgcttccgacggtgcaaaacacaggatcgcggccaatttctagaggtaagggcttgtatgcttcgctgctgcgctaagaggcaactgcgcactatttttcttctagccgccgcgaggcaatcgcacgctgacgacccgtatcgtgacagagacgctcgaccaactcgccttgaactctgcggaaccaccgatgtcgacagcgacgcacagcacctgacaagactgcgcggcgcaccggacaccgtcaccctatgataacacactacacctagtcgctcttggtttcgtgccggggagcggcttggaggactcaatggcaaccgcttacacgacgcaaagcactgcattggaggacctcgccatcaggaacatgcacgacgaggtcgaggctgcccagagcgccgctactgcgctcacatcggatggaatggccttcgcaaccgccgccgccagccctcaaccgtctcccagaattaatcttcctccgcctccgaacccgccgttcaccttccctgctcaaccctcgtctgcgccttcctccttctccagagcaacaggtcggcggccgcagtctgcgatcgagctctcagcccaaggctccaataatggacttgaaccgcactatcagcccaggcgctcaccagcacctcccggattgtctttcaacaatgcacccgcgctcaattccgagactgtaaaccgccgtccacgaccactcgcgctacccgacttctccttcaaccctggagcaagcagccccaacgagcagccccaggtcagtccttcactgggacctgcctcgccaaggatgataccaccgggaggtcacatgggccatcgcagaggcggaagtgaatttgtgggcggcaaaccaaagactggagaggcaatcaccgtcatgagcacgagcccgacgaaagctgaggctgggttcccgtcacccagcttggcgccggcaccacgaacacatcgcagaggtcactcgcatagacgttctggtgcaatctcgagccatgacctttccaagatccttcaggccagccccaatccttcatccagaggcagcagcgctccaaccagccctgcagattttagcgacagccaccggggtttccccagcgccactgtgcaaccaggtgtcgcaccatccgtcagcgccgccaccgacagccctgatgccgaagccgagaagcaagagaagaattacgaggcctcggaagagtctggtcaatctacaccgcaaccgagccccaagcccgcgactcgtgcacgggtcggattctccgatacgctagaattcatcccacgtccgctctcgttggtttcaactgataccacgagcacagctaggccggggcattctctttctggcagcatttcttcaattgcatctattacgaattctgcgactgttgatcgcgatcaagcatccatactcggatcgcccgtgtcacagaataatggcagttctcgcccaagtaccgcgggagcggtattggaacgcactgccagccttcatgcttcagctgacggcattccagttcctcgcagacgaaactccattccggtcttaagtgacctagcacaagataagacatctacctcgccactgccgacaccaacgaggacgccgaagcgatggtcgttcttcgggtttgactcgttcgcaagcgctgggtcaccgacgaaagccaggcccgcgagttcaagctcttcggatacggcattaaagggcgctgcagaaagtgcactagcattcgatgacgatgatgcctttgactccagcagcagcgaagacagcggtcgcatcgaagagaagaagaagtccggcaagaaaaagaagaggagagtcaagacatgggcgggttcgatactgagccgcaaatcgaaatcgcgatcacagaagtcaaaagctcgaagtcgttctcgaacgcccccgatatcccgacaggcacaagacgaagcgggagaggatgatatgtcagataaaagtcaactctcttcccgagatgtggtcgaggtttcttcgaatcatgcagcatcagataccgaagtcacggctccacggcgtcggcatgttccagacgagacccctttcccgatgatagatttggacgcagcgcttggtccgttcaacaccccatctcgggatcctcagtgggacgaagctcaacgcaccggagctcaaccaaagcgagcgcttcatagcgcatctggactgcgaggctttagtggaccaggtatgcactaccatcggcgagccgagagtgcacctgaaatgccaccttttgaagccggacgcttcagcattcaccgctttggcagttcttcgactatggccgacgtctttgaggaagatgaggaagaagaagaaaggccgaagaagaaacctggaaaggatgacgctaccagcgagactggcgagacaggaagcacaaacaacagcgatgatcaagacttggatgatgcggactcgaccccaactcaagagcaagacagtgcatcaatcatcccgactcgatatgaagaaaccaaatctattgctacatcgcagagctcgatcaaagtcagaagtgagaagtcatttaccagtctccatgacgaagtcattgtggaagatgaagcctttacatacccctcaaagagggagtctactctcacagttccctcttcagaattgccagacccgccggcttcgtcgtcttcgcgtagggagctcaatgccaatggtccaccagatgcagcctcgatcatactcccagggccacctggaatgcctatcagcccgtataacatgagccacgcatcgtcattcccgtcgcctcgctcgcccatgtcatacgaggcccatagaatatcgaccgcaccatcttccattacagatgagaacacgttctattcactgttaatgggagaacctggacctgaggtggtgcggctctcggtggatgtgccttcactgacaagcacgaactctactatgacacgagagagcaacttcattgccggcgtcaggccgcgaaatatgccgttccacgatcaaaggccagcatcgttcacgtcgactgcttttggacgccgtaggtccagtctcgccagtctcagtcgtctgatcagcagcgcgcatggcgagcggagcaagttgagcatggaggtaccatttgacaatgaggccgataagaagggcaagacgagcaagtcgaaacggctcacaagaatgatgcagttttggaaaccaaaaggatccaatgggtcgtagggtggtctatgaaatactattagggaaaagtttaagatatgtgagacgaccacgtttcacgcgaccggatagaaatgcgcctgacaagtcgggtaagcaacacgggtgcatctcgcattccgtgacgaacaatcaccctgcgacgagcatatgttccgagttgatgtggcacgcacaatcgtccattaacatgctagaaagatgaggacactgaagccacaatggcaggattacagctctcacggacatgctaccttatatcagggctgccctgagtttagctcacatgagatgaatgaaataacaggcaaatatgtcttgttggctttagagatagccaaccgatttctctggacatagtattgaggaggacgagaatagaagagacattgtggagaggtgtttagagaatgttggtactggacttgagccgtcacaacttgttggctctcaatgtcagaacacgcatctagctgtacacaaatataacgaaaaaaaatgccctcgcgaagaaacgacatattgttctactctattcaaggtcttaattctttccgatgtccgtctaatgtccctcgtatttgatgttagagaatgatacataataagtgcaattgattaaa

SEQ ID NO: 8731 - DNA, 498 bp, Muscodor strobelii
  misc_feature: SGI cDNA ID NO. 562701
  misc_feature: Reduced expression when VOC is produced
  misc_feature: Encodes the peptide sequence at SEQ ID NO 8732
atgtcaggcgccaactcgacacgcagcgcgacgaagcgcttgttaaaagagcttacgacgtgggagaaagagtccgcgaccgagacgggcatcgagcgattgggccccgtgaacgaggacgagttgctgaggtgggaggcagttatcaatggacggggggttggcagtggttatgacgaaggtcgctggctcctacaagtagacatcccacccacctaccccctcggacctcccaagatcaccttcaagacctccatcgtccaccccaatatctctctccagaagggcgagatatgtctcgacctgctgaaggatgcttggacacctgcgtactctgtgctagagtgtgtcagggctgtcaggatgttgttgagttgtcccgagacggattcgccgctcaacgttgacgttgcggcgctaatcaggggtggcgatacggtcggcgccaggaggttggtgacgttttggtgtgaaggagaaagatattatggaaagtga

SEQ ID NO: 8732 - protein, 165 aa, Muscodor strobelii
  misc_feature: SGI Peptide ID NO. 562701
  misc_feature (13)..(157): Pfam Id: PF00179 Pfam Desc: Ubiquitin-conjugating enzyme
  misc_feature (4)..(164): NCBI GI: 46124959 Blast Desc: FG06857.1 [Gibberella zeae PH-1]
  misc_feature (6)..(164): NCBI GI: 85111515 Blast Desc: NCU02636 [Neurospora crassa OR74A] gi|28925728|gb|EAA34737.1| conserved [Neurospora crassa OR74A]
  misc_feature (8)..(165): NCBI GI: 116182016 Blast Desc: CHGG_01636 [Chaetomium globosum CBS 148.51] gi|88185933|gb|EAQ93401.1| CHGG_01636 [Chaetomium globosum CBS 148.51]
  misc_feature (5)..(164): NCBI GI: 39975347 Blast Desc: MGG_00180 [Magnaporthe grisea 70-15] gi|145018967|gb|EDK03246.1| MGG_00180 [Magnaporthe grisea 70-15]
  misc_feature (2)..(164): NCBI GI: 261356135 Blast Desc: ubiquitin-conjugating enzyme [Verticillium albo-atrum VaMs.102]
  misc_feature (28)..(164): NCBI GI: 171687289 Blast Desc: protein product [Podospora anserina] gi|170943606|emb|CAP69258.1| protein product [Podospora anserina]
  misc_feature (1)..(163): NCBI GI: 189199824 Blast Desc: ubiquitin-conjugating enzyme E2 4 [Pyrenophora tritici-repentis Pt-1C-BFP] gi|187983348|gb|EDU48836.1| ubiquitin-conjugating enzyme E2 4 [Pyrenophora tritici-repentis
  misc_feature (6)..(165): NCBI GI: 240106389 Blast Desc: ubiquitin-conjugating enzyme, [Coccidioides posadasii C735 delta SOWgp]
  misc_feature (6)..(165): NCBI GI: 119191664 Blast Desc: ubiquitin-conjugating enzyme [Coccidioides immitis RS]
  misc_feature (6)..(164): NCBI GI: 212526282 Blast Desc: ubiquitin conjugating enzyme (UbcJ), [Penicillium marneffei ATCC 18224] gi|210072696|gb|EEA26783.1| ubiquitin conjugating enzyme (UbcJ), [Penicillium marneffei ATCC 18224]
  misc_feature (13)..(164): SWISSPROT Homolog: EC 6.3.2.19 Ubiquitin--protein ligase
  misc_feature: Useful for introducing or modulating the production of volatile compounds
MSGANSTRSATKRLLKELTTWEKESATETGIERLGPVNEDELLRWEAVINGRGVGSGYDEGRWLLQVDIPPTYPLGPPKITFKTSIVHPNISLQKGEICLDLLKDAWTPAYSVLECVRAVRMLLSCPETDSPLNVDVAALIRGGDTVGARRLVTFWCEGERYYGK

SEQ ID NO: 8733 - DNA, 2945 bp, Muscodor strobelii
  misc_feature: SGI EST ID NO. CUFF.21058.0
  misc_feature: Variant of the nucleotide sequence at SEQ ID NO 8731
ggaacgtcaacgcgagctgaagcgattctaattgtgattctgaccatttaataactaccttacatcacgcactaaaaatactctcagcgactccgattgaacgttgtataccatcgatctcttgatttctcagagactggcaatcttaacaatctgatcctgatcgcggtgtcccatcaccgaggggcagcacagtcgcgcgccgaacacctacgtctacgtctacatctacaccaaaccacaatgtcaggcgccaactcgacacgcagcgcgacgaagcgcttgttaaaagagcttacgacgtgggagaaagagtccgcgaccgagacgggcatcgagcgattgggccccgtgaacgaggacgagttgctgaggtgggaggcagttatcaatggacggggggttggcagtggttatgacgaaggtcgctggctcctacaagtagacatcccacccacctaccccctcggacctcccaagatcaccttcaagacctccatcgtccaccccaatatctctctccagaagggcgagatatgtctcgacctgctgaaggatgcttggacacctgcgtactctgtgctagagtgtgtcagggctgtcaggatgttgttgagttgtcccgagacggattcgccgctcaacgttgacgttgcggcgctaatcaggggtggcgatacggtcggcgccaggaggttggtgacgttttggtgtgaaggagaaagatattatggaaagtgaggagataatacgatgggttggattgctgagggcgagagactttctatttgggaagagatcgctggagttggattccaggcgcaatatcttaattgatggataggattaaccagcgaaagccacaaagcgaatggggtttgccatccgacccgtgaaagattgtataacaaaacaggaggccccgacttgtggacatgtcactgtcacgaataatgaaatattcctttcgatgtaaatatctttcccctttcatccacacccgtcaagcaaagtccgatggcgcagatgagttcagattgaagtcgatatgcatatttatttcatatgatatttggtgggcggcgccttcgcgaccctttctaccatgctttccaatcgaataatatagttttacactgttatttcttgattcgaagcgcgatctgcgggcttccagtggtttgtgacgtggatattcatgtcgaacggaacttgccccgaacacgccaaaattgttatagagttcccttttgctcacatttcattgtgagatccaaaagatgtttcaacatcttgttcttgcgacgctttctgcgcgcaactatgatcacgcctcatcgtacatggtgagctctactcattgtaatgatacacctagcagggtatcagcatacgcacaggtgaaaatggatagtcagatcagtaagcaagacgtcagattgagtataccttgtagtttggcagacccgtggcccggtagtttagtcggctcgccatcttcgcaaatccttccgtctcgatcaaatgatagaaggggaagggcgggaacatagcgccgtctcggtggacgtctgctttgaccaacaatgccgtgccacccacgccgtcgagctcaacttctgcgtctctttcgtcatttaagtccgccatataggccatgagagtcctgtatgttgccattgacgaatagccctccaggagaatgtcgtcgggacccattttatcaccgatctctttggccgtcgcgctgtcctgccaactattgaagtcgtagggtcgttctgcaagcttcccagtctcaggatccgtgtatttttgatagcagtttggtacgatcaagggcttatcgtgggcggcgaggtcttggatcaaggtgggaggtgtctcgacaatatcggcgtcaagccaaagcacccacgatgtgtctgctcccagggttgtgaataatagcgagttgcgagccctggacatggctgagcgtctctccttctggttttccattttgtggcgctcactctcttcttgtgaagctagcggcggctcgaaatcctgtcgttcgatcacgatgcttctaaagcgcgattctaagggtcctgtctgcgtcttggagacctgagcttggagctgcgcggtcgcggcattgccttctttgtttttgggaaggatgaagccgagggagataagatcgtggggatattcgagtctcaagaggttgtcccagtactcttggtagaagcgagccatgggcgtcaggatgagcacggcctctctgttttcgatggggttcggcgtgatggtgacattgttgaggttgaagcggcgtactggcggacgatccggtatgagtttcgctttcgagatgggcttttgactgcttgtgtccgccgggccgttggaggatattgggggagtcgtaatcagatccgcccagcagaaggaaatagaggataaagagacagagagcgccaccgatggttaaggtgacatagttggtcctccgtagacggacgggccccatggggcgcgccatttggcggagtgtgatgattttcgttcacgtatcgatccctttacgcggacatggaaaacaagactatcgagctgctggccggggacggaatggggaatgtgcttggtcgcattcgcagacacacaagcaggcaagcaagcaatgaaggaacgccgtcaatgggccgaatggagggcaattgggagccgcagtcgtccaagaccaaagtacggctcgtaatagacgtcgacagagtctggggtgcgaggccaaattgcaactgcgacaaggggatgacggagtggtcgcgggtacagtagtgtcgtagtctttaggctgtcagagccgctacaatagacgtgctaaggttctaaagttaggtgtgtacctccgcctgagtgccagtgcgcaggcgctcgcctggttcgcctggcag

SEQ ID NO: 8734 - DNA, 969 bp, Muscodor strobelii
  misc_feature: SGI cDNA ID NO. 562702
  misc_feature: Encodes the peptide sequence at SEQ ID NO 8735
atggggcccgtccgtctacggaggaccaactatcccatctcgaaagcgaaactcataccggatcgtccgccagtacgccgcttcaacctcaacaatgtcaccatcacgccgaaccccatcgaaaacagagaggccgtgctcatcctgacgcccatggctcgcttctaccaagagtactgggacaacctcttgagactcgaatatccccacgatcttatctccctcggcttcatccttcccaaaaacaaagaaggcaatgccgcgaccgcgcagctccaagctcaggtctccaagacgcagacaggacccttagaatcgcgctttagaagcatcgtgatcgaacgacaggatttcgagccgccgctagcttcacaagaagagagtgagcgccacaaaatggaaaaccagaaggagagacgctcagccatgtccagggctcgcaactcgctattattcacaaccctgggagcagacacatcgtgggtgctttggcttgacgccgatattgtcgagacacctcccaccttgatccaagacctcgccgcccacgataagcccttgatcgtaccaaactgctatcaaaaatacacggatcctgagactgggaagcttgcagaacgaccctacgacttcaatagttggcaggacagcgcgacggccaaagagatcggtgataaaatgggtcccgacgacattctcctggagggctattcgtcaatggcaacatacaggactctcatggcctatatggcggacttaaatgacgaaagagacgcagaagttgagctcgacggcgtgggtggcacggcattgttggtcaaagcagacgtccaccgagacggcgctatgttcccgcccttccccttctatcatttgatcgagacggaaggatttgcgaagatggcgagccgactaaactaccgggccacgggtctgccaaactacaaggtgtatcattacaatgagtag

SEQ ID NO: 8735 - protein, 322 aa, Muscodor strobelii
  misc_feature: SGI Peptide ID NO. 562702
  misc_feature (4)..(322): Pfam Id: PF03452 Pfam Desc: Anp1
  misc_feature (30)..(322): Pfam Id: PF03452 Pfam Desc: Anp1
  misc_feature (23)..(322): NCBI GI: 39975365 Blast Desc: MGG_00171 [Magnaporthe grisea 70-15] gi|145018978|gb|EDK03257.1| MGG_00171 [Magnaporthe grisea 70-15]
  misc_feature (23)..(322): NCBI GI: 256732665 Blast Desc: glycosyltransferase family 62 [Nectria haematococca mpVI 77-13-4]
  misc_feature (23)..(322): NCBI GI: 85111696 Blast Desc: mannan polymerase complexes MNN9 subunit [Neurospora crassa OR74A] gi|28925822|gb|EAA34824.1| mannan polymerase complexes MNN9 subunit [Neurospora crassa OR74A]
  misc_feature (23)..(322): NCBI GI: 46124957 Blast Desc: FG06856.1 [Gibberella zeae PH-1]
  misc_feature (6)..(322): NCBI GI: 156061329 Blast Desc: SS1G_02807 [Sclerotinia sclerotiorum 1980] gi|154700211|gb|EDN99949.1| SS1G_02807 [Sclerotinia sclerotiorum 1980]
  misc_feature (6)..(322): NCBI GI: 154313773 Blast Desc: BC1G_05736 [Botryotinia fuckeliana B05.10] gi|150849318|gb|EDN24511.1| BC1G_05736 [Botryotinia fuckeliana B05.10]
  misc_feature (20)..(317): NCBI GI: 171687287 Blast Desc: protein product [Podospora anserina] gi|170943605|emb|CAP69257.1| protein product [Podospora anserina]
  misc_feature (20)..(322): NCBI GI: 225558175 Blast Desc: conserved [Ajellomyces capsulatus G186AR]
  misc_feature (20)..(322): NCBI GI: 240273415 Blast Desc: MNN9 protein [Ajellomyces capsulatus H143]
  misc_feature (23)..(322): NCBI GI: 212527276 Blast Desc: alpha-1,6 mannosyltransferase subunit (Mnn9), [Penicillium marneffei ATCC 18224] gi|210073193|gb|EEA27280.1| alpha-1,6 mannosyltransferase subunit (Mnn9), [Penicillium ATCC
MGPVRLRRTNYPISKAKLIPDRPPVRRFNLNNVTITPNPIENREAVLILTPMARFYQEYWDNLLRLEYPHDLISLGFILPKNKEGNAATAQLQAQVSKTQTGPLESRFRSIVIERQDFEPPLASQEESERHKMENQKERRSAMSRARNSLLFTTLGADTSWVLWLDADIVETPPTLIQDLAAHDKPLIVPNCYQKYTDPETGKLAERPYDFNSWQDSATAKEIGDKMGPDDILLEGYSSMATYRTLMAYMADLNDERDAEVELDGVGGTALLVKADVHRDGAMFPPFPFYHLIETEGFAKMASRLNYRATGLPNYKVYHYNE

SEQ ID NO: 8736 - DNA, 2976 bp, Muscodor strobelii
  misc_feature: SGI EST ID NO. CUFF.21059.1
  misc_feature: Variant of the nucleotide sequence at SEQ ID NO 8734
ctgccaggcgaaccaggcgagcgcctgcgcactggcactcaggcggaggtacacacctaactttagaaccttagcacgtctattgtagcggctctgacagcctaaagactacgacactactgtacccgcgaccactccgtcatccccttgtcgcagttgcaatttggcctcgcaccccagactctgtcgacgtctattacgagccgtactttggtcttggacgactgcggctcccaattgccctccattcggcccattgacggcgttccttcattgcttgcttgcctgcttgtgtgtctgcgaatgcgaccaagcacattccccattccgtccccggccagcagctcgatagtcttgttttccatgtccgcgtaaagggatcgatacgtgaacgaaaatcatcacactccgccaaatggcgcgccccatggggcccgtccgtctacggaggaccaactatgtcaccttaaccatcggtggcgctctctgtctctttatcctctatttccttctgctgggcggatctgattacgactcccccaatatcctccaacggcccggcggacacaagcagtcaaaagcccatctcgaaagcgaaactcataccggatcgtccgccagtacgccgcttcaacctcaacaatgtcaccatcacgccgaaccccatcgaaaacagagaggccgtgctcatcctgacgcccatggctcgcttctaccaagagtactgggacaacctcttgagactcgaatatccccacgatcttatctccctcggcttcatccttcccaaaaacaaagaaggcaatgccgcgaccgcgcagctccaagctcaggtctccaagacgcagacaggacccttagaatcgcgctttagaagcatcgtgatcgaacgacaggatttcgagccgccgctagcttcacaagaagagagtgagcgccacaaaatggaaaaccagaaggagagacgctcagccatgtccagggctcgcaactcgctattattcacaaccctgggagcagacacatcgtgggtgctttggcttgacgccgatattgtcgagacacctcccaccttgatccaagacctcgccgcccacgataagcccttgatcgtaccaaactgctatcaaaaatacacggatcctgagactgggaagcttgcagaacgaccctacgacttcaatagttggcaggacagcgcgacggccaaagagatcggtgataaaatgggtcccgacgacattctcctggagggctattcgtcaatggcaacatacaggactctcatggcctatatggcggacttaaatgacgaaagagacgcagaagttgagctcgacggcgtgggtggcacggcattgttggtcaaagcagacgtccaccgagacggcgctatgttcccgcccttccccttctatcatttgatcgagacggaaggatttgcgaagatggcgagccgactaaactaccgggccacgggtctgccaaactacaaggtgtatcattacaatgagtagagctcaccatgtacgatgaggcgtgatcatagttgcgcgcagaaagcgtcgcaagaacaagatgttgaaacatcttttggatctcacaatgaaatgtgagcaaaagggaactctataacaattttggcgtgttcggggcaagttccgttcgacatgaatatccacgtcacaaaccactggaagcccgcagatcgcgcttcgaatcaagaaataacagtgtaaaactatattattcgattggaaagcatggtagaaagggtcgcgaaggcgccgcccaccaaatatcatatgaaataaatatgcatatcgacttcaatctgaactcatctgcgccatcggactttgcttgacgggtgtggatgaaaggggaaagatatttacatcgaaaggaatatttcattattcgtgacagtgacatgtccacaagtcggggcctcctgttttgttatacaatctttcacgggtcggatggcaaaccccattcgctttgtggctttcgctggttaatcctatccatcaattaagatattgcgcctggaatccaactccagcgatctcttcccaaatagaaagtctctcgccctcagcaatccaacccatcgtattatctcctcactttccataatatctttctccttcacaccaaaacgtcaccaacctcctggcgccgaccgtatcgccacccctgattagcgccgcaacgtcaacgttgagcggcgaatccgtctcgggacaactcaacaacatcctgacagccctgacacactctagcacagagtacgcaggtgtccaagcatccttcagcaggtcgagacatatctcgcccttctggagagagatattggggtggacgatggaggtcttgaaggtgatcttgggaggtccgagggggtaggtgggtgggatgtctacttgtaggagccagcgaccttctgtacgcgaggtgaaacgttagcctgtcaatctatgcttgtacatgaacggggcaggtgatgatgatgcgccgatgaatgatgcataagcccgggaagaacgaaccgtcataaccactgccaaccccccgtccattgataactgcctcccacctcagcaactcgtcctcgttcacggggcccaatcgctcgatgcccgtctcggtcgcggactctttctcccacgtcgtaagctcttttaacaagcgcttcgtcgcgctgcgtgtcgagttggcgcctgacattgtggtttggtgtagatgtagacgtagacgtaggtgttcggcgcgcgactgtgctgcccctcggtgatgggacaccgcgatcaggatcagattgttaagattgccagtctctgagaaatcaagagatcgatggtatacaacgttcaatcggagtcgctgagagtatttttagtgcgtgatgtaaggtagttattaaatggtcagaatcacaattagaatcgcttcagctcgcgttgacgttcc

SEQ ID NO: 8737 - DNA, 972 bp, Muscodor strobelii
  misc_feature: SGI cDNA ID NO. 562703
  misc_feature: Encodes the peptide sequence at SEQ ID NO 8738
atggagcccatggagcccgtgcccgagacggagcgaatggaggcgttccgctcctcgcccctgccgactctgcgtctacagagtcctgtgccgactgagttagacatgaacagaaagccgctgaacccccgtcggtctactgagccggcgtctcccagctctcctctgttctcgtcttcggtgtctatcccgtatcgccctcgcaccgcgtctcccctctctggtgggcacacacgttccaagtcgacgaccaatctcacaccgctctcgatgaaccgcacccgctccatgcctggcgtcgatggtgccggccgtatattgtacgcgccgcaaatccgcccagccagtccgtctcagtctcctcatagacaacgggtacctcgaaagcccatggatgaggccttccctccttcctctcccgttcgatcctctgttctcgacaacgacagacgacacctggagcgaagcagctcaccaacccccagcatccctcccgctgtgacgcttccacacaagcgaacctcatcgcctctccgctacagcgcctatccctcgcccacccccagcttcacctaccccggcgcctcttcctcttcggcggccacttcgccatcgttgcgatccgacagtttggggtataatttcccgacttactatccgtcttcctctgtcccgtcaaccccaagctccatgcgttccagaagtcccagcatctctagtcttgagacgattcccgattcaccggatgccgaagaggcggccctagaagccgagagaatcgcacagctgaaagctgctgcggatgctgccgaaggcaacgacggcaacgagtccaaggggcgaaataacctcgatgtgccgtcccgcggccggactctcggtgtcgggtcgagagacaagcgcaagcgctggagtgtgtgtggcgctgagagacgaggtgatctcgatctggagaccatctgggaagattga

SEQ ID NO: 8738 - protein, 323 aa, Muscodor strobelii
  misc_feature: SGI Peptide ID NO. 562703
  misc_feature (4)..(323): NCBI GI: 46106126 Blast Desc: FG00410.1 [Gibberella zeae PH-1]
  misc_feature (4)..(323): NCBI GI: 261357313 Blast Desc: conserved [Verticillium albo-atrum VaMs.102]
  misc_feature (4)..(323): NCBI GI: 39965368 Blast Desc: MGG_09939 [Magnaporthe grisea 70-15] gi|145013158|gb|EDJ97799.1| MGG_09939 [Magnaporthe grisea 70-15]
  misc_feature (4)..(323): NCBI GI: 116182442 Blast Desc: CHGG_01849 [Chaetomium globosum CBS 148.51] gi|88186146|gb|EAQ93614.1| CHGG_01849 [Chaetomium globosum CBS 148.51]
  misc_feature (4)..(323): NCBI GI: 171695176 Blast Desc: protein product [Podospora anserina] gi|170947830|emb|CAP59994.1| protein product [Podospora anserina]
  misc_feature (4)..(323): NCBI GI: 85112843 Blast Desc: NCU03270 [Neurospora crassa OR74A] gi|28926204|gb|EAA35187.1| [Neurospora crassa OR74A]
  misc_feature (37)..(323): NCBI GI: 189208131 Blast Desc: conserved [Pyrenophora tritici-repentis Pt-1C-BFP] gi|187976492|gb|EDU43118.1| conserved [Pyrenophora tritici-repentis Pt-1C-BFP]
  misc_feature (172)..(323): NCBI GI: 169615068 Blast Desc: SNOG_10688 [Phaeosphaeria nodorum SN15] gi|111060962|gb|EAT82082.1| SNOG_10688 [Phaeosphaeria nodorum SN15]
  misc_feature (67)..(323): NCBI GI: 255942199 Blast Desc: Pc18g00210 [Penicillium chrysogenum Wisconsin 54-1255] gi|211586601|emb|CAP94245.1| Pc18g00210 [Penicillium chrysogenum Wisconsin 54-1255]
  misc_feature (4)..(164): NCBI GI: 156061335 Blast Desc: SS1G_02810 [Sclerotinia sclerotiorum 1980] gi|154700214|gb|EDN99952.1| SS1G_02810 [Sclerotinia sclerotiorum 1980]
MEPMEPVPETERMEAFRSSPLPTLRLQSPVPTELDMNRKPLNPRRSTEPASPSSPLFSSSVSIPYRPRTASPLSGGHTRSKSTTNLTPLSMNRTRSMPGVDGAGRILYAPQIRPASPSQSPHRQRVPRKPMDEAFPPSSPVRSSVLDNDRRHLERSSSPTPSIPPAVTLPHKRTSSPLRYSAYPSPTPSFTYPGASSSSAATSPSLRSDSLGYNFPTYYPSSSVPSTPSSMRSRSPSISSLETIPDSPDAEEAALEAERIAQLKAAADAAEGNDGNESKGRNNLDVPSRGRTLGVGSRDKRKRWSVCGAERRGDLDLETIWED

SEQ ID NO: 8739 - DNA, 2696 bp, Muscodor strobelii
  misc_feature: SGI EST ID NO. CUFF.20986.0
  misc_feature: Variant of the nucleotide sequence at SEQ ID NO 8737
cccgttcgtgcctgttgtcgcctgtgccgtggcgtctgaacagcgtgataggtaggtagggtccataggctctggcccgcctataaacggcggcccctacagcgactagtccagtgactgggccgctacaccccttggcgtgggccccctcttgaccacctttctttacctcttccgatgccgtcccatctgcccgtccgtccgtttacagccaacctttaccctcgacctcgaccttgatcgtacaaagggcgctggtaacaacttctctctcgcaagctgtcggtccttctacagcctgcgtctatccgtcaagctacctaaggcatacagcattctgttcggctgcctgtgcgtccttctgcttctggcgtatcggaaatatcattggcaagccgactttgatgcacttctgtcgacctcggtaaatggcatagtagatacatgaacgtgcgaacaacaatagggtcttcggcctggtaagggaacacaaggtgaaatactcgcctctatgtgcttcggtctatcgtctccgtagcaggtcaggattcggttgtggcattaaatcctccggccgactatcaccatctaatctccttggttgatccgcgagatctccatcgccactttgaccgcccctcgacccttttatctctcctctcctgtacgactcaccgtccgacatcaactcgcactcgcgcggtctcacctttgtccccatcactttgggtgcgacaagtgggatttctgtgcatttgacatttagagccgcccgcgcctgatgtttcacggcaacttcatcgcccttcaacaataacacgccgccctattgtcatctgcccactgcattccaacgccctttgcgcgaccacagctgcaacataaacatctgcccctcctccgtccatacgcatatcgtcattcgaccgcatcgatatcgacagactctggttcaatacttatacttgatgcaccacgctgaagcaattcccccggggtagaaaccactatcaacatggagcccatggagcccgtgcccgagacggagcgaatggaggcgttccgctcctcgcccctgccgactctgcgtctacagagtcctgtgccgactgagttagacatgaacagaaagccgctgaacccccgtcggtctactgagccggcgtctcccagctctcctctgttctcgtcttcggtgtctatcccgtatcgccctcgcaccgcgtctcccctctctggtgggcacacacgttccaagtcgacgaccaatctcacaccgctctcgatgaaccgcacccgctccatgcctggcgtcgatggtgccggccgtatattgtacgcgccgcaaatccgcccagccagtccgtctcagtctcctcatagacaacgggtacctcgaaagcccatggatgaggccttccctccttcctctcccgttcgatcctctgttctcgacaacgacagacgacacctggagcgaagcagctcaccaacccccagcatccctcccgctgtgacgcttccacacaagcgaacctcatcgcctctccgctacagcgcctatccctcgcccacccccagcttcacctaccccggcgcctcttcctcttcggcggccacttcgccatcgttgcgatccgacagtttggggtataatttcccgacttactatccgtcttcctctgtcccgtcaaccccaagctccatgcgttccagaagtcccagcatctctagtcttgagacgattcccgattcaccggatgccgaagaggcggccctagaagccgagagaatcgcacagctgaaagctgctgcggatgctgccgaaggcaacgacggcaacgagtccaaggggcgaaataacctcgatgtgccgtcccgcggccggactctcggtgtcgggtcgagagacaagcgcaagcgctggagtgtgtgtggcgctgagagacgaggtgatctcgatctggagaccatctgggaagattgatcttgccttcctatagcaagcgggatgctttctactcgcatatataagacagtcagcggtaaacactttggtaagtgggatttggtgtctactctcccacttcgcgagcatagttcaggttgtcaaggaggagcattcgggcgtttcggttggtttcttttgctttgataccctgctgcgagttagttttatacaaagacaaatcaatcattcgacgttgtgtagatctttagtttacgcgggaagagaaatgcaagggcaatgggatcgatatattcaagtacgttaggtatgcaaatgagtacgctggtcatgcctaacaactatttttgcctctctatatttggtacatcgtgacacgtcacttgtgatcaagggttagtttcccgatatatggatcgtgttgtttaccatgttagaaatgctttacggttagattgtttttatgataatttattgcagacatgtgaacttgagctaagatgatggtctttgtatactcatcgtccttacgaacccatggttattacttatcttctattccaatccaagcacgttttccatgttttagaacacggcctgtccagatataccctccatgaagcgatgcgacatcaacttcgacatggcatgctaacataacagcactctcgaagtgatcatccctagaagcaacaaatgcgtctgcttatgaattgaaaggtgttcg

SEQ ID NO: 8740 - DNA, 1269 bp, Muscodor strobelii
  misc_feature: SGI cDNA ID NO. 562704
  misc_feature: Encodes the peptide sequence at SEQ ID NO 8741
atggctacacatcagcaagcgccctcgattccgaatctgagagacaggctccccaaattggagccgagaaagaggcgagcagcacctggatctaggaatacggtgcctcttccagagactccagctctcccgtcacctccgaactcatccgacttatcatttcaaattcccactcgtcggatcttatcacccagagaccatgagctttttctctcatcgcctacacacgatctagtaacagctttcgtctttggcctctcggatgctgtagtagatacacccatatccgctgtgaaggacgaagattctagcccagtaatcaataccattatcaatatcttaaacgaagccgaagcactcgttctagcaacaccacccgacgatgcagatggatcacgcttcggaaacaaagtcttccgcacctacctcgacaaggtgaaatctgcgagtaacgcatggcacactcaactgaatgtcccagaagtggctatcgatgaagtttccacgtacctcaaccaatccctcggcaaccgtacacgcatagattacggctcgggtcacgaacttaacttcataatctggcttctctgcctctatcagctccgtctcatcaaacccgtagacttcaaacccctggttctccgtgtattcacccgctacctaggcctcatgcgtagcatccaatcgacgtactatctcgagccagccggttcccatggagtctggggtctagacgactaccaatttctaccattcctcttcggcgcctctcaactcctgcaccacccttacatcacgcccctggccatccaccagcagctcactatcgaagaattcagctgcgagtttttatacctctcacaagtagacttcgtaaacagcaccaaaaccgtcaagggactccgttggcacagccccatgcttgacgacatatcgtccgccaaatcatggaccaaaatccacgatggcatgaaaaagatgttcatcgcagaagtactgcgcaagttgcccgttatgcagcacttcctctttgggtctttagtccccgcggtggagggcatgagcacagagtccgaagttggtgtggcccacgaggaagatgaactcgaaggcggcgctgtcgtggtagagcatgatggtgtccgacatgtacaccaggcgaacagctggggggattgttgtggtattaaagtgcccagtgccattgccgctgcgcaggcagcgaggaagaatggcgcggagggtttgaggaggataccttttgattag

SEQ ID NO: 8741 - protein, 422 aa, Muscodor strobelii
  misc_feature: SGI Peptide ID NO. 562704
  misc_feature (56)..(356): Pfam Id: PF03095 Pfam Desc: Phosphotyrosyl phosphate activator (PTPA) protein
  misc_feature (10)..(422): NCBI GI: 154313783 Blast Desc: BC1G_05741 [Botryotinia fuckeliana B05.10] gi|150849323|gb|EDN24516.1| BC1G_05741 [Botryotinia fuckeliana B05.10]
  misc_feature (2)..(422): NCBI GI: 156061395 Blast Desc: SS1G_02841 [Sclerotinia sclerotiorum 1980] gi|154700244|gb|EDN99982.1| SS1G_02841 [Sclerotinia sclerotiorum 1980]
  misc_feature (7)..(422): NCBI GI: 39965325 Blast Desc: MGG_09935 [Magnaporthe grisea 70-15] gi|145013162|gb|EDJ97803.1| MGG_09935 [Magnaporthe grisea 70-15]
  misc_feature (9)..(422): NCBI GI: 85112839 Blast Desc: NCU03269 [Neurospora crassa OR74A] gi|74618180|sp|Q7SEF9.1|PTPA2_NEUCR RecName: Full=Serine/threonine-protein phosphatase 2A activator 2; PTPA-2;
  misc_feature (2)..(422): NCBI GI: 256734424 Blast Desc: [Nectria haematococca mpVI 77-13-4]
  misc_feature (12)..(422): NCBI GI: 46108420 Blast Desc: FG01092.1 [Gibberella zeae PH-1] gi|126310009|sp|Q4INW6.1|PTPA2_GIBZE RecName: Full=Serine/threonine-protein phosphatase 2A activator 2; PTPA-2;
  misc_feature (9)..(422): NCBI GI: 116182444 Blast Desc: CHGG_01850 [Chaetomium globosum CBS 148.51] gi|88186147|gb|EAQ93615.1| CHGG_01850 [Chaetomium globosum CBS 148.51]
  misc_feature (3)..(422): NCBI GI: 261357311 Blast Desc: serine/threonine-protein phosphatase 2A activator 2 [Verticillium albo-atrum VaMs.102]
  misc_feature (8)..(422): NCBI GI: 189207685 Blast Desc: serine/threonine-protein phosphatase 2A activator 2 [Pyrenophora tritici-repentis Pt-1C-BFP] gi|187976269|gb|EDU42895.1| serine/threonine-protein phosphatase
  misc_feature (7)..(422): NCBI GI: 171694982 Blast Desc: protein product [Podospora anserina] gi|170947733|emb|CAP59896.1| protein product [Podospora anserina]
  misc_feature (9)..(422): SWISSPROT Homolog: EC 5.2.1.8 Peptidylprolyl isomerase
MATHQQAPSIPNLRDRLPKLEPRKRRAAPGSRNTVPLPETPALPSPPNSSDLSFQIPTRRILSPRDHELFLSSPTHDLVTAFVFGLSDAVVDTPISAVKDEDSSPVINTIINILNEAEALVLATPPDDADGSRFGNKVFRTYLDKVKSASNAWHTQLNVPEVAIDEVSTYLNQSLGNRTRIDYGSGHELNFIIWLLCLYQLRLIKPVDFKPLVLRVFTRYLGLMRSIQSTYYLEPAGSHGVWGLDDYQFLPFLFGASQLLHHPYITPLAIHQQLTIEEFSCEFLYLSQVDFVNSTKTVKGLRWHSPMLDDISSAKSWTKIHDGMKKMFIAEVLRKLPVMQHFLFGSLVPAVEGMSTESEVGVAHEEDELEGGAVVVEHDGVRHVHQANSWGDCCGIKVPSAIAAAQAARKNGAEGLRRIPFD

SEQ ID NO: 8742 - DNA, 1556 bp, Muscodor strobelii
  misc_feature: SGI EST ID NO. CUFF.20993.0
  misc_feature: Variant of the nucleotide sequence at SEQ ID NO 8740
tggtgaggctcaaatctcatctcaaccacacctgctcacgagctcttgcgcagctactgcttccactcacctcattcacacttctgttatccagctcctacaaaattacgcaacacttttccgatcaccaactaccaacaactccatacaatcagagatctgggatattgataaacagctcaccctgtgtaagatcgtttgccacctagcaaccgtctaagccgcccatcatggctacacatcagcaagcgccctcgattccgaatctgagagacaggctccccaaattggagccgagaaagaggcgagcagcacctggatctaggaatacggtgcctcttccagagactccagctctcccgtcacctccgaactcatccgacttatcatttcaaattcccactcgtcggatcttatcacccagagaccatgagctttttctctcatcgcctacacacgatctagtaacagctttcgtctttggcctctcggatgctgtagtagatacacccatatccgctgtgaaggacgaagattctagcccagtaatcaataccattatcaatatcttaaacgaagccgaagcactcgttctagcaacaccacccgacgatgcagatggatcacgcttcggaaacaaagtcttccgcacctacctcgacaaggtgaaatctgcgagtaacgcatggcacactcaactgaatgtcccagaagtggctatcgatgaagtttccacgtacctcaaccaatccctcggcaaccgtacacgcatagattacggctcgggtcacgaacttaacttcataatctggcttctctgcctctatcagctccgtctcatcaaacccgtagacttcaaacccctggttctccgtgtattcacccgctacctaggcctcatgcgtagcatccaatcgacgtactatctcgagccagccggttcccatggagtctggggtctagacgactaccaatttctaccattcctcttcggcgcctctcaactcctgcaccacccttacatcacgcccctggccatccaccagcagctcactatcgaagaattcagctgcgagtttttatacctctcacaagtagacttcgtaaacagcaccaaaaccgtcaagggactccgttggcacagccccatgcttgacgacatatcgtccgccaaatcatggaccaaaatccacgatggcatgaaaaagatgttcatcgcagaagtactgcgcaagttgcccgttatgcagcacttcctctttgggtctttagtccccgcggtggagggcatgagcacagagtccgaagttggtgtggcccacgaggaagatgaactcgaaggcggcgctgtcgtggtagagcatgatggtgtccgacatgtacaccaggcgaacagctggggggattgttgtggtattaaagtgcccagtgccattgccgctgcgcaggcagcgaggaagaatggcgcggagggtttgaggaggataccttttgattagattgctgcaggtacttataaatattataataaatgagtattgttgagtacctattcg

SEQ ID NO: 8743 - DNA, 756 bp, Muscodor strobelii
  misc_feature: SGI cDNA ID NO. 562705
  misc_feature: Encodes the peptide sequence at SEQ ID NO 8744
atgactgtggccactgtccccgcggctctgctgtcccatctgcacaaggcggatggatcggcgaccttctcgcatgctgggtacacggttgtgggagctgtgaacggccccatcgaggcccaaaagcgagacgaacttccggaagaagccatcatcgacgtcgtcgtccgacctgctgccggcgttggaggcccccgagagcgccacttggaatcgctcatacagtcgacactgcgccagatcgtcctcatcaacagcttccctcgcaccctcatccaggtaatcctgcagatcacggttgcaccggagaatgactatgtcaactccaagctggcccaggcaaatatcaatcttcccgtcctacccgctctcctccaaaccgccgtgctcgctatcctctccgccgctctgcccttgactgctaccatcacctctgtacccctcgctatagtctctgtaggtgggggccaagaagtcctcaacaacccaacggcacgggaaatcgagcagtcccggtctttccacgtcttcgccttcacttcggataatcaattgcttctctccgagagcgaaggatcatttacaatgtccgaatgggaagaggtctatgccattgctcagaatcaatgctgcccgtcagccgaagccgatagtgatgttgctatggaccagggccatctagcggcggccgatctcaaggcatttacgcggtcggccttagagcagaaaacggcttcggatttatactggaagtga

SEQ ID NO: 8744 - protein, 251 aa, Muscodor strobelii
  misc_feature: SGI Peptide ID NO. 562705
  misc_feature (1)..(251): NCBI GI: 154313781 Blast Desc: BC1G_05740 [Botryotinia fuckeliana B05.10] gi|150849322|gb|EDN24515.1| BC1G_05740 [Botryotinia fuckeliana B05.10]
  misc_feature (2)..(251): NCBI GI: 171694984 Blast Desc: protein product [Podospora anserina] gi|170947734|emb|CAP59897.1| protein product [Podospora anserina]
  misc_feature (3)..(251): NCBI GI: 85112835 Blast Desc: NCU03268 [Neurospora crassa OR74A] gi|28926202|gb|EAA35185.1| [Neurospora crassa OR74A]
  misc_feature (1)..(251): NCBI GI: 116182446 Blast Desc: CHGG_01851 [Chaetomium globosum CBS 148.51] gi|88186148|gb|EAQ93616.1| CHGG_01851 [Chaetomium globosum CBS 148.51]
  misc_feature (1)..(251): NCBI GI: 256735135 Blast Desc: [Nectria haematococca mpVI 77-13-4]
  misc_feature (7)..(251): NCBI GI: 39965336 Blast Desc: MGG_09936 [Magnaporthe grisea 70-15] gi|145013161|gb|EDJ97802.1| MGG_09936 [Magnaporthe grisea 70-15]
  misc_feature (1)..(251): NCBI GI: 46108418 Blast Desc: FG01091.1 [Gibberella zeae PH-1]
  misc_feature (11)..(251): NCBI GI: 261357310 Blast Desc: conserved [Verticillium albo-atrum VaMs.102]
  misc_feature (6)..(251): NCBI GI: 169614405 Blast Desc: SNOG_10343 [Phaeosphaeria nodorum SN15] gi|111061558|gb|EAT82678.1| SNOG_10343 [Phaeosphaeria nodorum SN15]
  misc_feature (7)..(251): NCBI GI: 189199822 Blast Desc: conserved [Pyrenophora tritici-repentis Pt-1C-BFP] gi|187983347|gb|EDU48835.1| conserved [Pyrenophora tritici-repentis Pt-1C-BFP]
MTVATVPAALLSHLHKADGSATFSHAGYTVVGAVNGPIEAQKRDELPEEAIIDVVVRPAAGVGGPRERHLESLIQSTLRQIVLINSFPRTLIQVILQITVAPENDYVNSKLAQANINLPVLPALLQTAVLAILSAALPLTATITSVPLAIVSVGGGQEVLNNPTAREIEQSRSFHVFAFTSDNQLLLSESEGSFTMSEWEEVYAIAQNQCCPSAEADSDVAMDQGHLAAADLKAFTRSALEQKTASDLYWK

SEQ ID NO: 8745 - DNA, 2137 bp, Muscodor strobelii
  misc_feature: SGI EST ID NO. CUFF.21021.1
  misc_feature: Variant of the nucleotide sequence at SEQ ID NO 8743
cgagactttaggtagcgccgcatttcaatgaagctgaacaacaatccgtctacatctgcattcgcggtagcgtcggcatcacaaaccactcatcactcatttacttggggcacctgatcgccacggaaaaatgactgtggccactgtccccgcggctctgctgtcccatctgcacaaggcggatggatcggcgaccttctcgcatgctgggtacacggttgtgggagctgtgaacggccccatcgaggcccaaaagcgagacgaacttccggaagaagccatcatcgacgtcgtcgtccgacctgctgccggcgttggaggcccccgagagcgccacttggaatcgctcatacagtcgacactgcgccagatcgtcctcatcaacagcttccctcgcaccctcatccaggtaatcctgcagatcacggttgcaccggagaatgactatgtcaactccaagctggcccaggcaaatatcaatcttcccgtcctacccgctctcctccaaaccgccgtgctcgctatcctctccgccgctctgcccttgactgctaccatcacctctgtacccctcgctatagtctctgtaggtgggggccaagaagtcctcaacaacccaacggcacgggaaatcgagcagtcccggtctttccacgtcttcgccttcacttcggataatcaattgcttctctccgagagcgaaggatcatttacaatgtccgaatgggaagaggtctatgccattgctcagaatcaatgctgcccgtcagccgaagccgatagtgatgttgctatggaccagggccatctagcggcggccgatctcaaggcatttacgcggtcggccttagagcagaaaacggcttcggatttatactggaagtgaggatataatctctctcgcttgaaccctctcgccaactaccggagccaccgttttgcgaatatcttcgtctacaaagccgagcatttcttgattgtgtagtatctttggccccctataatcggactgtctccaaataacatcctaacgaatgccgttgcgcgcagtggacgccttcaagaatcatctccaggttaacactgccgcttttccggcatcttgcacgtgtccggattcattggggttgattcgtcttcatggagacagcttcgccaagaaacataggacccgtgactactatcatgcttgactccgtgtcagcttgttgcaaaggcacggttgctattatcagctaccgtcgttgatatgcagtgtttcatccgaccttcacaatgccagggcggattgatgagtgggggtgattaactatgctctggggatatgaacctgtcagttgtcaccatcaggggccttatcagatgtgatataggcacaggtaggtatatacgtgtgctccaaccagagcaaaggcaattataaagccagtgatagaaggctgcgatcaaccggtccatttcaggcaaaccgtagctccagcggcggctaatcgcaatatgattcccgctatgaatgaacatgatttgcactgtcttgacagcatgatcgctcctgggtttgttgttttggtcaaatggttatcggcaattcgataagtgatgcaatacctgagggggtcaccccgttgacaggggttgccctggactagccccattttggtgggatagccaatcagaagccagtattagataagctgataaagagggcctagataggcacgccgcgtggacccccactacgtggtcccctccactctgaatacatcatcatattactctaccccatctgacttctatcaataagggtcacaaaacaaaggatcatcggatggttatgcagcttggcgatctgaagctgaacaagagccaagagctcggcgtttgttgacagtccccaaatgtctaattgtttgattcgagatttcctttcaggagcggaggttgggacgtaacctcagggcgtcgaaaacagtggctgagacggatgtgctcctggatctgggtgtttctcgcctacacccctggttcagggctcaggctgagactcgtcgaacaagaagctatcaaggccctagtgggtcaaactccccaacacgcgcgccctgatatttgcgactcccatgctggtgtatctacg

SEQ ID NO: 8746 - DNA, 1872 bp, Muscodor strobelii
  misc_feature: SGI cDNA ID NO. 562706
  misc_feature: Encodes the peptide sequence at SEQ ID NO 8747
atgacaaccatgccaactatggctggttctaatttgggagatgtggcgtcgcccacccttgaggtccacccagccctcggcagcgacgggcactcccatcaacttgatggtggtgctgactgcgcatcaccatctgccatcccttccgaacgtgggcgtgggccaccaggatcccattcatcacccacagtcacacatccggacttaataacaaagtcctctccgcaattatctattccctcgtcccacgatgctgatcagggcgactcacagccttcgcaagctgccaacggcttgacgagccctgactctctcgtgccggactccaaggactttcgctctcacggccaccggaagaacgctctctctgtcgagtctgtcccgcgacagactattatgaaagcgttggccacggccgcccgcagtcgcaaacccgaaggactttcattgaacagcatgttgtcctctcaccaccccgccgccgccaacaggcgcccctccacatccgccacctcgtcccaacagctcgcagatgctttgtcgggattggcacaacagtcttcaactcccatcaccgctttcccttcacttcaatcaccttgcttttaccataaccgatttgacgatgctgtcgacatcgagaaagtactcgaagagatcaagaacgatgactggatgtcgcattctcggctcgtgcagaccgctaccggtgtgcgcgaggtgtctaaacagttacaacgcagacccatccggcgggcagtcaagaacattatgattgttaccaaagctcgggacaatgaactcgtgtatcttacccgagaactggccatttggctgctgagaacgccgcgttacggttcagatatcggagtcaacgtatatgtggatgccaagctgcggcattccaagcgctttggggctgccagcattgtcgaagaagactctcgcttccaatcgatgcttcggtactggtctcctgacctctgctggagtcagcctgagaaatttgatctcgtctgtacattgggaggagacggcacggtcttgtttacatcttggctatttcagaggattgtccctcccgtcctctcttttagtctaggaagcctgggattcttgacaagttttgaattcgagaagtacaaatcgcatttgaaccgagttatgggcgacgaaggtatgcgcgtcaatctacgcatgcgattcacctgtactgtttatcgaaatggcgcatcgggacaagaaatggaagagggcgagcagttcgaggtgctcaatgagcttgttattgaccgcggcccgtcgccttacgtttccaacttggaactctacggcgacaatgaacttttgactgtagttcaagcggatggatgcatcttctcaacaccaacaggctctaccgcgtattcgctttctgctggcggatcgcttgtccacccggatatccccgctatcttgctaacaccgatttgtccacacacactatcgttccgccctatggtgctgagtgataccttactcctccgcgtgtcagttccgcggaattcgcgagccactgcgtattgtgcctttgatggaaaaggacgagtggagctgaggcaaggagaccatgtcacgatcacagcatcacagtacccattcccaacagtcatgcgcacagacacggaatggttcgacagcgtatcgagaactttgcaatggaatacgagagccgcaacccaaaaaggttttgaggacggatcagcttcaacatcggcgaaggaggaggaagcggaatgggacatcgacactgactcggcgtgctatgctagcgaggacggaagcattagcgcaagcccactacggaggcaaatgagcctcttgggcatgtag

SEQ ID NO: 8747 - protein, 623 aa, Muscodor strobelii
  misc_feature: SGI Peptide ID NO. 562706
  misc_feature (256)..(553): Pfam Id: PF01513 Pfam Desc: ATP-NAD kinase
  misc_feature (109)..(623): NCBI GI: 156061387 Blast Desc: SS1G_02837 [Sclerotinia sclerotiorum 1980] gi|154700240|gb|EDN99978.1| SS1G_02837 [Sclerotinia sclerotiorum 1980]
  misc_feature (197)..(623): NCBI GI: 256735134 Blast Desc: NECHADRAFT_2154 [Nectria haematococca mpVI 77-13-4]
  misc_feature (137)..(609): NCBI GI: 46108416 Blast Desc: FG01090.1 [Gibberella zeae PH-1]
  misc_feature (112)..(623): NCBI GI: 121710930 Blast Desc: NAD+ kinase Utr1, [Aspergillus clavatus NRRL 1] gi|119401231|gb|EAW11655.1| NAD+ kinase Utr1, [Aspergillus clavatus NRRL 1]
  misc_feature (115)..(623): NCBI GI: 212527314 Blast Desc: NAD+ kinase Utr1, [Penicillium marneffei ATCC 18224] gi|210073212|gb|EEA27299.1| NAD+ kinase Utr1, [Penicillium marneffei ATCC 18224]
  misc_feature (110)..(623): NCBI GI: 242783383 Blast Desc: NAD kinase Utr1, [Talaromyces stipitatus ATCC 10500] gi|218720324|gb|EED19743.1| NAD kinase Utr1, [Talaromyces stipitatus ATCC 10500]
  misc_feature (112)..(623): NCBI GI: 119497875 Blast Desc: NAD+ kinase Utr1, [Neosartorya fischeri NRRL 181] gi|119413859|gb|EAW23798.1| NAD+ kinase Utr1, [Neosartorya fischeri NRRL 181]
  misc_feature (112)..(623): NCBI GI: 70988837 Blast Desc: NAD+ kinase Utr1 [Aspergillus fumigatus Af293] gi|66846902|gb|EAL87233.1| NAD+ kinase Utr1, [Aspergillus fumigatus Af293] gi|159128685|gb|EDP53799.1| NAD+ kinase Utr1,
  misc_feature (117)..(623): NCBI GI: 240282167 Blast Desc: NAD kinase associated with ferric reductase [Ajellomyces capsulatus H143]
  misc_feature (117)..(623): NCBI GI: 169777597 Blast Desc: [Aspergillus oryzae RIB40] gi|83772001|dbj|BAE62131.1| protein product [Aspergillus oryzae]
  misc_feature (227)..(577): SWISSPROT Homolog: EC 2.7.1.23 NAD(+) kinase
MTTMPTMAGSNLGDVASPTLEVHPALGSDGHSHQLDGGADCASPSAIPSERGRGPPGSHSSPTVTHPDLITKSSPQLSIPSSHDADQGDSQPSQAANGLTSPDSLVPDSKDFRSHGHRKNALSVESVPRQTIMKALATAARSRKPEGLSLNSMLSSHHPAAANRRPSTSATSSQQLADALSGLAQQSSTPITAFPSLQSPCFYHNRFDDAVDIEKVLEEIKNDDWMSHSRLVQTATGVREVSKQLQRRPIRRAVKNIMIVTKARDNELVYLTRELAIWLLRTPRYGSDIGVNVYVDAKLRHSKRFGAASIVEEDSRFQSMLRYWSPDLCWSQPEKFDLVCTLGGDGTVLFTSWLFQRIVPPVLSFSLGSLGFLTSFEFEKYKSHLNRVMGDEGMRVNLRMRFTCTVYRNGASGQEMEEGEQFEVLNELVIDRGPSPYVSNLELYGDNELLTVVQADGCIFSTPTGSTAYSLSAGGSLVHPDIPAILLTPICPHTLSFRPMVLSDTLLLRVSVPRNSRATAYCAFDGKGRVELRQGDHVTITASQYPFPTVMRTDTEWFDSVSRTLQWNTRAATQKGFEDGSASTSAKEEEAEWDIDTDSACYASEDGSISASPLRRQMSLLGM

SEQ ID NO: 8748 - DNA, 2377 bp, Muscodor strobelii
  misc_feature: SGI EST ID NO. CUFF.21008.0
  misc_feature: Variant of the nucleotide sequence at SEQ ID NO 8746
gcgggtttcaagcattgaacagtccataaacggtctgttcggcatattcttcttttcgacggggaagcgcggggatcggatttatcagtttgacctggcctggcacgctcgggcattccccaaactccactcgttgcggtgtctcaacggggatgacaaccatgccaactatggctggttctaatttgggagatgtggcgtcgcccacccttgaggtccacccagccctcggcagcgacgggcactcccatcaacttgatggtggtgctgactgcgcatcaccatctgccatcccttccgaacgtgggcgtgggccaccaggatcccattcatcacccacagtcacacatccggacttaataacaaagtcctctccgcaattatctattccctcgtcccacgatgctgatcagggcgactcacagccttcgcaagctgccaacggcttgacgagccctgactctctcgtgccggactccaaggactttcgctctcacggccaccggaagaacgctctctctgtcgagtctgtcccgcgacagactattatgaaagcgttggccacggccgcccgcagtcgcaaacccgaaggactttcattgaacagcatgttgtcctctcaccaccccgccgccgccaacaggcgcccctccacatccgccacctcgtcccaacagctcgcagatgctttgtcgggattggcacaacagtcttcaactcccatcaccgctttcccttcacttcaatcaccttgcttttaccataaccgatttgacgatgctgtcgacatcgagaaagtactcgaagagatcaagaacgatgactggatgtcgcattctcggctcgtgcagaccgctaccggtgtgcgcgaggtgtctaaacagttacaacgcagacccatccggcgggcagtcaagaacattatgattgttaccaaagctcgggacaatgaactcgtgtatcttacccgagaactggccatttggctgctgagaacgccgcgttacggttcagatatcggagtcaacgtatatgtggatgccaagctgcggcattccaagcgctttggggctgccagcattgtcgaagaagactctcgcttccaatcgatgcttcggtactggtctcctgacctctgctggagtcagcctgagaaatttgatctcgtctgtacattgggaggagacggcacggtcttgtttacatcttggctatttcagaggattgtccctcccgtcctctcttttagtctaggaagcctgggattcttgacaagttttgaattcgagaagtacaaatcgcatttgaaccgagttatgggcgacgaaggtatgcgcgtcaatctacgcatgcgattcacctgtactgtttatcgaaatggcgcatcgggacaagaaatggaagagggcgagcagttcgaggtgctcaatgagcttgttattgaccgcggcccgtcgccttacgtttccaacttggaactctacggcgacaatgaacttttgactgtagttcaagcggatggatgcatcttctcaacaccaacaggctctaccgcgtattcgctttctgctggcggatcgcttgtccacccggatatccccgctatcttgctaacaccgatttgtccacacacactatcgttccgccctatggtgctgagtgataccttactcctccgcgtgtcagttccgcggaattcgcgagccactgcgtattgtgcctttgatggaaaaggacgagtggagctgaggcaaggagaccatgtcacgatcacagcatcacagtacccattcccaacagtcatgcgcacagacacggaatggttcgacagcgtatcgagaactttgcaatggaatacgagagccgcaacccaaaaaggttttgaggacggatcagcttcaacatcggcgaaggaggaggaagcggaatgggacatcgacactgactcggcgtgctatgctagcgaggacggaagcattagcgcaagcccactacggaggcaaatgagcctcttgggcatgtagagcggcgcagaaactgcagatgcgactttagaattggactagaattagatggcggcagcattgaccacctaaagcgtactattcgcaagagcactggagtgtcgggtataaggtaatccagatagggattcatgtgatatactgggaagacctagaggtatagcgcgttagcgactatggtccattgctttttcgatattacagatctctatacagcgaatggcagataggtcctgagcaccaccacattcccgcccaatatttccattgcgacatctccaacttactttgtgctcatctgctgaacattgtgtgatatgtgggcaacagacgttttagagactatatgtgca

SEQ ID NO: 8749 - DNA, 1998 bp, Muscodor strobelii
  misc_feature: SGI cDNA ID NO. 562707
  misc_feature: Reduced expression when VOC is produced
  misc_feature: Encodes the peptide sequence at SEQ ID NO 8750
atgtctttccccaacgcgtccaacaatcacccctcctcgtctcctgtcgacgaggggcacgacacctccttcgacacgtccttcaccagcaccagctcccagggcaatgaccatgatacctcgacctcttccttcgaatccacctttcgtttggagcccccattccctaaccaaagatccgactctgagaaacatcccaagggcaaaaggaagaggacaacagcccaggacaaatccatcctcgaagccgcatatgctgcgaacgataagcctgacaaagcggcgcgtctcgacattgtgaagcgcgtgtcgctgactgaaaaggaagtccagatatggttccaaaacaggcgtcagaatgaccgaaggaaacgtcgtccactgtctagggaggagtttgaagctattcagaagaatgcaggcgtgcggattctatcgtcggagtctttggcgggctcaatggagtccaattctgccccaattgactatgtgaatcctggagacaggttgcacgactcgcgccccgagtctagggctggtactgggaacgatagttctcagcacgagtctgaacccacctctcccactacgatggagccattgaaaacggctgggaatgcatcttcgatgccaactgcggaagacagaagagccgacgccccgatttctttgcagagagtaagatcagatatcgagccgcgtgccttctctcagacatcgacagcgtcaatcggctatgtggccaaccgccgaagttttgatgattccttctcagcgccatcatcggtgctaccgaggtctggcgacgatcccttcagacttgactcattttcctcctcgttctcatcgaacactccaaacgctccgcctatcctgccaccactcccgccctcgggagcgcccctctcgctctccgttcagctgagcggaaaagcagaattgatttccgcccttcagtcaccgccacgcccatctcttccacccatgtctgcgcggtcacactaccctgctgagcatctccccccagtcgccaatgcacgcaacctacagcggtccctcagcgcatctataacccttcctccaatctccacactgactacgcatctgccacgtccgccactcgcgctcccacgtggtcgctcacgtgacacaaaagcctgggaatcaatctgcgatgccgacgatcgtgacgaattgacgaaacaagcggagaacgaagcatcgggctccgctgttgcggctatcaatctgatgaggagctccagcaacgtgagcctgcctggtagcgtacatgggcagcaatcacaagtgaagaggagtgcgagtctgcttagagatgggactaacaagaagccaaggctggaacgcgctaagagctctgtggcgaggttacagagtcagggtgccgctaccctaaatgtgcgacctctaaatgtacaggtccagaacgagcagaggcaagagaatgaggaaaccacggaaaaggaatatttgccagagctggacttgaagaaagggggtactcagaacagcctccgaagcccttccggtgactcagacaaagagaattggagccctgacgaagagggggatggacagtcgaaccgaagacaccggcttccgcctccgaccccggcagcgctgtttgacaaatcggcacaggagaatgggaacccagtaaaggggatgaatcctcgtcgcaccggtggtagtggtagagcactaggcgaaaagagaggattcaacggactaggggagaaaaatcgtgcgaatactgcacctatgtcaggaggactattcggcggaaaaggcggcgtagccgttttcgaagacgatggaaagaaagataacggaaagggagaagtagagcgattcatgagaccaggcaatgagaatgaagtctcgcccgggaagagaggcgatatggacgctattgctagcttgctgagtctaagagatggtaactggccaggcgaggcgagaaggatgttgaggtga

SEQ ID NO: 8750 - protein, 665 aa, Muscodor strobelii
  misc_feature: SGI Peptide ID NO. 562707
  misc_feature (67)..(123): Pfam Id: PF00046 Pfam Desc: Homeobox domain
  misc_feature (46)..(656): NCBI GI: 171694988 Blast Desc: protein product [Podospora anserina] gi|170947736|emb|CAP59899.1| protein product [Podospora anserina]
  misc_feature (61)..(656): NCBI GI: 46108436 Blast Desc: FG01100.1 [Gibberella zeae PH-1]
  misc_feature (61)..(656): NCBI GI: 256734423 Blast Desc: NECHADRAFT_98757 [Nectria haematococca mpVI 77-13-4]
  misc_feature (63)..(656): NCBI GI: 261357308 Blast Desc: conserved [Verticillium albo-atrum VaMs.102]
  misc_feature (63)..(656): NCBI GI: 85112826 Blast Desc: NCU03266 [Neurospora crassa OR74A] gi|28926200|gb|EAA35183.1| [Neurospora crassa OR74A]
  misc_feature (67)..(656): NCBI GI: 156057581 Blast Desc: SS1G_04522 [Sclerotinia sclerotiorum 1980] gi|154702307|gb|EDO02046.1| SS1G_04522 [Sclerotinia sclerotiorum 1980]
  misc_feature (76)..(652): NCBI GI: 116182450 Blast Desc: CHGG_01853 [Chaetomium globosum CBS 148.51] gi|88186150|gb|EAQ93618.1| CHGG_01853 [Chaetomium globosum CBS 148.51]
  misc_feature (296)..(656): NCBI GI: 154323974 Blast Desc: BC1G_00386 [Botryotinia fuckeliana B05.10] gi|150842615|gb|EDN17808.1| BC1G_00386 [Botryotinia fuckeliana B05.10]
  misc_feature (61)..(656): NCBI GI: 169614788 Blast Desc: SNOG_10542 [Phaeosphaeria nodorum SN15] gi|111060816|gb|EAT81936.1| SNOG_10542 [Phaeosphaeria nodorum SN15]
  misc_feature (76)..(656): NCBI GI: 238840543 Blast Desc: conserved [Microsporum canis CBS 113480]
  misc_feature: Useful for introducing or modulating the production of volatile compounds
MSFPNASNNHPSSSPVDEGHDTSFDTSFTSTSSQGNDHDTSTSSFESTFRLEPPFPNQRSDSEKHPKGKRKRTTAQDKSILEAAYAANDKPDKAARLDIVKRVSLTEKEVQIWFQNRRQNDRRKRRPLSREEFEAIQKNAGVRILSSESLAGSMESNSAPIDYVNPGDRLHDSRPESRAGTGNDSSQHESEPTSPTTMEPLKTAGNASSMPTAEDRRADAPISLQRVRSDIEPRAFSQTSTASIGYVANRRSFDDSFSAPSSVLPRSGDDPFRLDSFSSSFSSNTPNAPPILPPLPPSGAPLSLSVQLSGKAELISALQSPPRPSLPPMSARSHYPAEHLPPVANARNLQRSLSASITLPPISTLTTHLPRPPLALPRGRSRDTKAWESICDADDRDELTKQAENEASGSAVAAINLMRSSSNVSLPGSVHGQQSQVKRSASLLRDGTNKKPRLERAKSSVARLQSQGAATLNVRPLNVQVQNEQRQENEETTEKEYLPELDLKKGGTQNSLRSPSGDSDKENWSPDEEGDGQSNRRHRLPPPTPAALFDKSAQENGNPVKGMNPRRTGGSGRALGEKRGFNGLGEKNRANTAPMSGGLFGGKGGVAVFEDDGKKDNGKGEVERFMRPGNENEVSPGKRGDMDAIASLLSLRDGNWPGEARRMLR

SEQ ID NO: 8751 - DNA, 2520 bp, Muscodor strobelii
  misc_feature: SGI EST ID NO. CUFF.21036.0
  misc_feature: Variant of the nucleotide sequence at SEQ ID NO 8749
aataacctccataccgcccatctctctttctccctccccgttgcaccactctgcttatctctccgaacttctgatccgagtccagcgctgcagtgtgcagccgtggtgtcgggtacgctttacgttacgcgttacgaacacaatcttgtttcttatctctggcgtcttgagtttctcttttctatatatacataccgcacgggactccgtacacgtatagacctgccgtatacctctctctcagcattgacgagtatatatactatgcgttcttggccctgcctataatgtctttccccaacgcgtccaacaatcacccctcctcgtctcctgtcgacgaggggcacgacacctccttcgacacgtccttcaccagcaccagctcccagggcaatgaccatgatacctcgacctcttccttcgaatccacctttcgtttggagcccccattccctaaccaaagatccgactctgagaaacatcccaagggcaaaaggaagaggacaacagcccaggacaaatccatcctcgaagccgcatatgctgcgaacgataagcctgacaaagcggcgcgtctcgacattgtgaagcgcgtgtcgctgactgaaaaggaagtccagatatggttccaaaacaggcgtcagaatgaccgaaggaaacgtcgtccactgtctagggaggagtttgaagctattcagaagaatgcaggcgtgcggattctatcgtcggagtctttggcgggctcaatggagtccaattctgccccaattgactatgtgaatcctggagacaggttgcacgactcgcgccccgagtctagggctggtactgggaacgatagttctcagcacgagtctgaacccacctctcccactacgatggagccattgaaaacggctgggaatgcatcttcgatgccaactgcggaagacagaagagccgacgccccgatttctttgcagagagtaagatcagatatcgagccgcgtgccttctctcagacatcgacagcgtcaatcggctatgtggccaaccgccgaagttttgatgattccttctcagcgccatcatcggtgctaccgaggtctggcgacgatcccttcagacttgactcattttcctcctcgttctcatcgaacactccaaacgctccgcctatcctgccaccactcccgccctcgggagcgcccctctcgctctccgttcagctgagcggaaaagcagaattgatttccgcccttcagtcaccgccacgcccatctcttccacccatgtctgcgcggtcacactaccctgctgagcatctccccccagtcgccaatgcacgcaacctacagcggtccctcagcgcatctataacccttcctccaatctccacactgactacgcatctgccacgtccgccactcgcgctcccacgtggtcgctcacgtgacacaaaagcctgggaatcaatctgcgatgccgacgatcgtgacgaattgacgaaacaagcggagaacgaagcatcgggctccgctgttgcggctatcaatctgatgaggagctccagcaacgtgagcctgcctggtagcgtacatgggcagcaatcacaagtgaagaggagtgcgagtctgcttagagatgggactaacaagaagccaaggctggaacgcgctaagagctctgtggcgaggttacagagtcagggtgccgctaccctaaatgtgcgacctctaaatgtacaggtccagaacgagcagaggcaagagaatgaggaaaccacggaaaaggaatatttgccagagctggacttgaagaaagggggtactcagaacagcctccgaagcccttccggtgactcagacaaagagaattggagccctgacgaagagggggatggacagtcgaaccgaagacaccggcttccgcctccgaccccggcagcgctgtttgacaaatcggcacaggagaatgggaacccagtaaaggggatgaatcctcgtcgcaccggtggtagtggtagagcactaggcgaaaagagaggattcaacggactaggggagaaaaatcgtgcgaatactgcacctatgtcaggaggactattcggcggaaaaggcggcgtagccgttttcgaagacgatggaaagaaagataacggaaagggagaagtagagcgattcatgagaccaggcaatgagaatgaagtctcgcccgggaagagaggcgatatggacgctattgctagcttgctgagtctaagagatggtaactggccaggcgaggcgagaaggatgttgaggtgagaagcatggtctaggaacgcattggaccaacagtatttatattgtatgagtgggtttggggtctaaatattcgttttaggcttgtgttgaccgacaactcgagcttggatctgtatgaaggattcttgtttgtccgttggtggtacgggtgtctaaaaaggctttaagtttgcccagacttttgggaatgacagatgaggatgagaaccaatgctaatgctaaatgctctaaaac

SEQ ID NO: 8752 - DNA, 2529 bp, Muscodor strobelii
  misc_feature: SGI cDNA ID NO. 562708
  misc_feature: Reduced expression when VOC is produced
  misc_feature: Encodes the peptide sequence at SEQ ID NO 8753
atggagcactcagcatccgggtcgcgcgccctcttccccaagggtcccagcttcactctcgaagacttctccaacaaggacttcattgtccgcgacttcgtcgacagcctcgccgggaatgccgtctcccagaaccgtcgctccggtcccacgcagcagaccttcgaccccaagcctctgatccgcgccttcgagaacgctctccaaggcctgggcaacctgtccgaagagctacagggcaaggaatccgagctcttgtcgcaggtcagacgcgccgagatacagcatgactcgacgctcgatactctcggccgcaagctcgaccagtccataaaccagttcgaggctctcgacctcactctcaacaatcccaatgccagcgaccggagcagtcgcgaggaaggcggcaacatcgctgtgcagattggagagaagctcgaggaattagatcggaaacgaagacgcgccctcgacgccaacttcctgattcattgctggctgcaggtcagcgagacgggcgagctcacgtcgctgcaggacattcagcgtcagggtggctccgataacaaggttcgctgtgctgtcatcgcccaccagctgatgcgcatcagccagcgactggactcggcctcctggaaccagcccaacggagcacaacgaaatggcagcacaaacggcatcaatggcgcagccaggtcacataacacccgagagatactggagaaattctgcgagactttagaacaggacttgctgaagcagttcaataatagctatcgaaaacaaaacttcgacgacatgatggagtgcgccaaggtcttacacgacttcaatggcggcgccagtgtcattgctatgttcgtcaaccagcatcagttcttcatcgaaagagaccagctcatgacggatgaagtcactatggatggggagacgtgggaccaattggcggaccctgacgccgagccaccgagtgttgagccaagtctgcagtcgctcatcgatgaagtccggatcattatgcaggaagagtccttcatgatcaagagggctttcccttactatgagatcgtactgatcaagttcatccagcggatattccagcagtcaatccagcagaggctcgaaatggttttggagaaggcgagcacaatctcctctctcgcttttctgcgctcccttcattcttcaagaacatatatcggcgcattaatagaagatttaaaatcacacggtttaacggaacacccagagccgtgttcagcacagattgcgcagacattggaccagcaaatggaagagctcttcgttccttacataatgggcaactcttacatcgaccgcgagaagaagagcctggaagagctcttcaactcgctactcttcaaattcaacatataccattccaggaggaaaaaggctccgactggcttcatggcgtcactagcgcagcgtacaaatcaactgcgagacgcatacctcgaaagactcgagtcgtctgacttgacgccaacgcaaaaggcgatgatgttgaaagtcgctggcgtggcggacactgataagaaacaggaaatcgaagtctctgaagaagagggtcacttgagcaatgcaaacgccaaacgcatgatgacctggctcgccgaagccgtacggcggacgctggagctaggcagccagagcgacacgcccaaagatgtagcaattcttttgaatctgttgatgacgaatatgggtcaagtgtacgtcgaaatagccctggacgccgcgttggaaaaggcaacgagtcaggagaacataaaaacggagccagacatgtcttacctaccatctattcggccggcgatcactattacgagtatcatgtctcgtttcatcaccactgtactcatcaggctagcggagtccaacactactgtccgtcggagcatggaggctcaggctaaaatgggcatcgaagctatagagagaaaagtcaacagcatcatgacgagtaccatggacgtcatagtaaactgggtgaataagtctctaactcagcaaaagagactcgattttctacccaaagacgagcttgatctcgtcgaatctctgcaaacgcagacttgcacgtcgatttgcgtgtttctgtcacgttgcacgaaacagttaagccagtctattgatggccaaaacctagaggtctttacgagcgagctgacacttgctatacaacgactgttatttgagcacttcaaaaagttcaaggtcaatgcgacgggtgggcttatggtcacgaaggacattgcgaagtacgtcgctacgctgaaagaatggccactgtcaaaggatgttgaggctgccgtcgagttactttcggaaattggctacttgttcatcattggtcctgaggcactcagagaaagaagtcgtaatctggctacgggcaatgtaggtggcggtaagaagctagccaaggcggacttcaaggccttcattcagagtcgtgatgatgctaggagcgtaggtgtgcagagtgtgctttcggggctgtaa

SEQ ID NO: 8753 - protein, 842 aa, Muscodor strobelii
  misc_feature: SGI Peptide ID NO. 562708
  misc_feature (64)..(832): Pfam Id: PF07393 Pfam Desc: Exocyst complex component Sec10
  misc_feature (240)..(463): Pfam Id: PF07393 Pfam Desc: Exocyst complex component Sec10
  misc_feature (541)..(832): Pfam Id: PF07393 Pfam Desc: Exocyst complex component Sec10
  misc_feature (5)..(842): NCBI GI: 171687917 Blast Desc: protein product [Podospora anserina] gi|170943920|emb|CAP69572.1| protein product [Podospora anserina]
  misc_feature (5)..(842): NCBI GI: 116180326 Blast Desc: CHGG_00791 [Chaetomium globosum CBS 148.51] gi|88185088|gb|EAQ92556.1| CHGG_00791 [Chaetomium globosum CBS 148.51]
  misc_feature (1)..(842): NCBI GI: 85111477 Blast Desc: NCU09313 [Neurospora crassa OR74A] gi|28925708|gb|EAA34719.1| NCU09313 [Neurospora crassa OR74A]
  misc_feature (4)..(842): NCBI GI: 39945154 Blast Desc: MGG_04559 [Magnaporthe grisea 70-15] gi|145011359|gb|EDJ96015.1| MGG_04559 [Magnaporthe grisea 70-15]
  misc_feature (1)..(842): NCBI GI: 256734355 Blast Desc: [Nectria haematococca mpVI 77-13-4]
  misc_feature (1)..(842): NCBI GI: 46108750 Blast Desc: FG01257.1 [Gibberella zeae PH-1]
  misc_feature (6)..(842): NCBI GI: 156063202 Blast Desc: SS1G_01717 [Sclerotinia sclerotiorum 1980] gi|154697053|gb|EDN96791.1| SS1G_01717 [Sclerotinia sclerotiorum 1980]
  misc_feature (146)..(842): NCBI GI: 261357399 Blast Desc: exocyst complex component protein [Verticillium albo-atrum VaMs.102]
  misc_feature (157)..(842): NCBI GI: 154294404 Blast Desc: BC1G_13722 [Botryotinia fuckeliana B05.10] gi|150844731|gb|EDN19924.1| BC1G_13722 [Botryotinia fuckeliana B05.10]
  misc_feature (5)..(842): NCBI GI: 261203301 Blast Desc: exocyst complex component Sec10 [Ajellomyces dermatitidis SLH14081] gi|239586649|gb|EEQ69292.1| exocyst complex component Sec10 [Ajellomyces dermatitidis SLH14081]
  misc_feature: Useful for introducing or modulating the production of volatile compounds
MEHSASGSRALFPKGPSFTLEDFSNKDFIVRDFVDSLAGNAVSQNRRSGPTQQTFDPKPLIRAFENALQGLGNLSEELQGKESELLSQVRRAEIQHDSTLDTLGRKLDQSINQFEALDLTLNNPNASDRSSREEGGNIAVQIGEKLEELDRKRRRALDANFLIHCWLQVSETGELTSLQDIQRQGGSDNKVRCAVIAHQLMRISQRLDSASWNQPNGAQRNGSTNGINGAARSHNTREILEKFCETLEQDLLKQFNNSYRKQNFDDMMECAKVLHDFNGGASVIAMFVNQHQFFIERDQLMTDEVTMDGETWDQLADPDAEPPSVEPSLQSLIDEVRIIMQEESFMIKRAFPYYEIVLIKFIQRIFQQSIQQRLEMVLEKASTISSLAFLRSLHSSRTYIGALIEDLKSHGLTEHPEPCSAQIAQTLDQQMEELFVPYIMGNSYIDREKKSLEELFNSLLFKFNIYHSRRKKAPTGFMASLAQRTNQLRDAYLERLESSDLTPTQKAMMLKVAGVADTDKKQEIEVSEEEGHLSNANAKRMMTWLAEAVRRTLELGSQSDTPKDVAILLNLLMTNMGQVYVEIALDAALEKATSQENIKTEPDMSYLPSIRPAITITSIMSRFITTVLIRLAESNTTVRRSMEAQAKMGIEAIERKVNSIMTSTMDVIVNWVNKSLTQQKRLDFLPKDELDLVESLQTQTCTSICVFLSRCTKQLSQSIDGQNLEVFTSELTLAIQRLLFEHFKKFKVNATGGLMVTKDIAKYVATLKEWPLSKDVEAAVELLSEIGYLFIIGPEALRERSRNLATGNVGGGKKLAKADFKAFIQSRDDARSVGVQSVLSGL

SEQ ID NO: 8754 - DNA, 3103 bp, Muscodor strobelii
  misc_feature: SGI EST ID NO. CUFF.21011.0
  misc_feature: Variant of the nucleotide sequence at SEQ ID NO 8752
gggggctggcagtggccactgtcccaccatagcttgtaccttgcgcgttgcgaccttccgagtcccgacgtcgacggtgcatggcgggtggcccaaccttgagcaaccaagagatgaaacaggcaacgacattggttccttcctccaccaacaacgaaccgctaacccgcagatgagaccatccatactagcaacgaaggtactcatggtaccttaggtagatagccgatatcgaagacaacatcgaaccactgtcactccttttccatgtctccaacgtgaccaactgcgacctgcccacccgatggagcactcagcatccgggtcgcgcgccctcttccccaagggtcccagcttcactctcgaagacttctccaacaaggacttcattgtccgcgacttcgtcgacagcctcgccgggaatgccgtctcccagaaccgtcgctccggtcccacgcagcagaccttcgaccccaagcctctgatccgcgccttcgagaacgctctccaaggcctgggcaacctgtccgaagagctacagggcaaggaatccgagctcttgtcgcaggtcagacgcgccgagatacagcatgactcgacgctcgatactctcggccgcaagctcgaccagtccataaaccagttcgaggctctcgacctcactctcaacaatcccaatgccagcgaccggagcagtcgcgaggaaggcggcaacatcgctgtgcagattggagagaagctcgaggaattagatcggaaacgaagacgcgccctcgacgccaacttcctgattcattgctggctgcaggtcagcgagacgggcgagctcacgtcgctgcaggacattcagcgtcagggtggctccgataacaaggttcgctgtgctgtcatcgcccaccagctgatgcgcatcagccagcgactggactcggcctcctggaaccagcccaacggagcacaacgaaatggcagcacaaacggcatcaatggcgcagccaggtcacataacacccgagagatactggagaaattctgcgagactttagaacaggacttgctgaagcagttcaataatagctatcgaaaacaaaacttcgacgacatgatggagtgcgccaaggtcttacacgacttcaatggcggcgccagtgtcattgctatgttcgtcaaccagcatcagttcttcatcgaaagagaccagctcatgacggatgaagtcactatggatggggagacgtgggaccaattggcggaccctgacgccgagccaccgagtgttgagccaagtctgcagtcgctcatcgatgaagtccggatcattatgcaggaagagtccttcatgatcaagagggctttcccttactatgagatcgtactgatcaagttcatccagcggatattccagcagtcaatccagcagaggctcgaaatggttttggagaaggcgagcacaatctcctctctcgcttttctgcgctcccttcattcttcaagaacatatatcggcgcattaatagaagatttaaaatcacacggtttaacggaacacccagagccgtgttcagcacagattgcgcagacattggaccagcaaatggaagagctcttcgttccttacataatgggcaactcttacatcgaccgcgagaagaagagcctggaagagctcttcaactcgctactcttcaaattcaacatataccattccaggaggaaaaaggctccgactggcttcatggcgtcactagcgcagcgtacaaatcaactgcgagacgcatacctcgaaagactcgagtcgtctgacttgacgccaacgcaaaaggcgatgatgttgaaagtcgctggcgtggcggacactgataagaaacaggaaatcgaagtctctgaagaagagggtcacttgagcaatgcaaacgccaaacgcatgatgacctggctcgccgaagccgtacggcggacgctggagctaggcagccagagcgacacgcccaaagatgtagcaattcttttgaatctgttgatgacgaatatgggtcaagtgtacgtcgaaatagccctggacgccgcgttggaaaaggcaacgagtcaggagaacataaaaacggagccagacatgtcttacctaccatctattcggccggcgatcactattacgagtatcatgtctcgtttcatcaccactgtactcatcaggctagcggagtccaacactactgtccgtcggagcatggaggctcaggctaaaatgggcatcgaagctatagagagaaaagtcaacagcatcatgacgagtaccatggacgtcatagtaaactgggtgaataagtctctaactcagcaaaagagactcgattttctacccaaagacgagcttgatctcgtcgaatctctgcaaacgcagacttgcacgtcgatttgcgtgtttctgtcacgttgcacgaaacagttaagccagtctattgatggccaaaacctagaggtctttacgagcgagctgacacttgctatacaacgactgttatttgagcacttcaaaaagttcaaggtcaatgcgacgggtgggcttatggtcacgaaggacattgcgaagtacgtcgctacgctgaaagaatggccactgtcaaaggatgttgaggctgccgtcgagttactttcggaaattggctacttgttcatcattggtcctgaggcactcagagaaagaagtcgtaatctggctacgggcaatgtaggtggcggtaagaagctagccaaggcggacttcaaggccttcattcagagtcgtgatgatgctaggagcgtaggtgtgcagagtgtgctttcggggctgtaaagatggggacttaagcttgagggaaagtggttcatgtcccagatacgatatcttgaagtcaacgaaacgaataagattattgaacaagaccaagtaattgtttatctgaggtatgacaatggtgacactgctcaagaaaggcacaggaagtataggaggacctggggcgccgcctaaattcaatatcgggttcaatatcaggtagaatggaaagctcgttgaccttatagatcagtgtaacacactatctgctaacaaagttaatggcct

SEQ ID NO: 8755 - DNA, 978 bp, Muscodor strobelii
  misc_feature: SGI cDNA ID NO. 562709
  misc_feature: Reduced expression when VOC is produced
  misc_feature: Encodes the peptide sequence at SEQ ID NO 8756
atgtcatacgcagccaaggacacagagcgttaccgcgccgatgagaagtcgggccacaccacgctcaacccggccgaacgcgaggagttagtcaagaactatcttccgtcaccgccgtccagggatcgaagcaacagtcgcaccaggaagtccacagcgcgttttggagttaggaggctcgtcaagacgcagttctacgtcttgctctacgtctgcatccacgccgtcttctccctctacatccgactgcgcattgcctaccatgccgtatccaaccgcatctcctccatcctcggccatcactacaactctcccgagtacatacaacgagacatagccagcctcaagaggctgccaaaacatctgagcgtcatactgaccctcgagaatggcgggaggggagatgcattggagaagctggtcaacgagctctctgagattgcggcttggtctgccgctgctggtatcccccagctgtctatatatgagaaatcaggtattctaaagagatacatgtcgcaaacccaccgcaccgtatccaacaggttgcgaatctggttcggaaagcaccaaacgccacctctggctctctccacgcgcggcgcagagacaattcgatcccaaggccgcgattatctgcccgagggtggactcagcatcatattgatatcagaggacgacgggcgcgaggccatggtggatcttacgagggtctttgcaagcatggtgcagaaagataagatcgccgccgaggatatcaccatggacgttatcgacaacgaactgaaagaagccgtcatgagcgagcccgacttgctcatctccttcgagccttatgtcgatctccagggatacccaccttggcccattcgtttgaccgagattgactgttctcctgataaccgaggtgtgagctaccagttgtttctgcgcgctctggggaaatattccttggcaactttcaagttaggcaagtag

SEQ ID NO: 8756 - protein, 325 aa, Muscodor strobelii
  misc_feature: SGI Peptide ID NO. 562709
  misc_feature (1)..(325): NCBI GI: 171687915 Blast Desc: protein product [Podospora anserina] gi|170943919|emb|CAP69571.1| protein product [Podospora anserina]
  misc_feature (3)..(325): NCBI GI: 164422996 Blast Desc: NCU09312 [Neurospora crassa OR74A] gi|157069905|gb|EAA34718.2| conserved [Neurospora crassa OR74A]
  misc_feature (1)..(325): NCBI GI: 39945156 Blast Desc: MGG_04560 [Magnaporthe grisea 70-15] gi|145011358|gb|EDJ96014.1| MGG_04560 [Magnaporthe grisea 70-15]
  misc_feature (4)..(325): NCBI GI: 256735059 Blast Desc: [Nectria haematococca mpVI 77-13-4]
  misc_feature (1)..(325): NCBI GI: 261357398 Blast Desc: open reading frame [Verticillium albo-atrum VaMs.102]
  misc_feature (4)..(325): NCBI GI: 46108748 Blast Desc: FG01256.1 [Gibberella zeae PH-1]
  misc_feature (54)..(325): NCBI GI: 773386 Blast Desc: open reading frame [Neurospora crassa] gi|1583207|prf||2120297A ORF
  misc_feature (22)..(325): NCBI GI: 189203665 Blast Desc: di-trans,poly-cis-decaprenylcistransferase [Pyrenophora tritici-repentis Pt-1C-BFP] gi|187985267|gb|EDU50755.1| [Pyrenophora tritici-repentis
  misc_feature (4)..(325): NCBI GI: 255939494 Blast Desc: Pc16g00980 [Penicillium chrysogenum Wisconsin 54-1255] gi|211585139|emb|CAP92768.1| Pc16g00980 [Penicillium chrysogenum Wisconsin 54-1255]
  misc_feature (6)..(325): NCBI GI: 258575453 Blast Desc: conserved [Uncinocarpus reesii 1704] gi|237902174|gb|EEP76575.1| conserved [Uncinocarpus reesii 1704]
  misc_feature (65)..(325): SWISSPROT Homolog: EC 2.5.1.31 Di-trans,poly-cis-decaprenylcistransferase
  misc_feature: Useful for introducing or modulating the production of volatile compounds
MSYAAKDTERYRADEKSGHTTLNPAEREELVKNYLPSPPSRDRSNSRTRKSTARFGVRRLVKTQFYVLLYVCIHAVFSLYIRLRIAYHAVSNRISSILGHHYNSPEYIQRDIASLKRLPKHLSVILTLENGGRGDALEKLVNELSEIAAWSAAAGIPQLSIYEKSGILKRYMSQTHRTVSNRLRIWFGKHQTPPLALSTRGAETIRSQGRDYLPEGGLSIILISEDDGREAMVDLTRVFASMVQKDKIAAEDITMDVIDNELKEAVMSEPDLLISFEPYVDLQGYPPWPIRLTEIDCSPDNRGVSYQLFLRALGKYSLATFKLGK

SEQ ID NO: 8757 - DNA, 3115 bp, Muscodor strobelii
  misc_feature: SGI EST ID NO. CUFF.21078.0
  misc_feature: Variant of the nucleotide sequence at SEQ ID NO 8755
tcatagttcacataatgtaatgattctccttcaattgaaacttcatctcgtgattcggacttcttgagggatgtgttggacataagccaatgaacaagcaatgtgccatttcttgtatcgccgactttgtcacagtgggcagtgctggcagggaaggaagcgatctccaagatttttaggataccaagacagtcgctgcggcctcgtcaccaccacgcctcggcacgaccacgccacgtacatttacgtatacgcaaatacatacgtccccccatagcgtctttgtgtttgttcgtccatccattcgttctaaaacaacatcgatccgcaaaggtttcttgccacaacattgcatgtgttattgttagataccacatttcttagacagctggcccttgacatcccaccagctcttgcgccagtcttggtctctcagcactgtccaaggcaatgctggtggtctcttaaccaaagtcttatatcgattcatacaccaatcagttagaagagaaaacgaagacagaaagagaccatgtcatacgcagccaaggacacagagcgttaccgcgccgatgagaagtcgggccacaccacgctcaacccggccgaacgcgaggagttagtcaaggtccgttcctctcccagaaaccttattgccgtcccgtctgcacattgcgccaagctgacagcgccttggtcagaactatcttccgtcaccgccgtccagggatcgaagcaacagtcgcaccaggaagtccacagcgcgttttggagttaggaggctcgtcaagacgcagttctacgtcttgctctacgtctgcatccacgccgtcttctccctctacatccgactgcgcattgcctaccatgccgtatccaaccgcatctcctccatcctcggccatcactacaactctcccgagtacatacaacgagacatagccagcctcaagaggctgccaaaacatctgagcgtcatactgaccctcgagaatggcgggaggggagatgcattggagaagctggtcaacgagctctctgagattgcggcttggtctgccgctgctggtatcccccagctgtctatatatgagaaatcaggtattctaaagagatacatgtcgcaaacccaccgcaccgtatccaacaggttgcgaatctggttcggaaagcaccaaacgccacctctggctctctccacgcgcggcgcagagacaattcgatcccaaggccgcgattatctgcccgagggtggactcagcatcatattgatatcagaggacgacgggcgcgaggccatggtggatcttacgagggtctttgcaagcatggtgcagaaagataagatcgccgccgaggatatcaccatggacgttatcgacaacgaactgaaagaagccgtcatgagcgagcccgacttgctcatctccttcgagccttatgtcgatctccagggatacccaccttggcccattcgtttgaccgagattgactgttctcctgataaccgaggtgtgagctaccagttgtttctgcgcgctctggggaaatattccttggcaactttcaagttaggcaagtaggcggattgaggatgaaaagcgaagagcgaaggcccgagaaagagcgcgcgggtagttatgatgggaacgtcccaatatgaaggcttgaggtcttctgagaattatcacttttccaaaaatggcgaagcattgttaatcagcatagaagagggatatacccgcgagcacgtgtatgcgtccatataataatctactctctcaagatccattccacagctccatttcccgacttgcagcattccacatatacactgggccgtcgcccacgttatatctatagtaattctctgtcccaccttttactaacgcacggcggaatgtgatgttgatcctgccaccgtcgtattcattttttccgcttcgcttagggatagagtgtagccactgggattgtgtacgtccgcgcattagaatcatgtctcctgacgctaagggaagtttgaggggctttgcatcgagtatggatggtttgttagtgtcattcttattaccagtggtagtcttgtcttgtggaggcttgtgcttcatcatgaaatcccgttttgcgccgagcgagaaactggcgatacttggatctgggcctaggaatcgctcatcgtcgctgtggaacgatatactgtccgcgcctgaggcgtagtagttcacgagacagaagttgaactgtgagcctgtgattgcttcggtggagcgacggaggatgtctagacactttgggattggtcgtggtgttgctttgtacgccgtttgcttgtttccgtcgcctggtggttgcccaatggggattggtttctgagtttttgcgtctattacaggtcctggctgtgaatctgagtcgaggtcgtcggggcctgagaatcgagctgtctcgtcaactccgaagactgttgtccatcgtggggtccggatgtgagttttcgttccacctcgcgatatgtcgtattcgacgcggtagaatggcagctccgagcgtaagaattggaaaagttgtttggccgcggtacttgagatatagggcgagaagtagagaagatcgagatccggctgatcgttcatagacctggggtctgatgcgggacatatggatatttcatcttgtaaagggggcgggagatggggaattggaaaaggataagatggatgactggagcagctcagtgacggagaactaggctctgctttaatcttattttcgctgagagtttcattctccactcgttttatggatgagatgttgtttaaaggcaaggcaccggtagatgatagacgtggtttcttagtttgaggtgagccaaagtatgaatcaagtgtccttttctgcgacatgatggacacaactgtaattgaaaaaagtgagaagatgatgttctaaaactaaggcttaaagtgttgtcggtggatgtagaatatgaaaacaaacaccagggcacgtcattgatatattcccgtcgcgtctcatcattgccttggtatctcagccttatcaatgaatgcgtgtatgacgcaaccgtggttgaaatgtaggagctttggta

SEQ ID NO: 8758 - DNA, 1125 bp, Muscodor strobelii
  misc_feature: SGI cDNA ID NO. 562710
  misc_feature: Reduced expression when VOC is produced
  misc_feature: Encodes the peptide sequence at SEQ ID NO 8759
atgtcgcagaaaaggacacttgattcatactttggctcacctcaaactaagaaaccacgtctatcatctaccggtgccttgcctttaaacaacatctcatccataaaacgagtggagaatgaaactctcagcgaaaataagattaaagcagagcctagttctccgtcactgagctgctccagtcatccatcttatccttttccaattccccatctcccgccccctttacaagatgaaatatccatatgtcccgcatcagaccccaggtctatgaacgatcagccggatctcgatcttctctacttctcgccctatatctcaagtaccgcggccaaacaacttttccaattcttacgctcggagctgccattctaccgcgtcgaatacgacatatcgcgaggtggaacgaaaactcacatccggaccccacgatggacaacagtcttcggagttgacgagacagctcgattctcaggccccgacgacctcgactcagattcacagccaggacctgtaatagacgcaaaaactcagaaaccaatccccattgggcaaccaccaggcgacggaaacaagcaaacggcgtacaaagcaacaccacgaccaatcccaaagtgtctagacatcctccgtcgctccaccgaagcaatcacaggctcacagttcaacttctgtctcgtgaactactacgcctcaggcgcggacagtatatcgttccacagcgacgatgagcgattcctaggcccagatccaagtatcgccagtttctcgctcggcgcaaaacgggatttcatgatgaagcacaagcctccacaagacaagactaccactggtaataagaatgacactaacaaaccatccatactcgatgcaaagcccctcaaacttcccttagcgtcaggagacatgattctaatgcgcggacgtacacaatcccagtggctacactctatccctaagcgaagcggaaaaaatgaatacgacggtggcaggatcaacatcacattccgccgtgcgttagtaaaaggtgggacagagaattactatagatataacgtgggcgacggcccagtgtatatgtggaatgctgcaagtcgggaaatggagctgtggaatggatcttga

SEQ ID NO: 8759 - protein, 374 aa, Muscodor strobelii
  misc_feature: SGI Peptide ID NO. 562710
  misc_feature (1)..(371): NCBI GI: 46108746 Blast Desc: FG01255.1 [Gibberella zeae PH-1]
  misc_feature (1)..(371): NCBI GI: 39945158 Blast Desc: MGG_04561 [Magnaporthe grisea 70-15] gi|145011357|gb|EDJ96013.1| MGG_04561 [Magnaporthe grisea 70-15]
  misc_feature (60)..(373): NCBI GI: 169623749 Blast Desc: SNOG_15119 [Phaeosphaeria nodorum SN15] gi|160705040|gb|EAT77344.2| SNOG_15119 [Phaeosphaeria nodorum SN15]
  misc_feature (60)..(371): NCBI GI: 171687913 Blast Desc: protein product [Podospora anserina] gi|170943918|emb|CAP69570.1| protein product [Podospora anserina]
  misc_feature (60)..(368): NCBI GI: 189203813 Blast Desc: DNA repair family protein [Pyrenophora tritici-repentis Pt-1C-BFP] gi|187985341|gb|EDU50829.1| DNA repair family protein [Pyrenophora tritici-repentis Pt-1C-BFP]
  misc_feature (58)..(368): NCBI GI: 119477290 Blast Desc: DNA repair family protein [Neosartorya fischeri NRRL 181] gi|119407402|gb|EAW17351.1| DNA repair family protein [Neosartorya fischeri NRRL 181]
  misc_feature (54)..(371): NCBI GI: 159127042 Blast Desc: DNA repair family protein [Aspergillus fumigatus A1163]
  misc_feature (55)..(368): NCBI GI: 121714170 Blast Desc: DNA repair family protein [Aspergillus clavatus NRRL 1] gi|119402849|gb|EAW13270.1| DNA repair family protein [Aspergillus clavatus NRRL 1]
  misc_feature (38)..(370): NCBI GI: 242818843 Blast Desc: DNA repair family protein [Talaromyces stipitatus ATCC 10500] gi|218713662|gb|EED13086.1| DNA repair family protein [Talaromyces stipitatus ATCC 10500]
  misc_feature (67)..(371): NCBI GI: 70996955 Blast Desc: DNA repair family protein [Aspergillus fumigatus Af293] gi|66850868|gb|EAL91194.1| DNA repair family protein [Aspergillus fumigatus Af293]
  misc_feature: Useful for introducing or modulating the production of volatile compounds
MSQKRTLDSYFGSPQTKKPRLSSTGALPLNNISSIKRVENETLSENKIKAEPSSPSLSCSSHPSYPFPIPHLPPPLQDEISICPASDPRSMNDQPDLDLLYFSPYISSTAAKQLFQFLRSELPFYRVEYDISRGGTKTHIRTPRWTTVFGVDETARFSGPDDLDSDSQPGPVIDAKTQKPIPIGQPPGDGNKQTAYKATPRPIPKCLDILRRSTEAITGSQFNFCLVNYYASGADSISFHSDDERFLGPDPSIASFSLGAKRDFMMKHKPPQDKTTTGNKNDTNKPSILDAKPLKLPLASGDMILMRGRTQSQWLHSIPKRSGKNEYDGGRINITFRRALVKGGTENYYRYNVGDGPVYMWNAASREMELWNGS

SEQ ID NO: 8760 - DNA, 1494 bp, Muscodor strobelii
  misc_feature: SGI cDNA ID NO. 562711
  misc_feature: Encodes the peptide sequence at SEQ ID NO 8761
atggaagtgaccgtgttcgatagaatctcaagtcgcaattttgaaattgcgactctggttaagatgcaggatcccgcgaccgaggttgacatgagcagcctcttccgcccgccgactctccgtcacaccatcggcgtcctcgatcgcgctctgttctccaagacggtaaaccttgccgcagctacgatcgccgacaataagaagctcgcgcaatggcggaaaactttagaacaagagagcacattgctgcgtgttgaacgcctctcgtctatcgtaccacatccagaccagacccttgcctccaaaggctcaaaatgtttgctccttgaccccaaaatacgaccaggagcgcctgacacttggtctgcgcggatccaggatgccgttcagaagcaggagcttggtatcgtaccctatgatctattcctagactacgactactggagttatgaggatgtaattcggtgtctgataccgccaaatctcgattcccacgatggtgcccctgcgggcttcaaccaagcaggacatgtcgcgcatctcaacctacgtgaagcatttcttccctacaaaaagataatcgccgaggtcatagtcgacaaaaacgcaaacatacgcaccgtcatcaataagatcgccgacgtcggcagggaatccgagtttcgcacgttcaactatgaagtcctagctggtcccgaggatcttagtgtggaagcgcgggaaaacgattgcgtgttcggcttcgattacgctagggtctattggaacagcaaattagaaggcgaacatagccgactcatcaagcttttccagccaggtgaagtcgtgtgtgatgtaatggccggtattggccccttcgcgattccggctggtaagaaagatgtcttcgtatgggccaatgactacaacccggaaagctatcgatacttggccgagaacatccggcgtaataaggtatcgccacatgttcgcccattcaacgaggacggccggacgtttatcaggaaagcagctgatttggtatatgctgcatctaccaatggcgaaaaagtcttgacaaacaaggctcagaggcaccaacaaagatctaggggcggcaaagacaaagcttcaacgatagccgcaaatgataatatccccatacccccgacaatatcacattttgtgatgaacctccctgcgtcagccatcacatttcttccttactaccgtggtctctactttggacatgagtcgctcttcgaacccagtacaggcagaaaattaccgatggttcatgtccactgctttgcagaaaaggcaacaggtgatggccctcaaaacgacgtctgcgaacgaatcagtaccgaattgggtgctaccatcaaacttggcgagacagaaacgccgggagaagcgacagttctggaagtcagagatgtgtcgccaaagaagcgtatgttttgtgcctcgttccggctccctccacaagtcgcatttgctcctaggtcgtag

SEQ ID NO: 8761 - protein, 497 aa, Muscodor strobelii
  misc_feature: SGI Peptide ID NO. 562711
  misc_feature (170)..(430): Pfam Id: PF02475 Pfam Desc: Met-10+ like-protein
  misc_feature (30)..(496): NCBI GI: 164422994 Blast Desc: NCU09311 [Neurospora crassa OR74A] gi|773387|gb|AAC41673.1| Restriction enzyme inactivation of met-10 complementation in this region. Sequence similarity to S.
  misc_feature (23)..(497): NCBI GI: 46108744 Blast Desc: FG01254.1 [Gibberella zeae PH-1]
  misc_feature (29)..(496): NCBI GI: 171687911 Blast Desc: protein product [Podospora anserina] gi|170943917|emb|CAP69569.1| protein product [Podospora anserina]
  misc_feature (24)..(497): NCBI GI: 256735058 Blast Desc: [Nectria haematococca mpVI 77-13-4]
  misc_feature (37)..(494): NCBI GI: 261357396 Blast Desc: tRNA (guanine-N(1)-)-methyltransferase [Verticillium albo-atrum VaMs.102]
  misc_feature (33)..(473): NCBI GI: 145603025 Blast Desc: MGG_04562 [Magnaporthe grisea 70-15] gi|145011356|gb|EDJ96012.1| MGG_04562 [Magnaporthe grisea 70-15]
  misc_feature (22)..(496): NCBI GI: 116180330 Blast Desc: CHGG_00793 [Chaetomium globosum CBS 148.51] gi|88185090|gb|EAQ92558.1| CHGG_00793 [Chaetomium globosum CBS 148.51]
  misc_feature (30)..(493): NCBI GI: 121705114 Blast Desc: tRNA (guanine) methyltransferase Trm5 [Aspergillus clavatus NRRL 1] gi|119398966|gb|EAW09394.1| tRNA (guanine) methyltransferase Trm5 [Aspergillus clavatus NRRL 1]
  misc_feature (32)..(493): NCBI GI: 119195961 Blast Desc: CIMG_02355 [Coccidioides immitis RS]
  misc_feature (32)..(493): NCBI GI: 240110575 Blast Desc: CPC735_039970 [Coccidioides posadasii C735 delta SOWgp]
  misc_feature (30)..(494): SWISSPROT Homolog: EC 2.1.1.31 tRNA (guanine-N(1)-)-methyltransferase
MEVTVFDRISSRNFEIATLVKMQDPATEVDMSSLFRPPTLRHTIGVLDRALFSKTVNLAAATIADNKKLAQWRKTLEQESTLLRVERLSSIVPHPDQTLASKGSKCLLLDPKIRPGAPDTWSARIQDAVQKQELGIVPYDLFLDYDYWSYEDVIRCLIPPNLDSHDGAPAGFNQAGHVAHLNLREAFLPYKKIIAEVIVDKNANIRTVINKIADVGRESEFRTFNYEVLAGPEDLSVEARENDCVFGFDYARVYWNSKLEGEHSRLIKLFQPGEVVCDVMAGIGPFAIPAGKKDVFVWANDYNPESYRYLAENIRRNKVSPHVRPFNEDGRTFIRKAADLVYAASTNGEKVLTNKAQRHQQRSRGGKDKASTIAANDNIPIPPTISHFVMNLPASAITFLPYYRGLYFGHESLFEPSTGRKLPMVHVHCFAEKATGDGPQNDVCERISTELGATIKLGETETPGEATVLEVRDVSPKKRMFCASFRLPPQVAFAPRS

SEQ ID NO: 8762 - DNA, 2566 bp, Muscodor strobelii
  misc_feature: SGI EST ID NO. CUFF.21049.0
  misc_feature: Variant of the nucleotide sequence at SEQ ID NO 8760
aagtgaccgtgttcgatagaatctcaagtcgcaattttgaaattgcgactctggttaagatggatcccgcgaccgaggttgacatgagcagcctcttccgcccgccgactctccgtcacaccatcggcgtcctcgatcgcgctctgttctccaagacggtaaaccttgccgcagctacgatcgccgacaataagaagctcgcgcaatggcggaaaactttagaacaagagagcacattgctgcgtgttgaacgcctctcgtctatcgtaccacatccagaccagacccttgcctccaaaggctcaaaatgtttgctccttgaccccaaaatacgaccaggagcgcctgacacttggtctgcgcggatccaggatgccgttcagaagcaggagcttggtatcgtaccctatgatctattcctagactacgactactggagttatgaggatgtaattcggtgtctgataccgccaaatctcgattcccacgatggtgcccctgcgggcttcaaccaagcaggacatgtcgcgcatctcaacctacgtgaagcatttcttccctacaaaaagataatcgccgaggtcatagtcgacaaaaacgcaaacatacgcaccgtcatcaataagatcgccgacgtcggcagggaatccgagtttcgcacgttcaactatgaagtcctagctggtcccgaggatcttagtgtggaagcgcgggaaaacgattgcgtgttcggcttcgattacgctagggtctattggaacagcaaattagaaggcgaacatagccgactcatcaagcttttccagccaggtgaagtcgtgtgtgatgtaatggccggtattggccccttcgcgattccggctggtaagaaagatgtcttcgtatgggccaatgactacaacccggaaagctatcgatacttggccgagaacatccggcgtaataaggtatcgccacatgttcgcccattcaacgaggacggccggacgtttatcaggaaagcagctgatttggtatatgctgcatctaccaatggcgaaaaagtcttgacaaacaaggctcagaggcaccaacaaagatctaggggcggcaaagacaaagcttcaacgatagccgcaaatgataatatccccatacccccgacaatatcacattttgtgatgaacctccctgcgtcagccatcacatttcttccttactaccgtggtctctactttggacatgagtcgctcttcgaacccagtacaggcagaaaattaccgatggttcatgtccactgctttgcagaaaaggcaacaggtgatggccctcaaaacgacgtctgcgaacgaatcagtaccgaattgggtgctaccatcaaacttggcgagacagaaacgccgggagaagcgacagttctggaagtcagagatgtgtcgccaaagaagcgtatgttttgtgcctcgttccggctccctccacaagtcgcatttgctcctaggtcgtaggcaatggatcagccccagtatagcgtttacgatcttgtacaggcattgcggatgagtattgtcaatacgtgttcctatgcgacatggcccaaacgatgaggtaacaatcagagacttggacttcgccacctggatggacatatcctattattgacatatacaaaccattatccactcttcaatgcaaggagactatattccattagtggagcaatcgatcaatacagactatgggagacggatgaatgttgtcgaatgattccaatcaccaatgacatgtgaaagacgaaatcttgcagacgcatcattgcaatgcagacgcggacacgcaacgcatgttgttacatgagccgagtcggcgccgttacggatcaatggatctgcatgtctacccggttcctaaccgatcgcaacgcttttacgtgaattgcaaagagacagtggactcatgagttaccggagtcaagcaaccactgccgccgggatccacaatcgtatgcgggttggacgatgccgatgcgggcgaatggagtgaattgatattcgatagtctgaaatacaaatcatctgtatgcccgagttgaacatacgaggattaaaaacaagtaatcgcttttcatgtaaaatataaatgctagtttctgtgacgaatgcaccttgacgcagtatacgtgtggcttgctgcagctggatatgcgatgcatatcatacgtgcgtatgtgcacttcttccaatcaggcttaatattaccaattgacattactcgtaattaaatatcaattgcatttgctcataatttgctaagattcgatctcctgctgctcccatacgattgatgttctcctcatctagttatcccttgcagctcggtggtttcgactggctgtaacatgcgttgaattttgacacgtgaagtttgccgtgtaaaggaaatactaaatagtttttgagaatacatatcgtagccaaaagaaacagctaggcctctcgagtgtattgtgtaccatattatcctcaggctgctcgtctgaatacgtttatcacatcgcgaaggctttaacatagaccttatattaaca

SEQ ID NO: 8763 - DNA, 1776 bp, Muscodor strobelii
  misc_feature: SGI cDNA ID NO. 562712
  misc_feature: Encodes the peptide sequence at SEQ ID NO 8764
atggcggcggtggttctcacgacggaggagactaatcttttctcctcctcgtctctgcggcggtcgcattcacagaccagcttcggatctgcttcaacacccaaattccgcacctcagcttctacatctagaattaatgatctcttccgcgacaactaccaacagcaaccggttcacattgtccccggatcgaacccctcatctgcgccgtcctcgcccgacgccgcctccgaatctgtcaacccgtcctatacctccactcctgttacgaacctgtctctagacggacagtgtggcgatgatgccgacgaccagtcccaagacgcacttttgttgtccgaatacggcgacaacccttacttcatgtccctagatgaactggaagacctggacgatttggaggatctggagcctccgccgagccctcgaacaggcgactcatataccgtctccccgactgatcagacgacgtcctcgtctggcacttcacgcccaggttcaccgattgctatagagcagcctcaggacgacaccgctgtcaaacaacatcccactcaacacgtcgactacttatctcatgactggaaggaagaagatatatggtcgtcatggcggtacatcatctccaagagacgggagtacgcaaacgctccacgtttggagaatgcctcatggaggacctggatgaagtcgaaatataatttgaagaccatttccccagaaacactcaattggttgaaagactgcgacgtcacttggttatatggtcctctacagactggccaacggaagatgctctgtgatagtgccgaacgaagtagcacgacactgtctaggtctaactcttttgtccacaaaaagccaatcctgaagaaacgatctatgtcagaagtcatgctacagcgatctctatcatcatcctcactgctgaagcaagccactgccgttgttcaagctcagcaaaaggatggtaccaaccgaatgggtcgacctatcctgtcgcgtgctcatactgatctcgtcacatttcctttctctgagcggaggaggagcagagcaaacaccagcttgtatccatctaatgatacttcaggtctaacgacgccttcgacggaacgaaaacacatccatttcgacgagcaggtcaagcagtgcatcgctgttgaagttaagggcgacgatgacgatgacgatgactcatatcattggaggcatgacgaaagtgattcggacgaggacgctatcatgatgaaaccaatgcatacaaggaaaaagcctatctttttacggaagaagcctgccgccaactccaatggtgaaagcaagacaatcgcaatgctcccatccactaccctaaaatacagagccgattccccggtgccaaccgagagtgcactcaaacacagtgcaggtcccttgttcagaccaccaatatcttcctctccctctcaggaaacgatacgtcctgccggtcgcacagggtcgggcggcttttttctagatgacgaggacgaatacgagccaaatcagaacttggtggcatcggacgagagttctggggatatcacacgatcaccgactctacatcagtctgcgttcagcagcgacctggatgcacagccagctggcatgcgacggacggaatcgggtatgtttatgccttacgatgagagcgaggcacaggcaaacgacggaatcatggggcgtgttatcgaaacagtaaatacagcccgggacatagcgcatgtcatctggaatgttggttggagaagataa

SEQ ID NO: 8764 - protein, 591 aa, Muscodor strobelii
  misc_feature: SGI Peptide ID NO. 562712
  misc_feature (3)..(591): NCBI GI: 256735057 Blast Desc: NECHADRAFT_98684 [Nectria haematococca mpVI 77-13-4]
  misc_feature (3)..(591): NCBI GI: 46108740 Blast Desc: FG01252.1 [Gibberella zeae PH-1]
  misc_feature (3)..(560): NCBI GI: 261357395 Blast Desc: conserved [Verticillium albo-atrum VaMs.102]
  misc_feature (3)..(591): NCBI GI: 85111471 Blast Desc: NCU09310 [Neurospora crassa OR74A] gi|28925705|gb|EAA34716.1| conserved [Neurospora crassa OR74A]
  misc_feature (3)..(591): NCBI GI: 171687909 Blast Desc: protein product [Podospora anserina] gi|170943916|emb|CAP69568.1| protein product [Podospora anserina]
  misc_feature (3)..(591): NCBI GI: 116180332 Blast Desc: CHGG_00794 [Chaetomium globosum CBS 148.51] gi|88185091|gb|EAQ92559.1| CHGG_00794 [Chaetomium globosum CBS 148.51]
  misc_feature (3)..(591): NCBI GI: 156063190 Blast Desc: SS1G_01711 [Sclerotinia sclerotiorum 1980] gi|154697047|gb|EDN96785.1| SS1G_01711 [Sclerotinia sclerotiorum 1980]
  misc_feature (176)..(591): NCBI GI: 212541486 Blast Desc: protein phosphatase type 1 complex subunit Hex2/Reg1, [Penicillium marneffei ATCC 18224] gi|210068197|gb|EEA22289.1| protein phosphatase type 1 complex subunit Hex2/Reg1, marneffei
  misc_feature (167)..(589): NCBI GI: 169602763 Blast Desc: SNOG_04384 [Phaeosphaeria nodorum SN15] gi|111067024|gb|EAT88144.1| SNOG_04384 [Phaeosphaeria nodorum SN15]
  misc_feature (83)..(591): NCBI GI: 115449931 Blast Desc: conserved [Aspergillus terreus NIH2624] gi|114187682|gb|EAU29382.1| conserved [Aspergillus terreus NIH2624]
MAAVVLTTEETNLFSSSSLRRSHSQTSFGSASTPKFRTSASTSRINDLFRDNYQQQPVHIVPGSNPSSAPSSPDAASESVNPSYTSTPVTNLSLDGQCGDDADDQSQDALLLSEYGDNPYFMSLDELEDLDDLEDLEPPPSPRTGDSYTVSPTDQTTSSSGTSRPGSPIAIEQPQDDTAVKQHPTQHVDYLSHDWKEEDIWSSWRYIISKRREYANAPRLENASWRTWMKSKYNLKTISPETLNWLKDCDVTWLYGPLQTGQRKMLCDSAERSSTTLSRSNSFVHKKPILKKRSMSEVMLQRSLSSSSLLKQATAVVQAQQKDGTNRMGRPILSRAHTDLVTFPFSERRRSRANTSLYPSNDTSGLTTPSTERKHIHFDEQVKQCIAVEVKGDDDDDDDSYHWRHDESDSDEDAIMMKPMHTRKKPIFLRKKPAANSNGESKTIAMLPSTTLKYRADSPVPTESALKHSAGPLFRPPISSSPSQETIRPAGRTGSGGFFLDDEDEYEPNQNLVASDESSGDITRSPTLHQSAFSSDLDAQPAGMRRTESGMFMPYDESEAQANDGIMGRVIETVNTARDIAHVIWNVGWRR

SEQ ID NO: 8765 - DNA, 3243 bp, Muscodor strobelii
  misc_feature: SGI EST ID NO. CUFF.21228.0
  misc_feature: Variant of the nucleotide sequence at SEQ ID NO 8763
gagagctccaaagctggaggagtcaacgttccccacccggatccgcagcgacgactgtgcactccccatcaggtacagtagtccatctgcactctgcaagcccagagaccacagactgctgcagcccactccgccaggccagacccctgctctcccttccgatctcccggaattctatcgtctcgtctcgccgcccaccacgccagtattcggcccattctcgtacaccaccattctacactaaaaacactttgccgcgcgaccgttttgccgcatcttcgtttcctcgtctccaccttccattcactctcacttcaaagactcacacttcttcctccccgtcgttcgacttcctccgcctctccttcggcctgctctctgccttcgacccctcgtgttcgcgctatatcacgcctctgactaatctcacgactaagactcacagcaactctcggacggttcaacgtaatatcggcgatagcgtccctgccgcgaagatacatcttgaatcacataatttcctcgacaatacaccacgacaaatacatactaattcatcgtgagagatattttgcagcctgtcgtgagcgcttcaggagcagctatcgtatccctccaccttaaaaaaaaaccctgtctacgcctagtgtctctaccctctgtttgccacaatccttgggtcgcaacaggcatcacgtccctattcgttgtgagagtctgggagtctgggttggcatgaaggtcgcaagcagtgtcaaatagaagtggtccagccggaggattgggcgtttcgaccgctgtgctcgcgtcgagatatactcgaacatggcggcggtggttctcacgacggaggagactaatcttttctcctcctcgtctctgcggcggtcgcattcacagaccagcttcggatctgcttcaacacccaaattccgcacctcagcttctacatctagaattaatgatctcttccgcgacaactaccaacagcaaccggttcacattgtccccggatcgaacccctcatctgcgccgtcctcgcccgacgccgcctccgaatctgtcaacccgtcctatacctccactcctgttacgaacctgtctctagacggacagtgtggcgatgatgccgacgaccagtcccaagacgcacttttgttgtccgaatacggcgacaacccttacttcatgtccctagatgaactggaagacctggacgatttggaggatctggagcctccgccgagccctcgaacaggcgactcatataccgtctccccgactgatcagacgacgtcctcgtctggcacttcacgcccaggttcaccgattgctatagagcagcctcaggacgacaccgctgtcaaacaacatcccactcaacacgtcgactacttatctcatgactggaaggaagaagatatatggtcgtcatggcggtacatcatctccaagagacgggagtacgcaaacgctccacgtttggagaatgcctcatggaggacctggatgaagtcgaaatataatttgaagaccatttccccagaaacactcaattggttgaaagactgcgacgtcacttggttatatggtcctctacagactggccaacggaagatgctctgtgatagtgccgaacgaagtagcacgacactgtctaggtctaactcttttgtccacaaaaagccaatcctgaagaaacgatctatgtcagaagtcatgctacagcgatctctatcatcatcctcactgctgaagcaagccactgccgttgttcaagctcagcaaaaggatggtaccaaccgaatgggtcgacctatcctgtcgcgtgctcatactgatctcgtcacatttcctttctctgagcggaggaggagcagagcaaacaccagcttgtatccatctaatgatacttcaggtctaacgacgccttcgacggaacgaaaacacatccatttcgacgagcaggtcaagcagtgcatcgctgttgaagttaagggcgacgatgacgatgacgatgactcatatcattggaggcatgacgaaagtgattcggacgaggacgctatcatgatgaaaccaatgcatacaaggaaaaagcctatctttttacggaagaagcctgccgccaactccaatggtgaaagcaagacaatcgcaatgctcccatccactaccctaaaatacagagccgattccccggtgccaaccgagagtgcactcaaacacagtgcaggtcccttgttcagaccaccaatatcttcctctccctctcaggaaacgatacgtcctgccggtcgcacagggtcgggcggcttttttctagatgacgaggacgaatacgagccaaatcagaacttggtggcatcggacgagagttctggggatatcacacgatcaccgactctacatcagtctgcgttcagcagcgacctggatgcacagccagctggcatgcgacggacggaatcgggtatgtttatgccttacgatgagagcgaggcacaggcaaacgacggaatcatggggcgtgttatcgaaacagtaaatacagcccgggacatagcgcatgtcatctggaatgttggttggagaagataagaaccagcagtcctaatcaaatactctttttatgagccgatctggaatgagaaagcatcatagctgtgcaattatcttagaggcagtgttttaggcgttggaaaggaattgggctcgaaatccgcttgaggtattacgatgcctttggtaccaagagtaatgcggaatacattttatgggcagctgatacacgatttgcgaagacaagaaaggctattcttctcctgcacctggagcgttcaagggctaaaatgagaaagcagacgacgtaattcaagatatttgatcatttgctgcgatcatgttcttcttcaatctgatatgatgacgacgttgcttgcgattgggcttcatgtatcaatagtaatggccagactgtgtttataatactccagcctaaccattcttgcatctatgtcctgccatcattgtttcgttgttaaatgccattgtgggggattaatttctcgtattcaaggagtatttggtagcggtgggaaccgtcacattccagtcctgttgctataaattgccatggaataatcatccccattcctgagcgaggaaaacttgcgttagtcgctgctgattttgctaattggtagctgtcatgcatttcctgtgatacgacgttactcgttc

SEQ ID NO: 8766 - DNA, 2754 bp, Muscodor strobelii
  misc_feature: SGI cDNA ID NO. 562713
  misc_feature: Encodes the peptide sequence at SEQ ID NO 8767
atggcccagttcactgttcaggattctcgacccatattcgctggggacgagctgggagacttgcgatccgatgacgcgacattgagccctggagacatggtggaactcagtgcggaacattcaagacgaccagtgctagcgattagtcttggacgcatcaatggatatgagcattactacgcaagtagtgggaaatggttttcggctatgggtgtaagacctctgttcgttgtccctggatttgcaacagcagaagagttagcaccagttattgcggagctacctagagaggatgtttcgatcgaaactctcaatatactacaagaccttggagaaggaccttctcgtacggctggcgccgcgctcctgcggaacatgctgcaattcatccaagatgccgaggctgtttatcaagcaaacgccggcacacttgatgcctcaagcgccttcattggcgacccagtgaaacaccggtatcttaccttgcatgaaattgctgacttattattacctgaggcatctaaaaaacaagggagattcaacacttcttccttgtatgcagtgcatcgagcactgatggaagatgaggtcttcttcagacctcttcgcagccaaggtcataatagatcgtacttgttcgaagttagcccgctctctgaggtacgaactgtacaaaaggtagagttatggatgcgaggatatttgaacaacggatttcatccagaaaatacccctgtcgatcctcgagaaaaactgcctattgaatcgtttatcaacactgcgcgagtatttattgacgagacccgtaaaagtcgggaatggtcgaaaaacggcatcattggtccgtcttcacaaaaatggcgggaatcatcctccacaaaatggtcagaaacggataagattatactggagtttatcgaactttgggctagctatcgaaagtttcccgcatactcacggttgcaaacatttggttctgccctcatgcgggctcttggccggtacgaagagtatctaccagcgactggttggactttccttcaggaagttcgatggataccaccatgggagattcccgctcgttatagtgtgcgattccctgacgtcgagatcaagcgtggtggtagctatgttcgtccctacatgggtatgcttgacaggcatctaaagcgcgataccctatctctcattcgcaagcccctcgagggagcaacggtttattgcattgacgatgttaccgctcacgagattgacgatgcggtatctcttgagaggacctcaaaccccgaggagtactggatccatgttcacgttgcagaccccgcgtcttcgttcggggccgatacacctgtggccaagtatgccgaactcatacctgaagcgatatatcttccaggtcatcttgagccaatgcttcccgttgaactcattcgcgaccggttctctcttgcgcccgggcgaccttgcctcacatttagcgctttagtcaagatcgatggaaccattcttgaggagaagatcacgccaaacacgctcaaggatgtgatttacatgacctacgaagatgctgctttgtcgatcggtgaaaaacgaatcgacccatattcgaaaggggcaaaatatgaaattgggacctcatcgaagaaatcagtgatgaatcgagagatgtccggactcgaggatttgaccaaggatcagaaagaagacctcgcgattctttctaagctcgggaaagtcatccagggcgcgcggcttgcaaagggcgcaactccattctttcagtcgcgtgcgatggtgaccaccaatttcagcgaggtgaaacagaaaaattccgaggacttcatcacaacttctggtgacccgacgatagaaatccattactcgccgcgctccggtactgacttggttgaaaatgctatgaagttggcgaatgaggttgcggctcgttggtgctgggcgcgtgatatccctattccatatcgtacgcaaccacacgggctgcgtaatgcagcacttattcagcagtatgcccacgatgtgctcaacccgcttttagaagcgggtgtcgcccctgacgaggcggtttggaaacacatgagatcgctaatcggttcggacgaggtttctacgacaccaggcccgcacttcacgctaggtgtcgatatgtatactaaagcaacatccccactgcgacgatttggcgacctcattgtgcattggcaagttgaggcagcgcttctcgaagaggcacgcctcgaacagagcctcctgaacaccaacaagtcgacaaagactcggaaccatgaatttttgccattttctcgtgagacactcgatcgcatgctgccgatgcttcgtgtccgtgaaaagcaggctcggacgctgaccaacatcgacgggcccgaccagtggattctacaagccttggtgcgtgcatggcggttcaaagaggccccattgccagagactttcaagatgactgtgtggcacgtcacagcgtcaaccgtcctcggccgattagactggttcgatcggagtgtaattctgaaacacgaagcgctcaatggcgttgcgttaggtgccgatatccgtctagacgacgtcattgaagttcgtctcaccgacgtcaatgtgtacactcggcgcattgaagtcgaggccgtgcgcataatcgagaaggctgaaaacacccagaaagatgcgtctttgcctactggccagtcggaagcctcccaagaaaccgtggtggtctag

SEQ ID NO: 8767 - protein, 917 aa, Muscodor strobelii
  misc_feature: SGI Peptide ID NO. 562713
  misc_feature (398)..(748): Pfam Id: PF00773 Pfam Desc: RNB domain
  misc_feature (27)..(908): NCBI GI: 256734353 Blast Desc: NECHADRAFT_74520 [Nectria haematococca mpVI 77-13-4]
  misc_feature (31)..(894): NCBI GI: 1345934 Blast Desc: CYT4_NEUCR RecName: Full=Mitochondrial protein cyt-4 gi|168863|gb|AAA33608.1| protein phosphatase [Neurospora crassa]
  misc_feature (31)..(894): NCBI GI: 164423010 Blast Desc: NCU09327 [Neurospora crassa OR74A] gi|157069910|gb|EAA34685.2| [Neurospora crassa OR74A]
  misc_feature (13)..(891): NCBI GI: 116180324 Blast Desc: CHGG_00790 [Chaetomium globosum CBS 148.51] gi|88185087|gb|EAQ92555.1| CHGG_00790 [Chaetomium globosum CBS 148.51]
  misc_feature (13)..(889): NCBI GI: 171687919 Blast Desc: protein product [Podospora anserina] gi|170943921|emb|CAP69573.1| protein product [Podospora anserina]
  misc_feature (29)..(889): NCBI GI: 46108738 Blast Desc: FG01251.1 [Gibberella zeae PH-1]
  misc_feature (5)..(896): NCBI GI: 261357400 Blast Desc: mitochondrial protein cyt-4 [Verticillium albo-atrum VaMs.102]
  misc_feature (20)..(891): NCBI GI: 145603013 Blast Desc: MGG_13800 [Magnaporthe grisea 70-15] gi|145011341|gb|EDJ95997.1| MGG_13800 [Magnaporthe grisea 70-15]
  misc_feature (16)..(893): NCBI GI: 154301179 Blast Desc: BC1G_10562 [Botryotinia fuckeliana B05.10] gi|150856310|gb|EDN31502.1| BC1G_10562 [Botryotinia fuckeliana B05.10]
  misc_feature (70)..(889): NCBI GI: 156057031 Blast Desc: SS1G_04246 [Sclerotinia sclerotiorum 1980] gi|154702032|gb|EDO01771.1| SS1G_04246 [Sclerotinia sclerotiorum 1980]
  misc_feature (253)..(742): SWISSPROT Homolog: EC 3.1.13.1 Exoribonuclease II
MAQFTVQDSRPIFAGDELGDLRSDDATLSPGDMVELSAEHSRRPVLAISLGRINGYEHYYASSGKWFSAMGVRPLFVVPGFATAEELAPVIAELPREDVSIETLNILQDLGEGPSRTAGAALLRNMLQFIQDAEAVYQANAGTLDASSAFIGDPVKHRYLTLHEIADLLLPEASKKQGRFNTSSLYAVHRALMEDEVFFRPLRSQGHNRSYLFEVSPLSEVRTVQKVELWMRGYLNNGFHPENTPVDPREKLPIESFINTARVFIDETRKSREWSKNGIIGPSSQKWRESSSTKWSETDKIILEFIELWASYRKFPAYSRLQTFGSALMRALGRYEEYLPATGWTFLQEVRWIPPWEIPARYSVRFPDVEIKRGGSYVRPYMGMLDRHLKRDTLSLIRKPLEGATVYCIDDVTAHEIDDAVSLERTSNPEEYWIHVHVADPASSFGADTPVAKYAELIPEAIYLPGHLEPMLPVELIRDRFSLAPGRPCLTFSALVKIDGTILEEKITPNTLKDVIYMTYEDAALSIGEKRIDPYSKGAKYEIGTSSKKSVMNREMSGLEDLTKDQKEDLAILSKLGKVIQGARLAKGATPFFQSRAMVTTNFSEVKQKNSEDFITTSGDPTIEIHYSPRSGTDLVENAMKLANEVAARWCWARDIPIPYRTQPHGLRNAALIQQYAHDVLNPLLEAGVAPDEAVWKHMRSLIGSDEVSTTPGPHFTLGVDMYTKATSPLRRFGDLIVHWQVEAALLEEARLEQSLLNTNKSTKTRNHEFLPFSRETLDRMLPMLRVREKQARTLTNIDGPDQWILQALVRAWRFKEAPLPETFKMTVWHVTASTVLGRLDWFDRSVILKHEALNGVALGADIRLDDVIEVRLTDVNVYTRRIEVEAVRIIEKAENTQKDASLPTGQSEASQETVVV

SEQ ID NO: 8768 - DNA, 3421 bp, Muscodor strobelii
  misc_feature: SGI EST ID NO. CUFF.21232.0
  misc_feature: Variant of the nucleotide sequence at SEQ ID NO 8766
ttcagacatacgtgaacgacgtgtgctcttggccgtcgagacttatgttcgaacgccatctgcatatcaatattaagtatgctgcatgcttacaataaaccgtgggtttgttggcgatgtgtctctcggctcagttcagatgcagttgtccctaagtcgcatgtgcttccccggggccctactgcgtgtggtaccctttcatctagcaggcatctagcaacggtgcggcatccgggatcaacaactgaggccttggggaaatcgtcctccactcgtaaaaatgacaaaccgtttgaaactattcggcaacgtcttcgaaaatgggaaactgagaatcccagagaggacatccaagtgttacctgatcactcggaggctggctcattgagcaatactctcactcgcccgcagaatgtcaccatggcccagttcactgttcaggattctcgacccatattcgctggggacgagctgggagacttgcgatccgatgacgcgacattgagccctggagacatggtggaactcagtgcggaacattcaagacgaccagtgctagcgattagtcttggacgcatcaatggatatgagcattactacgcaagtagtgggaaatggttttcggctatgggtgtaagacctctgttcgttgtccctggatttgcaacagcagaagagttagcaccagttattgcggagctacctagagaggatgtttcgatcgaaactctcaatatactacaagaccttggagaaggaccttctcgtacggctggcgccgcgctcctgcggaacatgctgcaattcatccaagatgccgaggctgtttatcaagcaaacgccggcacacttgatgcctcaagcgccttcattggcgacccagtgaaacaccggtatcttaccttgcatgaaattgctgacttattattacctgaggcatctaaaaaacaagggagattcaacacttcttccttgtatgcagtgcatcgagcactgatggaagatgaggtcttcttcagacctcttcgcagccaaggtcataatagatcgtacttgttcgaagttagcccgctctctgaggtacgaactgtacaaaaggtagagttatggatgcgaggatatttgaacaacggatttcatccagaaaatacccctgtcgatcctcgagaaaaactgcctattgaatcgtttatcaacactgcgcgagtatttattgacgagacccgtaaaagtcgggaatggtcgaaaaacggcatcattggtccgtcttcacaaaaatggcgggaatcatcctccacaaaatggtcagaaacggataagattatactggagtttatcgaactttgggctagctatcgaaagtttcccgcatactcacggttgcaaacatttggttctgccctcatgcgggctcttggccggtacgaagagtatctaccagcgactggttggactttccttcaggaagttcgatggataccaccatgggagattcccgctcgttatagtgtgcgattccctgacgtcgagatcaagcgtggtggtagctatgttcgtccctacatgggtatgcttgacaggcatctaaagcgcgataccctatctctcattcgcaagcccctcgagggagcaacggtttattgcattgacgatgttaccgctcacgagattgacgatgcggtatctcttgagaggacctcaaaccccgaggagtactggatccatgttcacgttgcagaccccgcgtcttcgttcggggccgatacacctgtggccaagtatgccgaactcatacctgaagcgatatatcttccaggtcatcttgagccaatgcttcccgttgaactcattcgcgaccggttctctcttgcgcccgggcgaccttgcctcacatttagcgctttagtcaagatcgatggaaccattcttgaggagaagatcacgccaaacacgctcaaggatgtgatttacatgacctacgaagatgctgctttgtcgatcggtgaaaaacgaatcgacccatattcgaaaggggcaaaatatgaaattgggacctcatcgaagaaatcagtgatgaatcgagagatgtccggactcgaggatttgaccaaggatcagaaagaagacctcgcgattctttctaagctcgggaaagtcatccagggcgcgcggcttgcaaagggcgcaactccattctttcagtcgcgtgcgatggtgaccaccaatttcagcgaggtgaaacagaaaaattccgaggacttcatcacaacttctggtgacccgacgatagaaatccattactcgccgcgctccggtactgacttggttgaaaatgctatgaagttggcgaatgaggttgcggctcgttggtgctgggcgcgtgatatccctattccatatcgtacgcaaccacacgggctgcgtaatgcagcacttattcagcagtatgcccacgatgtgctcaacccgcttttagaagcgggtgtcgcccctgacgaggcggtttggaaacacatgagatcgctaatcggttcggacgaggtttctacgacaccaggcccgcacttcacgctaggtgtcgatatgtatactaaagcaacatccccactgcgacgatttggcgacctcattgtgcattggcaagttgaggcagcgcttctcgaagaggcacgcctcgaacagagcctcctgaacaccaacaagtcgacaaagactcggaaccatgaatttttgccattttctcgtgagacactcgatcgcatgctgccgatgcttcgtgtccgtgaaaagcaggctcggacgctgaccaacatcgacgggcccgaccagtggattctacaagccttggtgcgtgcatggcggttcaaagaggccccattgccagagactttcaagatgactgtgtggcacgtcacagcgtcaaccgtcctcggccgattagactggttcgatcggagtgtaattctgaaacacgaagcgctcaatggcgttgcgttaggtgccgatatccgtctagacgacgtcattgaagttcgtctcaccgacgtcaatgtgtacactcggcgcattgaagtcgaggccgtgcgcataatcgagaaggctgaaaacacccagaaagatgcgtctttgcctactggccagtcggaagcctcccaagaaaccgtggtggtctagggaaattatgttgagttatataatgtacgaatataggagtccaatggcgttgatcgtgttttcacttatgtgtaatatgcagaagtgtggactgataatcaaaacactctctgagcttcttgccatcttttgtaggactaaactcagtgtgtacaacatcatcatctagaagaaagacaaatatcatattcacagcatcgcctgcttgatcacatgagatcctctttgtgtctatagctacttaaat

SEQ ID NO: 8769 - DNA, 474 bp, Muscodor strobelii
  misc_feature: SGI cDNA ID NO. 562714
  misc_feature: Elevated expression when VOC is produced
  misc_feature: Encodes the peptide sequence at SEQ ID NO 8770
atgaagcacttcgctatccttgctttaaccggccttgcatccgctcagatggatggcatggacagtactatggagagcagcatgaccacagttgctcctgtatcaagcaccgacattactgatacagtcacggccatcagttctgtttctttgaatactgcagccgataacagcactaccgagacggtttctgtaccactcgacacaacagagatgacaacttctgccatcatgacagatatgccgtcaacaacagacatgcccatgaccgatatgtcatctaccacggttgatactgagacatcgagcacgatggacatgggtatgggtggcatgcccatgggcacgggaggcgtgatgccgaataccacggctacgcccatcacgtctccaatttctgatggcatggtcaacggcgtttcggccggtctattccttatgtccatcaccctggctgcactgttacagctctga

SEQ ID NO: 8770 - protein, 157 aa, Muscodor strobelii
  misc_feature: SGI Peptide ID NO. 562714
  misc_feature: Useful for introducing or modulating the production of volatile compounds
MKHFAILALTGLASAQMDGMDSTMESSMTTVAPVSSTDITDTVTAISSVSLNTAADNSTTETVSVPLDTTEMTTSAIMTDMPSTTDMPMTDMSSTTVDTETSSTMDMGMGGMPMGTGGVMPNTTATPITSPISDGMVNGVSAGLFLMSITLAALLQL

SEQ ID NO: 8771 - DNA, 1276 bp, Muscodor strobelii
  misc_feature: SGI EST ID NO. CUFF.21040.0
  misc_feature: Variant of the nucleotide sequence at SEQ ID NO 8769
ataatacttgcttcatttgacttagaacttcaaacagcaacaaaggcgtgcatttgcagaggtaaatttatcaagttaccggtgctagcaaatgctgtatcatgtcttcatcaaagcgcattagatatgtgaaaaacctccgcatcaactcagttgtctgtctttgttcaacttgccaccactagttaattccctttgttatcaagcgtctcgaatctcgcctaagtgatggcatgctaccgctttcaattatcaggtatcgtggcaaccagctcataaagccaggtcattgcatcacgacgctcttaaaaaatatgaaaggctctagccagctttcctggaatcatctgaaagcccgatgtcaataaggtgatatcacttgggtcgagcgtctcaagtctttgtctacaagataggttcttctaccaacgattccccaggcgtaggacacaaaccgctcttgttctaccttttacatccactcgtttgcttaattatagatatttacaagtcacggagaccaaaatggcgatgaagcacttcgctatccttgctttaaccggccttgcatccgctcagatggatggcatggacagtactatggagagcagcatgaccacagttgctcctgtatcaagcaccgacattactgatacagtcacggccatcagttctgtttctttgaatactgcaggtactgaatccgtggtcccaagctcaacgcctgacatgggttactctatgtcagccgataacagcactaccgagacggtttctgtaccactcgacacaacagagatgacaacttctgccatcatgacagatatgccgtcaacaacagacatgcccatgaccgatatgtcatctaccacggttgatactgagacatcgagcacgatggacatgggtatgggtggcatgcccatgggcacgggaggcgtgatgccgaataccacggctacgcccatcacgtctccaatttctgatggcatggtcaacggcgtttcggccggtctattccttatgtccatcaccctggctgcactgttacagctctgagacctcatgatcgaggaggattttgaacaagtactgttgaagaaaccaccgatttgctatttcattgcccacgtgcgtctcgatattcagttattgccggatgttgatcagtggtcgcgacctaattatgtaaagcgactacctcgtgagagtcgttctttgacacggggagatcatcttttatcttagactgccaagtacctaatatgatacgtac

SEQ ID NO: 8772 - DNA, 1530 bp, Muscodor strobelii
  misc_feature: SGI cDNA ID NO. 562715
  misc_feature: Reduced expression when VOC is produced
  misc_feature: Encodes the peptide sequence at SEQ ID NO 8773
atgaagggaactatcgcaatggcagcgctcgctgctggcgccaacgctggcagcatccatcttcgacacggccaccagcaggctcaccaagctctccaaaagaagggctatgaggccgagagcacctgtggctgcactaccgtctacagcacttggactggctacccgactttggtctaccctacctcgacgcctgctcctgcgacgacgacttcttctagctccagctcgagctatgctgtcgtgcccacgcccattcctcacagctactcgacgactggaacctacgtcatccccggcaccaccatcactctgacctcagggacagcggttaccgtgccatatccgacctcgtgcactcccggcacgtacaccttccctggcgttacgactaccgtcacttcgtccggctacgtgacggtccctgtcactactagctatcccgctggcacctacactgctaccgagacgaccgtgaccgttgttgacactagcactgtcgtctactgccctttcagctcttccagttccagctcggctgctcccacaacatatcctgctgagacgactacatacgtcgccgtccctcctccagctactaccaccagcaaggctgttgaatatcccaccaccagcaccaaggaagcatcgtatcccacctctactggtcactctggaagcggatccggcggccacggccctggccaaggtactgccggcaagccctgggctgttacttatacgccctacggaactggccctgagggtggctgcaagtctcaaagccagatcaagagcgatcttgctgccattgctgccgctggtattgaccagatccgtgtctactcaaccgactgcaataccatggaatacgttggctccgcctgcgagtcctatggcatcaagctgattctcggcatctacatcgatgctcctggttgcactgctgacagcccttccatcaatgagcagaccagcgctatcaaggcctggggcaagtgggacatggtcaacatgattgttgttggtaacgaggctatccaagacggatactgcacaccttctgagctggctggtctgatctccaccaccaagtctcagctcggctacagtggtccctacactaccgccgaaaccgtcaacatctggcagcaggaagagttcaccagcgctatctgcccagtcgttgattttgtgggtgccaatgctcacgctttcttcaacacggagacaactgctgcccaggctggtcagttcgtgaagggtcaactcgacatcatcgagaaggtctgcagtggcaaggagggtcgtatcatggagactggctggccctctgccggtaacgctcttggcttggccgtccctggctacgctgagcaggctgaggccatcaagggcattgtcaaggctgttggagacaaggctgtcttgttctctcttacctctgatggctggaagtctgctgacaccgcttgcgcctgcgagcctcactggggatgtgctgaagtcctcggcatccacttgtcttaa

SEQ ID NO: 8773 - protein, 509 aa, Muscodor strobelii
  misc_feature: SGI Peptide ID NO. 562715
  misc_feature (1)..(506): NCBI GI: 222090442 Blast Desc: exo-beta-1,3-glucanase [Chaetomium globosum] gi|222090444|gb|ACM42427.1| exo-beta-1,3-glucanase [Chaetomium globosum]
  misc_feature (1)..(508): NCBI GI: 85111404 Blast Desc: NCU09326 [Neurospora crassa OR74A] gi|28925670|gb|EAA34684.1| conserved [Neurospora crassa OR74A]
  misc_feature (25)..(500): NCBI GI: 46108736 Blast Desc: FG01250.1 [Gibberella zeae PH-1]
  misc_feature (122)..(504): NCBI GI: 256735056 Blast Desc: NECHADRAFT_123075 [Nectria haematococca mpVI 77-13-4]
  misc_feature (23)..(505): NCBI GI: 171687921 Blast Desc: protein product [Podospora anserina] gi|170943922|emb|CAP69574.1| protein product [Podospora anserina]
  misc_feature (14)..(502): NCBI GI: 115401576 Blast Desc: [Aspergillus terreus NIH2624] gi|114190317|gb|EAU32017.1| [Aspergillus terreus NIH2624]
  misc_feature (1)..(505): NCBI GI: 25013325 Blast Desc: beta-glucosidase 5 [Coccidioides posadasii] gi|240110273|gb|EER28432.1| beta-glucosidase 5 [Coccidioides posadasii C735 delta SOWgp]
  misc_feature (1)..(504): NCBI GI: 226278242 Blast Desc: beta-glucosidase [Paracoccidioides brasiliensis Pb01]
  misc_feature (240)..(504): NCBI GI: 39945200 Blast Desc: MGG_04582 [Magnaporthe grisea 70-15] gi|145011343|gb|EDJ95999.1| MGG_04582 [Magnaporthe grisea 70-15]
  misc_feature (22)..(505): NCBI GI: 70983670 Blast Desc: cell wall glucanase (Scw11) [Aspergillus fumigatus Af293] gi|66844988|gb|EAL85324.1| cell wall glucanase (Scw11), [Aspergillus fumigatus Af293] gi|159123633|gb|EDP48752.1| cell
  misc_feature (258)..(500): SWISSPROT Homolog: EC 3.2.1.58 Glucan 1,3-beta-glucosidase
  misc_feature: Useful for introducing or modulating the production of volatile compounds
MKGTIAMAALAAGANAGSIHLRHGHQQAHQALQKKGYEAESTCGCTTVYSTWTGYPTLVYPTSTPAPATTTSSSSSSSYAVVPTPIPHSYSTTGTYVIPGTTITLTSGTAVTVPYPTSCTPGTYTFPGVTTTVTSSGYVTVPVTTSYPAGTYTATETTVTVVDTSTVVYCPFSSSSSSSAAPTTYPAETTTYVAVPPPATTTSKAVEYPTTSTKEASYPTSTGHSGSGSGGHGPGQGTAGKPWAVTYTPYGTGPEGGCKSQSQIKSDLAAIAAAGIDQIRVYSTDCNTMEYVGSACESYGIKLILGIYIDAPGCTADSPSINEQTSAIKAWGKWDMVNMIVVGNEAIQDGYCTPSELAGLISTTKSQLGYSGPYTTAETVNIWQQEEFTSAICPVVDFVGANAHAFFNTETTAAQAGQFVKGQLDIIEKVCSGKEGRIMETGWPSAGNALGLAVPGYAEQAEAIKGIVKAVGDKAVLFSLTSDGWKSADTACACEPHWGCAEVLGIHLS

SEQ ID NO: 8774 - DNA, 2203 bp, Muscodor strobelii
  misc_feature: SGI EST ID NO. CUFF.21069.0
  misc_feature: Variant of the nucleotide sequence at SEQ ID NO 8772
ccgatgttggcctgctatgctccattggcgtgaacatggagcatggagcatccgaaaaaaaacagcgccagttcaaattggcgccgagagacccatggcgcctcggtcaggtaataaaactaaatgaccgttgctatttgcactatggccccctttccccttctcctcttcctcacgaagcgtcgcttttaatgtcgaggtccaggcattgaagcatctcgcatcttccgtccttcgccgttgcttaatcccaccaaccgcttcactctttcagcgggcactcgtttttatcacgaaatcacgaagagaacacagccgtctatatacgatcgatagcgtaggagtaattttttggcagatcagtaatcatgaagggaactatcgcaatggcagcgctcgctgctggcgccaacgctggcagcatccatcttcgacacggccaccagcaggctcaccaagctctccaaaagaagggctatgaggccgagagcacctgtggctgcactaccgtctacagcacttggactggctacccgactttggtctaccctacctcgacgcctgctcctgcgacgacgacttcttctagctccagctcgagctatgctgtcgtgcccacgcccattcctcacagctactcgacgactggaacctacgtcatccccggcaccaccatcactctgacctcagggacagcggttaccgtgccatatccgacctcgtgcactcccggcacgtacaccttccctggcgttacgactaccgtcacttcgtccggctacgtgacggtccctgtcactactagctatcccgctggcacctacactgctaccgagacgaccgtgaccgttgttgacactagcactgtcgtctactgccctttcagctcttccagttccagctcggctgctcccacaacatatcctgctgagacgactacatacgtcgccgtccctcctccagctactaccaccagcaaggctgttgaatatcccaccaccagcaccaaggaagcatcgtatcccacctctactggtcactctggaagcggatccggcggccacggccctggccaaggtactgccggcaagccctgggctgttacttatacgccctacggaactggccctgagggtggctgcaagtctcaaagccagatcaagagcgatcttgctgccattgctgccgctggtattgaccagatccgtgtctactcaaccgactgcaataccatggaatacgttggctccgcctgcgagtcctatggcatcaagctgattctcggcatctacatcgatgctcctggttgcactgctgacagcccttccatcaatgagcagaccagcgctatcaaggcctggggcaagtgggacatggtcaacatgattgttgttggtaacgaggctatccaagacggatactgcacaccttctgagctggctggtctgatctccaccaccaagtctcagctcggctacagtggtccctacactaccgccgaaaccgtcaacatctggcagcaggaagagttcaccagcgctatctgcccagtcgttgattttgtgggtgccaatgctcacgctttcttcaacacggagacaactgctgcccaggctggtcagttcgtgaagggtcaactcgacatcatcgagaaggtctgcagtggcaaggagggtcgtatcatggagactggctggccctctgccggtaacgctcttggcttggccgtccctggctacgctgagcaggctgaggccatcaagggcattgtcaaggctgttggagacaaggctgtcttgttctctcttacctctgatggctggaagtctgctgacaccgcttgcgcctgcgagcctcactggggatgtgctgaagtcctcggcatccacttgtcttaaagaaaacctgtaatgtctataccacgcctagacaacaatcttgggtcgaaagagtccacgtttgtgatatcactgttcggtgttccggagaatcaagagacagcgggagtaatttcatgaaactgagctgccaaaaatcccaggcctgcctgcatctaactgggtctgattcataatgttgtaatttactactatcaattaacggatttgagctgtcttgttctaaacacattgttcttgttctatcttcgtgattcgctgaacatcaaccaatgatactgtcccatattgcaaatcagtagttc

SEQ ID NO: 8775 - DNA, 1977 bp, Muscodor strobelii
  misc_feature: SGI cDNA ID NO. 562716
  misc_feature: Encodes the peptide sequence at SEQ ID NO 8776
atgcgcgccccaggctctgcactaggctcaccatcccttctgcccgaccgtcctgccgttgacgaagacctcaaccaactctaccacggcacgtcctcagccggctctcctctattccacctgcccacatcagcaaccctcgattccgtcttccagttcgagccaccgcccgcgcctctgcagtccgctgctgtgccaagtgttgatccgcctgacgggtttctagacttcagtgcggtggacgaaagcaatgaccatgatatggtagatgctgaggaaggtggtgcgccgttacatgactacaccatgcctgaagatagtgagactgccggtgcgctgccggaaatcgacgacgttgatcagggcaactaccacgccatagacgacgacgatggctacaccagcgtgttcgacttgccctttgttgcttcgcctcctgctccaatgacacagcctgtcgaccatatcgcccctcctgcaactgatcctatcacggccgagatgctagagcaggtggcagccgagggcttcgacgtcgagaccctcgacttgctcgaccaacagccgcctcctttcttagctcatcagaatgcgggcggcactcttatgcccgacaactacaattgtcaaaattttctgcgctactgggcatggttgaagaggcatggcaagttacggaacatcgatctcaccccttaccacgagtccagcgtgtcgaaccacgacaagacaaggattgaatatgcagatttgcaaggcgacagctgtgaccttcaaggcatcaactggaggaagatgggcatcacgagaactctggcacggaggtgccgtgtcaagacattccgcaattacgtcaacatcaaccgttctgatatctggaatcccggtgacctggaccagctgctcaaccctgtggagagctattatcagtttcgtagtatggacattcgaagggacgtacgcttattgcatttccagctccgacatatcctcggctgtgcttctcgaacgagagtattctatcccaccgaaaagacgatcaaggagctagaccccactagcggtcgacaaaggattgctatgacctttgataattactcagattcgtttacctcaaccttggctgcggaggagggaatcctgatagccggtagcttctacggaacatatcactaccgtcacctcgatgtggagaatgggcccggacagcagaccactggcaggctgactgatcatccgagcggcataacgaaccatgtgcagatcagtccttcccgatactcatccgtgcctttggcagcatttgcttcgaacgactgtggataccgcgtcgttgatctggccacgaatcagatcatttcgagcaagatttatccttgggctgtgaattgctcctctctcagtcccgacaagaggcttcgcgtgatggtgggagatacccaggacgtcatcatcagcgatgccgaaaatggccaggtactccaaactctggatgggcacaaggattttggttttgcttgcgcttggtcacccgatggctggacggtggccactggcaaccaagacagaagcattagaatatgggacgcacggaaatggaagaatagcagaggcgagagtcagcatctcgagatactacgtacagaaatgacgggtgtccgcagccttcgcttctcacctcttggaagcggaaaaccattcctcgctgctgccgaggaagccgacttcatcaacattatcgatgcagagaccttcaaggcgaagcagacgatagggatctttggcgaactggctggcatatcatttgctagtgatggcgaggaattgatcggcttgtcaagtgatcccgatcgaggaggtattctcagtcttgagcgttgcggcccaagatttgggaaagactccgacgactatccgctttggaaccctcaggagcgacggcggcaagctgccatgaaggaagattggttcttttga

SEQ ID NO: 8776 - protein, 658 aa, Muscodor strobelii
  misc_feature: SGI Peptide ID NO. 562716
  misc_feature (491)..(529): Pfam Id: PF00400 Pfam Desc: WD domain, G-beta repeat
  misc_feature (118)..(628): NCBI GI: 171687927 Blast Desc: protein product [Podospora anserina] gi|170943925|emb|CAP69577.1| protein product [Podospora anserina]
  misc_feature (87)..(642): NCBI GI: 116180320 Blast Desc: CHGG_00788 [Chaetomium globosum CBS 148.51] gi|88185085|gb|EAQ92553.1| CHGG_00788 [Chaetomium globosum CBS 148.51]
  misc_feature (201)..(628): NCBI GI: 85111631 Blast Desc: NCU09325 [Neurospora crassa OR74A] gi|28925788|gb|EAA34793.1| NCU09325 [Neurospora crassa OR74A]
  misc_feature (202)..(633): NCBI GI: 256734352 Blast Desc: NECHADRAFT_103068 [Nectria haematococca mpVI 77-13-4]
  misc_feature (201)..(636): NCBI GI: 261357446 Blast Desc: WD repeat-containing protein [Verticillium albo-atrum VaMs.102]
  misc_feature (191)..(627): NCBI GI: 39965597 Blast Desc: MGG_09961 [Magnaporthe grisea 70-15] gi|145013130|gb|EDJ97771.1| MGG_09961 [Magnaporthe grisea 70-15]
  misc_feature (85)..(628): NCBI GI: 46108734 Blast Desc: FG01249.1 [Gibberella zeae PH-1]
  misc_feature (249)..(627): NCBI GI: 154301195 Blast Desc: BC1G_10570 [Botryotinia fuckeliana B05.10] gi|150856318|gb|EDN31510.1| BC1G_10570 [Botryotinia fuckeliana B05.10]
  misc_feature (206)..(627): NCBI GI: 156057049 Blast Desc: SS1G_04255 [Sclerotinia sclerotiorum 1980] gi|154702041|gb|EDO01780.1| SS1G_04255 [Sclerotinia sclerotiorum 1980]
  misc_feature (250)..(658): NCBI GI: 226291080 Blast Desc: conserved [Paracoccidioides brasiliensis Pb18]
MRAPGSALGSPSLLPDRPAVDEDLNQLYHGTSSAGSPLFHLPTSATLDSVFQFEPPPAPLQSAAVPSVDPPDGFLDFSAVDESNDHDMVDAEEGGAPLHDYTMPEDSETAGALPEIDDVDQGNYHAIDDDDGYTSVFDLPFVASPPAPMTQPVDHIAPPATDPITAEMLEQVAAEGFDVETLDLLDQQPPPFLAHQNAGGTLMPDNYNCQNFLRYWAWLKRHGKLRNIDLTPYHESSVSNHDKTRIEYADLQGDSCDLQGINWRKMGITRTLARRCRVKTFRNYVNINRSDIWNPGDLDQLLNPVESYYQFRSMDIRRDVRLLHFQLRHILGCASRTRVFYPTEKTIKELDPTSGRQRIAMTFDNYSDSFTSTLAAEEGILIAGSFYGTYHYRHLDVENGPGQQTTGRLTDHPSGITNHVQISPSRYSSVPLAAFASNDCGYRVVDLATNQIISSKIYPWAVNCSSLSPDKRLRVMVGDTQDVIISDAENGQVLQTLDGHKDFGFACAWSPDGWTVATGNQDRSIRIWDARKWKNSRGESQHLEILRTEMTGVRSLRFSPLGSGKPFLAAAEEADFINIIDAETFKAKQTIGIFGELAGISFASDGEELIGLSSDPDRGGILSLERCGPRFGKDSDDYPLWNPQERRRQAAMKEDWFF

SEQ ID NO: 8777 - DNA, 3666 bp, Muscodor strobelii
  misc_feature: SGI cDNA ID NO. 562717
  misc_feature: Reduced expression when VOC is produced
  misc_feature: Encodes the peptide sequence at SEQ ID NO 8778
atgtctcttcctgagaggcccggggccgcgagccccccctacgagcagcgtaacgcctaccgccagtccccccagcgccgcagccgccctcacgatgtcgagacgggcgcctactacccgatgcccagccgcccctcggcccaacatcaccgtgtgccatcaggtcaatcttttcccgagacgatccgcagtcctgatatcatggcagataaccagccgctctctccgactcccgaccacccgcgcaacgaccaaggcatccccgcccgcaaacggagtctgatccgaccggaacgaaacaggatagacaaagatcatcccaactaccactatcgaaagcatgccgcccagatggacaccataccttcgtccacgggcaacaaccccatccctgaggatctggagagcggcggcaagagatcgggggagcggagcatgggcgcaacctcagacagttcaccgccccgtaaacacggcgaggccaccgagaagtccaggtcaaaagcgcaggacggccgacgacgacggtccggcagccacaaaatctcaaagagatccaaggattcgaaacgctccaagcccaaggaagtcatccgtccgcccagcgtttggaatgtctactgcgccatcgtcacattctggtgtcccgattttattctgagctgttttggcttccgctcgaaagcccagcggagagcgtggcgtgaaaagatgggcttgatcagcatcatcatatatctcatggccattgttggtttcttgacgtttggtttcaccgcgacggtttgcgaatccacctctgttcgtctacacgccaacaacgtgggtcctggatacatgatcttccatggcaaagcctacgacttgaccggctcctctcatccgcccgcggacggcatcccactcagagcagacgacacctatcccaacgtcctttgggatatccctggcatgaacaaccaaggcaaagacgggagtttcctgttccagagcgtcaatgggaagtgcaagggtctcatcacccgcactgccgattctgagattcccaccaacagcgacggcgacttgggttggtactttccctgcaccacttttgaccaggatggttcgtccaaggccaacttcacttggccttattataccggatacgcctgccatactactcagctaggccgggataaattttatatgagtttgaagagcacaggcgacgtattctatacctggggtgatgtggcgaacagcagtcgcaacctcgctgtctattctggctctgtcctcgatctggacctcttgagctggttcaatgaagacgatgtgatcattccagaccgtttcaaagagttgagagatacttccacagctgccaatgctgcggtacgcgggctcgacgtcacccgtcttttctcaagccaggaagacaagcaaatggcagaatgtctcgagcagatcatcaaagtcggaagcgtagacaccgagaccgtcgggtgcattgcatccaaggtagttctctacctgtccttggtgctcattttgtctgtcgttgcagcccgtttcggtttagctctcatcttccaatggttcatcagtcgcaagtacgccgccacaaagacatcacagaccggcgacaagaagaagaggcaaaagcaaatcgaggattggagcaacgatatctatcgtgctccggtccggatgcccggagatataggtagcagtgttggaggctctgatagaatgagcaagcgaactagcaccttcttgcccaccacctcgcgtttttctgccgtgtatggtagtgacagaactagtcgacgtttcgaaccgacgacgatgggaagtcaggctgcatcaggtcctctactccacccaggctcaatgtacaagcaaggcaacgatagcagggccagcatgctacagtccaccacatacggtcattcctctagccctatggatgtctacggtcccgctggtttcatacacgaggccgtcgtcccccagccaccctctgactatcaaccgttcgggttccctttgatccactcgatctgcttggtcactgcgtactcagaaggcgagctcggtttgcgaacgacaatcgactccatcgccatgacagactatcccaatagtcacaaggtgattctcgttatttgcgacggtcttatcaaaggtaaaggagaagctatgtcaacaccggatatctgtctcagcatgatgaaggaccacaccgttgctcccagtgaggtcgaagccttctcttacgtggctgtagcgagcggcgcaaaacgtcacaacatggccaaagtctatgctggtttctacgattacggcgctaagtctgccataccggttgagaaacaacagagagtaccaatgatgcttgtcgtcaagtgcggaacgccggacgagtctacggctaccaaacctggaaaccgaggaaagcgcgacagtcagatcattttaatgtccttcctccagaaagtcatgttcgacgagcgcatgtctgagctcgagttcgagatgtttaatggtctctggaaagttactggcatttcacccgattattacgaagctgttctcatggttgatgccgacaccaaggtctatcccgatagtcttacgcatatgctttgcgctctggtccgcgatccggatatcatgggcttgtgtggcgagacgaagatcgccaacaaaagacaaagctgggttaccgccattcaagtcttcgagtatttcatctcccatcatttgtccaaatccttcgagtcagtttttggtggtgtgacttgtcttcctggctgtttctgcatgtaccgtatcaaagcgccgaagggtgctcagaacttctgggttcccattttggccaatcccgatatcgtggagcactattccgagaatgtcgtcgagactcttcacgagaagaacttgctacttctgggcgaggatcgttatcttacaacactcatgctcaggacgttccccaagcgcaaacaagtgtttgtgcctcaagccgtctgcaaaacgacagtcccagatgagttcatggttcttctttcgcaacgtcgaagatggatcaactctacggttcataacctgatggagttggtcttggtcaaggatctctgtggtaccttctgcttcagtatgcagtttgtagttggtattgaactgattggcacgctggtattacctgcagctattgctttcactctctacgtcattatcatctctatcgtcgggcccactgttgaggtcatccctctcgtccttttggcgttgattctcggtctaccgggcgctctcattataattactgcgcattcctggtcctacgtactatggatgttcatttatctcatttccctccccatttggaactttgttcttcccacatacgccttctggaaatttgacgacttctcatggggtgacactcggaagacggcaggcgagaagacgaagaaagctggccttgaatatgagggcgaattcgatagcagcaagatcactatgcgcagatgggctgagttcgaaagggaacgccgaacgcgagacaacttctggggctcacgagagagcgttgttggcggtggccacatgggtggtggacataatgccggcacatggtctggtggtccatcgactcagtcctactctgatatctga

SEQ ID NO: 8778 - protein, 1221 aa, Muscodor strobelii
  misc_feature: SGI Peptide ID NO. 562717
  misc_feature (655)..(1198): Pfam Id: PF03142 Pfam Desc: Chitin synthase
  misc_feature (406)..(491): Pfam Id: PF00173 Pfam Desc: Cytochrome b5-like Heme/Steroid binding domain
  misc_feature (1)..(1208): NCBI GI: 164423007 Blast Desc: chitin synthase 4 [Neurospora crassa OR74A] gi|166203133|sp|Q01285.3|CHS4_NEUCR RecName: Full=Chitin synthase 4; AltName: Full=Chitin-UDP acetyl-glucosaminyl transferase 4; 4
  misc_feature (1)..(1194): NCBI GI: 256734340 Blast Desc: glycosyltransferase family 2 [Nectria haematococca mpVI 77-13-4]
  misc_feature (44)..(1208): NCBI GI: 793938 Blast Desc: chitin synthase [Neurospora crassa]
  misc_feature (1)..(1216): NCBI GI: 46108780 Blast Desc: FG01272.1 [Gibberella zeae PH-1]
  misc_feature (1)..(1213): NCBI GI: 145605301 Blast Desc: chitin synthase 4 [Magnaporthe grisea 70-15] gi|148887356|sp|O13353.2|CHS4_MAGGR RecName: Full=Chitin synthase 4; AltName: Full=Chitin-UDP acetyl-glucosaminyl transferase 4; 4
  misc_feature (1)..(1191): NCBI GI: 2443816 Blast Desc: Class IV chitin synthase [Magnaporthe grisea]
  misc_feature (73)..(1195): NCBI GI: 262069074 Blast Desc: chitin synthase 4 [Gibberella moniliformis]
  misc_feature (16)..(1186): NCBI GI: 154290712 Blast Desc: BC1G_15275 [Botryotinia fuckeliana B05.10] gi|150847431|gb|EDN22624.1| BC1G_15275 [Botryotinia fuckeliana B05.10]
  misc_feature (16)..(1186): NCBI GI: 20260814 Blast Desc: AF215732_1 class IV chitin synthase [Botryotinia fuckeliana]
  misc_feature (1)..(1186): NCBI GI: 156057065 Blast Desc: SS1G_04263 [Sclerotinia sclerotiorum 1980] gi|154702049|gb|EDO01788.1| SS1G_04263 [Sclerotinia sclerotiorum 1980]
  misc_feature (1)..(1195): SWISSPROT Homolog: EC 2.4.1.16 Chitin synthase
  misc_feature: Useful for introducing or modulating the production of volatile compounds
MSLPERPGAASPPYEQRNAYRQSPQRRSRPHDVETGAYYPMPSRPSAQHHRVPSGQSFPETIRSPDIMADNQPLSPTPDHPRNDQGIPARKRSLIRPERNRIDKDHPNYHYRKHAAQMDTIPSSTGNNPIPEDLESGGKRSGERSMGATSDSSPPRKHGEATEKSRSKAQDGRRRRSGSHKISKRSKDSKRSKPKEVIRPPSVWNVYCAIVTFWCPDFILSCFGFRSKAQRRAWREKMGLISIIIYLMAIVGFLTFGFTATVCESTSVRLHANNVGPGYMIFHGKAYDLTGSSHPPADGIPLRADDTYPNVLWDIPGMNNQGKDGSFLFQSVNGKCKGLITRTADSEIPTNSDGDLGWYFPCTTFDQDGSSKANFTWPYYTGYACHTTQLGRDKFYMSLKSTGDVFYTWGDVANSSRNLAVYSGSVLDLDLLSWFNEDDVIIPDRFKELRDTSTAANAAVRGLDVTRLFSSQEDKQMAECLEQIIKVGSVDTETVGCIASKVVLYLSLVLILSVVAARFGLALIFQWFISRKYAATKTSQTGDKKKRQKQIEDWSNDIYRAPVRMPGDIGSSVGGSDRMSKRTSTFLPTTSRFSAVYGSDRTSRRFEPTTMGSQAASGPLLHPGSMYKQGNDSRASMLQSTTYGHSSSPMDVYGPAGFIHEAVVPQPPSDYQPFGFPLIHSICLVTAYSEGELGLRTTIDSIAMTDYPNSHKVILVICDGLIKGKGEAMSTPDICLSMMKDHTVAPSEVEAFSYVAVASGAKRHNMAKVYAGFYDYGAKSAIPVEKQQRVPMMLVVKCGTPDESTATKPGNRGKRDSQIILMSFLQKVMFDERMSELEFEMFNGLWKVTGISPDYYEAVLMVDADTKVYPDSLTHMLCALVRDPDIMGLCGETKIANKRQSWVTAIQVFEYFISHHLSKSFESVFGGVTCLPGCFCMYRIKAPKGAQNFWVPILANPDIVEHYSENVVETLHEKNLLLLGEDRYLTTLMLRTFPKRKQVFVPQAVCKTTVPDEFMVLLSQRRRWINSTVHNLMELVLVKDLCGTFCFSMQFVVGIELIGTLVLPAAIAFTLYVIIISIVGPTVEVIPLVLLALILGLPGALIIITAHSWSYVLWMFIYLISLPIWNFVLPTYAFWKFDDFSWGDTRKTAGEKTKKAGLEYEGEFDSSKITMRRWAEFERERRTRDNFWGSRESVVGGGHMGGGHNAGTWSGGPSTQSYSDI

SEQ ID NO: 8779 - DNA, 4699 bp, Muscodor strobelii
  misc_feature: SGI EST ID NO. CUFF.21155.0
  misc_feature: Variant of the nucleotide sequence at SEQ ID NO 8777
aaaagacgagagaaacaccaggggcagcagataccgcaggaacaggtcacaatacgcgagacagcgtcggtatttggcggggtgcaccacacagcggcgacggtgacacgaccttggcggcttgtacacggcgcaagtcgccaagcaatccacaggctcagaggctgcatccaccagctacccgctcccaacacgggaaaacaccatctgcgcctgcaggggtctcccctttccctcgctggccctcgacttccttccctgttgccctccacaacaagacgtgcaagtcccagctcagcgcccattgtgctttgttgtggccagttgcattggttggtcaatcctctctcaggtacagtactgtacgtgccttgtgtgcactctgcaacaaacagcataccacgcagcacaactaccctgcgctgcacgcatattatcatacaacatcatcttgttgacgtccttgctggccaactcgacctgaccagcaacacttcgcagcgccagctcgtcgtgcccacgcatccacacgcatccacacgcagaccctttcacgaaacagacagcgttgtttgccaatgtcaaactcggcactctagaagaagccgccctccgtgtttgtgctccccgtgcaactgtcacgtcgtcaccggtggtgataccatcgccagccctagataacgcgcgcctccttgctgactcctcggccgatcgtgcagtgtcatgtctcttcctgagaggcccggggccgcgagccccccctacgagcagcgtaacgcctaccgccagtccccccagcgccgcagccgccctcacgatgtcgagacgggcgcctactacccgatgcccagccgcccctcggcccaacatcaccgtgtgccatcaggtcaatcttttcccgagacgatccgcagtcctgatatcatggcagataaccagccgctctctccgactcccgaccacccgcgcaacgaccaaggcatccccgcccgcaaacggagtctgatccgaccggaacgaaacaggatagacaaagatcatcccaactaccactatcgaaagcatgccgcccagatggacaccataccttcgtccacgggcaacaaccccatccctgaggatctggagagcggcggcaagagatcgggggagcggagcatgggcgcaacctcagacagttcaccgccccgtaaacacggcgaggccaccgagaagtccaggtcaaaagcgcaggacggccgacgacgacggtccggcagccacaaaatctcaaagagatccaaggattcgaaacgctccaagcccaaggaagtcatccgtccgcccagcgtttggaatgtctactgcgccatcgtcacattctggtgtcccgattttattctgagctgttttggcttccgctcgaaagcccagcggagagcgtggcgtgaaaagatgggcttgatcagcatcatcatatatctcatggccattgttggtttcttgacgtttggtttcaccgcgacggtttgcgaatccacctctgttcgtctacacgccaacaacgtgggtcctggatacatgatcttccatggcaaagcctacgacttgaccggctcctctcatccgcccgcggacggcatcccactcagagcagacgacacctatcccaacgtcctttgggatatccctggcatgaacaaccaaggcaaagacgggagtttcctgttccagagcgtcaatgggaagtgcaagggtctcatcacccgcactgccgattctgagattcccaccaacagcgacggcgacttgggttggtactttccctgcaccacttttgaccaggatggttcgtccaaggccaacttcacttggccttattataccggatacgcctgccatactactcagctaggccgggataaattttatatgagtttgaagagcacaggcgacgtattctatacctggggtgatgtggcgaacagcagtcgcaacctcgctgtctattctggctctgtcctcgatctggacctcttgagctggttcaatgaagacgatgtgatcattccagaccgtttcaaagagttgagagatacttccacagctgccaatgctgcggtacgcgggctcgacgtcacccgtcttttctcaagccaggaagacaagcaaatggcagaatgtctcgagcagatcatcaaagtcggaagcgtagacaccgagaccgtcgggtgcattgcatccaaggtagttctctacctgtccttggtgctcattttgtctgtcgttgcagcccgtttcggtttagctctcatcttccaatggttcatcagtcgcaagtacgccgccacaaagacatcacagaccggcgacaagaagaagaggcaaaagcaaatcgaggattggagcaacgatatctatcgtgctccggtccggatgcccggagatataggtagcagtgttggaggctctgatagaatgagcaagcgaactagcaccttcttgcccaccacctcgcgtttttctgccgtgtatggtagtgacagaactagtcgacgtttcgaaccgacgacgatgggaagtcaggctgcatcaggtcctctactccacccaggctcaatgtacaagcaaggcaacgatagcagggccagcatgctacagtccaccacatacggtcattcctctagccctatggatgtctacggtcccgctggtttcatacacgaggccgtcgtcccccagccaccctctgactatcaaccgttcgggttccctttgatccactcgatctgcttggtcactgcgtactcagaaggcgagctcggtttgcgaacgacaatcgactccatcgccatgacagactatcccaatagtcacaaggtgattctcgttatttgcgacggtcttatcaaaggtaaaggagaagctatgtcaacaccggatatctgtctcagcatgatgaaggaccacaccgttgctcccagtgaggtcgaagccttctcttacgtggctgtagcgagcggcgcaaaacgtcacaacatggccaaagtctatgctggtttctacgattacggcgctaagtctgccataccggttgagaaacaacagagagtaccaatgatgcttgtcgtcaagtgcggaacgccggacgagtctacggctaccaaacctggaaaccgaggaaagcgcgacagtcagatcattttaatgtccttcctccagaaagtcatgttcgacgagcgcatgtctgagctcgagttcgagatgtttaatggtctctggaaagttactggcatttcacccgattattacgaagctgttctcatggttgatgccgacaccaaggtctatcccgatagtcttacgcatatgctttgcgctctggtccgcgatccggatatcatgggcttgtgtggcgagacgaagatcgccaacaaaagacaaagctgggttaccgccattcaagtcttcgagtatttcatctcccatcatttgtccaaatccttcgagtcagtttttggtggtgtgacttgtcttcctggctgtttctgcatgtaccgtatcaaagcgccgaagggtgctcagaacttctgggttcccattttggccaatcccgatatcgtggagcactattccgagaatgtcgtcgagactcttcacgagaagaacttgctacttctgggcgaggatcgttatcttacaacactcatgctcaggacgttccccaagcgcaaacaagtgtttgtgcctcaagccgtctgcaaaacgacagtcccagatgagttcatggttcttctttcgcaacgtcgaagatggatcaactctacggttcataacctgatggagttggtcttggtcaaggatctctgtggtaccttctgcttcagtatgcagtttgtagttggtattgaactgattggcacgctggtattacctgcagctattgctttcactctctacgtcattatcatctctatcgtcgggcccactgttgaggtcatccctctcgtccttttggcgttgattctcggtctaccgggcgctctcattataattactgcgcattcctggtcctacgtactatggatgttcatttatctcatttccctccccatttggaactttgttcttcccacatacgccttctggaaatttgacgacttctcatggggtgacactcggaagacggcaggcgagaagacgaagaaagctggccttgaatatgagggcgaattcgatagcagcaagatcactatgcgcagatgggctgagttcgaaagggaacgccgaacgcgagacaacttctggggctcacgagagagcgttgttggcggtggccacatgggtggtggacataatgccggcacatggtctggtggtccatcgactcagtcctactctgatatctgagattgatgtcattttgtcacaaatctttttgtcgtctcctaattccttaaccaaaagcatcgaggcatatcaacggattggccgccctcactttatcacaattagcgattgcgcctgggcgcgacatgcatagaaggatgccaaatgggcacggaaaccggcgtaagggtgctgttatttcactcttatgtatattgttagaatatattacacgtagcttaattctctgcccgtacaaggtagatctgttattagtaccggacgacttcttatgagcgtgatgctgtgtaccacatgttctgacgagacg

SEQ ID NO: 8780 - DNA, 3735 bp, Muscodor strobelii
  misc_feature: SGI cDNA ID NO. 562718
  misc_feature: Encodes the peptide sequence at SEQ ID NO 8781
atgtctcttcctgagaggcccggggccgcgagccccccctacgagcagcgtaacgcctaccgccagtccccccagcgccgcagccgccctcacgatgtcgagacgggcgcctactacccgatgcccagccgcccctcggcccaacatcaccgtgtgccatcaggtcaatcttttcccgagacgatccgcagtcctgatatcatggcagataaccagccgctctctccgactcccgaccacccgcgcaacgaccaaggcatccccgcccgcaaacggagtctgatccgaccggaacgaaacaggatagacaaagatcatcccaactaccactatcgaaagcatgccgcccagatggacaccataccttcgtccacgggcaacaaccccatccctgaggatctggagagcggcggcaagagatcgggggagcggagcatgggcgcaacctcagacagttcaccgccccgtaaacacggcgaggccaccgagaagtccaggtcaaaagcgcaggacggccgacgacgacggtccggcagccacaaaatctcaaagagatccaaggattcgaaacgctccaagcccaaggaagtcatccgtccgcccagcgtttggaatgtctactgcgccatcgtcacattctggtgtcccgattttattctgagctgttttggcttccgctcgaaagcccagcggagagcgtggcgtgaaaagatgggcttgatcagcatcatcatatatctcatggccattgttggtttcttgacgtttggtttcaccgcgacggtttgcgaatccacctctgttcgtctacacgccaacaacgtgggtcctggatacatgatcttccatggcaaagcctacgacttgaccggctcctctcatccgcccgcggacggcatcccactcagagcagacgacacctatcccaacgtcctttgggatatccctggcatgaacaaccaaggcaaagacgggagtttcctgttccagagcgtcaatgggaagtgcaagggtctcatcacccgcactgccgattctgagattcccaccaacagcgacggcgacttgggttggtactttccctgcaccacttttgaccaggatggttcgtccaaggccaacttcacttggccttattataccggatacgcctgccatactactcagctaggccgggataaattttatatgagtttgaagagcacaggcgacgtattctatacctggggtgatgtggcgaacagcagtcgcaacctcgctgtctattctggctctgtcctcgatctggacctcttgagctggttcaatgaagacgatgtgatcattccagaccgtttcaaagagttgagagatacttccacagctgccaatgctgcggtacgcgggctcgacgtcacccgtcttttctcaagccaggaagacaagcaaatggcagaatgtctcgagcagatcatcaaagtcggaagcgtagacaccgagaccgtcgggtgcattgcatccaaggtagttctctacctgtccttggtgctcattttgtctgtcgttgcagcccgtttcggtttagctctcatcttccaatggttcatcagtcgcaagtacgccgccacaaagacatcacagaccggcgacaagaagaagaggcaaaagcaaatcgaggattggagcaacgatatctatcgtgctccggtccggatgcccggagatataggtagcagtgttggaggctctgatagaatgagcaagcgaactagcaccttcttgcccaccacctcgcgtttttctgccgtgtatggtagtgacagaactagtcgacgtttcgaaccgacgacgatgggaagtcaggctgcatcaggtcctctactccacccaggctcaatgtacaagcaaggcaacgatagcagggccagcatgctacagtccaccacatacggtcattcctctagccctatggatgtctacggtcccgctggtttcatacacgaggccgtcgtcccccagccaccctctgactatcaaccgttcgggttccctttgatccactcgatctgcttggtcactgcgtactcagaaggcgagctcggtttgcgaacgacaatcgactccatcgccatgacagactatcccaatagtcacaaggtgattctcgttatttgcgacggtcttatcaaaggtaaaggagaagctatgtcaacaccggatatctgtctcagcatgatgaaggaccacaccgttgctcccagtgaggtcgaagccttctcttacgtggctgtagcgagcggcgcaaaacgtcacaacatggccaaagtctatgctggtttctacgattacggcgctaagtctgccataccggttgagaaacaacagagagtaccaatgatgcttgtcgtcaagtgcggaacgccggacgagtctacggctaccaaacctggaaaccgaggaaagcgcgacagtcagatcattttaatgtccttcctccagaaagtcatgttcgacgagcgcatgtctgagctcgagttcgagatgtttaatggtctctggaaagttactggcatttcacccgattattacgaagctgttctcatggttgatgccgacaccaaggtctatcccgatagtcttacgcatatgctttgcgctctggtccgcgatccggatatcatgggcttgtgtggcgagacgaagatcgccaacaaaagacaaagctgggttaccgccattcaagtcttcgagtatttcatctcccatcatttgtccaaatccttcgagtcagtttttggtggtgtgacttgtcttcctggctgtttctgcatgtaccgtatcaaagcgccgaagggtgctcagaacttctgggttcccattttggccaatcccgatatcgtggagcactattccgagaatgtcgtcgagactcttcacgagaagaacttgctacttctgggcgaggatcgttatcttacaacactcatgctcaggacgttccccaagcgcaaacaagtgtttgtgcctcaagccgtctgcaaaacgacagtcccagatgagttcatggttcttctttcgcaacgtcgaagatggatcaactctacggttcataacctgatggagttggtcttggtcaaggatctctgtggtaccttctgcttcagtatgcagtttgtagttggtattgaactgattggcacgctggtattacctgcagctattgctttcactctctacgtcagtaagtttatccaataccccacgccatggtcgctcttgtgctttcctcgttacttaccacaccgcccagttatcatctctatcgtcgggcccactgttgaggtcatccctctcgtccttttggcgttgattctcggtctaccgggcgctctcattataattactgcgcattcctggtcctacgtactatggatgttcatttatctcatttccctccccatttggaactttgttcttcccacatacgccttctggaaatttgacgacttctcatggggtgacactcggaagacggcaggcgagaagacgaagaaagctggccttgaatatgagggcgaattcgatagcagcaagatcactatgcgcagatgggctgagttcgaaagggaacgccgaacgcgagacaacttctggggctcacgagagagcgttgttggcggtggccacatgggtggtggacataatgccggcacatggtctggtggtccatcgactcagtcctactctgatatctga

SEQ ID NO: 8781 - protein, 1244 aa, Muscodor strobelii
  misc_feature: SGI Peptide ID NO. 562718
  misc_feature (655)..(1221): Pfam Id: PF03142 Pfam Desc: Chitin synthase
  misc_feature (406)..(491): Pfam Id: PF00173 Pfam Desc: Cytochrome b5-like Heme/Steroid binding domain
  misc_feature (655)..(1082): Pfam Id: PF03142 Pfam Desc: Chitin synthase
  misc_feature (1097)..(1221): Pfam Id: PF03142 Pfam Desc: Chitin synthase
  misc_feature (1)..(1228): NCBI GI: 261357444 Blast Desc: chitin synthase [Verticillium albo-atrum VaMs.102]
  misc_feature (1)..(1244): NCBI GI: 171687925 Blast Desc: protein product [Podospora anserina] gi|170943924|emb|CAP69576.1| protein product [Podospora anserina]
  misc_feature (1)..(1231): NCBI GI: 164423007 Blast Desc: chitin synthase 4 [Neurospora crassa OR74A] gi|166203133|sp|Q01285.3|CHS4_NEUCR RecName: Full=Chitin synthase 4; AltName: Full=Chitin-UDP acetyl-glucosaminyl transferase 4; 4
  misc_feature (1)..(1217): NCBI GI: 256734340 Blast Desc: glycosyltransferase family 2 [Nectria haematococca mpVI 77-13-4]
  misc_feature (44)..(1231): NCBI GI: 793938 Blast Desc: chitin synthase [Neurospora crassa]
  misc_feature (1)..(1239): NCBI GI: 46108780 Blast Desc: FG01272.1 [Gibberella zeae PH-1]
  misc_feature (1)..(1236): NCBI GI: 145605301 Blast Desc: chitin synthase 4 [Magnaporthe grisea 70-15] gi|148887356|sp|O13353.2|CHS4_MAGGR RecName: Full=Chitin synthase 4; AltName: Full=Chitin-UDP acetyl-glucosaminyl transferase 4; 4
  misc_feature (1)..(1214): NCBI GI: 2443816 Blast Desc: Class IV chitin synthase [Magnaporthe grisea]
  misc_feature (73)..(1218): NCBI GI: 262069074 Blast Desc: chitin synthase 4 [Gibberella moniliformis]
  misc_feature (16)..(1209): NCBI GI: 154290712 Blast Desc: BC1G_15275 [Botryotinia fuckeliana B05.10] gi|150847431|gb|EDN22624.1| BC1G_15275 [Botryotinia fuckeliana B05.10]
  misc_feature (1)..(1218): SWISSPROT Homolog: EC 2.4.1.16 Chitin synthase
MSLPERPGAASPPYEQRNAYRQSPQRRSRPHDVETGAYYPMPSRPSAQHHRVPSGQSFPETIRSPDIMADNQPLSPTPDHPRNDQGIPARKRSLIRPERNRIDKDHPNYHYRKHAAQMDTIPSSTGNNPIPEDLESGGKRSGERSMGATSDSSPPRKHGEATEKSRSKAQDGRRRRSGSHKISKRSKDSKRSKPKEVIRPPSVWNVYCAIVTFWCPDFILSCFGFRSKAQRRAWREKMGLISIIIYLMAIVGFLTFGFTATVCESTSVRLHANNVGPGYMIFHGKAYDLTGSSHPPADGIPLRADDTYPNVLWDIPGMNNQGKDGSFLFQSVNGKCKGLITRTADSEIPTNSDGDLGWYFPCTTFDQDGSSKANFTWPYYTGYACHTTQLGRDKFYMSLKSTGDVFYTWGDVANSSRNLAVYSGSVLDLDLLSWFNEDDVIIPDRFKELRDTSTAANAAVRGLDVTRLFSSQEDKQMAECLEQIIKVGSVDTETVGCIASKVVLYLSLVLILSVVAARFGLALIFQWFISRKYAATKTSQTGDKKKRQKQIEDWSNDIYRAPVRMPGDIGSSVGGSDRMSKRTSTFLPTTSRFSAVYGSDRTSRRFEPTTMGSQAASGPLLHPGSMYKQGNDSRASMLQSTTYGHSSSPMDVYGPAGFIHEAVVPQPPSDYQPFGFPLIHSICLVTAYSEGELGLRTTIDSIAMTDYPNSHKVILVICDGLIKGKGEAMSTPDICLSMMKDHTVAPSEVEAFSYVAVASGAKRHNMAKVYAGFYDYGAKSAIPVEKQQRVPMMLVVKCGTPDESTATKPGNRGKRDSQIILMSFLQKVMFDERMSELEFEMFNGLWKVTGISPDYYEAVLMVDADTKVYPDSLTHMLCALVRDPDIMGLCGETKIANKRQSWVTAIQVFEYFISHHLSKSFESVFGGVTCLPGCFCMYRIKAPKGAQNFWVPILANPDIVEHYSENVVETLHEKNLLLLGEDRYLTTLMLRTFPKRKQVFVPQAVCKTTVPDEFMVLLSQRRRWINSTVHNLMELVLVKDLCGTFCFSMQFVVGIELIGTLVLPAAIAFTLYVSKFIQYPTPWSLLCFPRYLPHRPVIISIVGPTVEVIPLVLLALILGLPGALIIITAHSWSYVLWMFIYLISLPIWNFVLPTYAFWKFDDFSWGDTRKTAGEKTKKAGLEYEGEFDSSKITMRRWAEFERERRTRDNFWGSRESVVGGGHMGGGHNAGTWSGGPSTQSYSDI

SEQ ID NO: 8782 - DNA, 4699 bp, Muscodor strobelii; identical to SEQ ID NO: 8779
  misc_feature: SGI EST ID NO. CUFF.21155.0
  misc_feature: Variant of the nucleotide sequence at SEQ ID NO 8780

SEQ ID NO: 8783 - DNA, 2277 bp, Muscodor strobelii
  misc_feature: SGI cDNA ID NO. 562719
  misc_feature: Reduced expression when VOC is produced
  misc_feature: Encodes the peptide sequence at SEQ ID NO 8784
atggccactcttgccacgacgccacctcccgtagcgccctcgtctcccccaagctcggtgcagcggaaacctttgccgctgtcgaaacgctcatccgattcatattcgcagggtgagcttcagcatcgtggccatcataatctgcaagatgcgctatcagccgcaccgctcgacgtgaaagcttcgcctccgagaacggatcttctacccgaaacctgggctcaccctgcgaagtccaatttcggcgatgaattctttgaaacgcctgcgcaaacagattatacgcccggtcaggaccgcgagctacccaaatcgccgctcgcgcccccgccaccaccgcacagtccgaattatacccaagtcaagcaccagcaactatctcctcctaagcagcgaagcttagacaagccgttaccctcgaccttcgccgttgatctcccccacaggacaggacaggaaaaggcgctgagcccgagcatcctccaaatgagtgttgggcagtcctatggtgatgtttccgccgcctcggagcaaggcgaccgaagcacccgggagactagccccgagcatggcttgaatcgccagagccgagagtcagatacgaccattagcacccgacagccgacgtcgacagactcatcggtcgagacgagtgtgagttccgtctcgggagggcctaatgaagacgtgggatctcagaaagaatccttggttgaagagacaatacccgaagagccttcggttccacagttgcaataccaccatcagcctagggtcgccagcgtgcccctagagatggtctcccacggttcgtcccggacagatcttaccgaacagggccttgccatcaaccgtcacctaacacctaattcgttttacgtgaggaggagctcgatgccccggcccgcttcgtcgtactcactgtactctgaatccggtcgaggacgatcgcctgggttaggcggctctcaatcccgcagatcgcctgataaccgggcgtctacctatgcggacctattaaacgtcccatatcctcagcctgccccggcccctatcacgttcgataactcccaattgcgcaacaatgtgggaagtaacgcctccctcctgagcactcaaaagacacttgaaatgtatagacaaaatgtgaaaaagacaaatgacttcaacattcaatactcgtttgcagtttttcttatctctacagcccaagaacaaggtcttgactacgccgaaccttcgcgggcaaaggttaattcaaaacacgacgcacggaaggatgcagtggagtcatcgccaaccgagttagtccgagaggctaaaagtatcttgacgcggttggcaaacggtggttatccttttgcgcaatactatctggctgacggctttgcatctggtctgttcaataaaggcaaggaggattacaacgccgcgttcccgctttttgttctcgccgcaaagcacggtcacgccgaatcagccttccgagcaggtctgtgctatgaattcggatggggctgtaggaaagaccctgccaaagcagttcagtatttgaggaccgctgcatcaaaaaaccatcctggcgcgatgacgagacttggaaaagcatgcctatctggcgacttgggcgagaatcggtatcgagagggcctgaaatggctcaagagggctacagaatctgccgataccatgtataatgcagctccttatcacctcggagtgctgtatgagacgggttacggcgatgacattttcaaggacgagggctacgcagccgaactcttcacccaggccgctgaacttggccatgccgaagcgagttatcgcatgggagatgcttacgaacatggaaagttaggatgccctcgagacccagccctcagtgttcatttctacacgggtgcggctgatggcggacacccagctgctatgatgggcctatgcgcttggtacatggtgggagcagaccctattctcgagaaagacgaggaagaagcctacgagtgggcacgtcggtctgccgaacttggttttatcaaggcggcctatgcagtcggatatttcactgagatggggatagggtgccgtcgtgatatcctagaggccaacgtctggtacgtcaaagcagcggatgctggagacgaacgtgcgaagcagagactggaggccattcgcctggccgtcagtggcggcacaccgatggaagttgcgccaccgcgaaatgcgaagatgaggaaaagtcacggcaaggaagataaggagtgcgttgttatgtga

SEQ ID NO: 8784 - protein, 758 aa, Muscodor strobelii
  misc_feature: SGI Peptide ID NO. 562719
  misc_feature (491)..(526): Pfam Id: PF08238 Pfam Desc: Sel1 repeat
  misc_feature (604)..(640): Pfam Id: PF08238 Pfam Desc: Sel1 repeat
  misc_feature (679)..(714): Pfam Id: PF08238 Pfam Desc: Sel1 repeat
  misc_feature (641)..(678): Pfam Id: PF08238 Pfam Desc: Sel1 repeat
  misc_feature (566)..(603): Pfam Id: PF08238 Pfam Desc: Sel1 repeat
  misc_feature (453)..(490): Pfam Id: PF08238 Pfam Desc: Sel1 repeat
  misc_feature (527)..(562): Pfam Id: PF08238 Pfam Desc: Sel1 repeat
  misc_feature (62)..(758): NCBI GI: 116180314 Blast Desc: CHGG_00785 [Chaetomium globosum CBS 148.51] gi|88185082|gb|EAQ92550.1| CHGG_00785 [Chaetomium globosum CBS 148.51]
  misc_feature (175)..(758): NCBI GI: 85111625 Blast Desc: NCU09322 [Neurospora crassa OR74A] gi|28925785|gb|EAA34790.1| NCU09322 [Neurospora crassa OR74A]
  misc_feature (1)..(758): NCBI GI: 145605297 Blast Desc: MGG_10646 [Magnaporthe grisea 70-15] gi|145013127|gb|EDJ97768.1| MGG_10646 [Magnaporthe grisea 70-15]
  misc_feature (194)..(758): NCBI GI: 256735046 Blast Desc: [Nectria haematococca mpVI 77-13-4]
  misc_feature (194)..(758): NCBI GI: 46108782 Blast Desc: FG01273.1 [Gibberella zeae PH-1]
  misc_feature (182)..(758): NCBI GI: 171687923 Blast Desc: protein product [Podospora anserina] gi|170943923|emb|CAP69575.1| protein product [Podospora anserina]
  misc_feature (193)..(758): NCBI GI: 261357443 Blast Desc: SKT5 [Verticillium albo-atrum VaMs.102]
  misc_feature (251)..(757): NCBI GI: 70983672 Blast Desc: chitin synthase activator (Chs3) [Aspergillus fumigatus Af293] gi|66844989|gb|EAL85325.1| chitin synthase activator (Chs3), [Aspergillus fumigatus Af293] chitin synthase
  misc_feature (232)..(757): NCBI GI: 119484652 Blast Desc: chitin synthase activator (Chs3), [Neosartorya fischeri NRRL 181] gi|119410261|gb|EAW20208.1| chitin synthase activator (Chs3), [Neosartorya fischeri NRRL 181]
  misc_feature (378)..(758): NCBI GI: 156057061 Blast Desc: SS1G_04261 [Sclerotinia sclerotiorum 1980] gi|154702047|gb|EDO01786.1| SS1G_04261 [Sclerotinia sclerotiorum 1980]
  misc_feature: Useful for introducing or modulating the production of volatile compounds
MATLATTPPPVAPSSPPSSVQRKPLPLSKRSSDSYSQGELQHRGHHNLQDALSAAPLDVKASPPRTDLLPETWAHPAKSNFGDEFFETPAQTDYTPGQDRELPKSPLAPPPPPHSPNYTQVKHQQLSPPKQRSLDKPLPSTFAVDLPHRTGQEKALSPSILQMSVGQSYGDVSAASEQGDRSTRETSPEHGLNRQSRESDTTISTRQPTSTDSSVETSVSSVSGGPNEDVGSQKESLVEETIPEEPSVPQLQYHHQPRVASVPLEMVSHGSSRTDLTEQGLAINRHLTPNSFYVRRSSMPRPASSYSLYSESGRGRSPGLGGSQSRRSPDNRASTYADLLNVPYPQPAPAPITFDNSQLRNNVGSNASLLSTQKTLEMYRQNVKKTNDFNIQYSFAVFLISTAQEQGLDYAEPSRAKVNSKHDARKDAVESSPTELVREAKSILTRLANGGYPFAQYYLADGFASGLFNKGKEDYNAAFPLFVLAAKHGHAESAFRAGLCYEFGWGCRKDPAKAVQYLRTAASKNHPGAMTRLGKACLSGDLGENRYREGLKWLKRATESADTMYNAAPYHLGVLYETGYGDDIFKDEGYAAELFTQAAELGHAEASYRMGDAYEHGKLGCPRDPALSVHFYTGAADGGHPAAMMGLCAWYMVGADPILEKDEEEAYEWARRSAELGFIKAAYAVGYFTEMGIGCRRDILEANVWYVKAADAGDERAKQRLEAIRLAVSGGTPMEVAPPRNAKMRKSHGKEDKECVVM

SEQ ID NO: 8785 - DNA, 3427 bp, Muscodor strobelii
  misc_feature: SGI EST ID NO. CUFF.21145.1
  misc_feature: Variant of the nucleotide sequence at SEQ ID NO 8783
gctgcatctcccatcccatgcgtctcgttctgtccaatatccagtgtactgtaaggcccgccaggctgatctcagtgctctgtccgcacctccttgcaagctccatcctcgcatagactcatcatcgccagccgttttctctttgacccagtcgaccattgtccgccatccattcgtccagcgtcatttgcattaccgctttagcttcagtgccaagatacccgccgaatattccggttgtatatccattcttcagcagctagtcgagtagtcctgttaagccgcccgcgccttgcgaaacctcggaccgtccgaccctctgcctgcccttgtgctcgccctcgtgctcgttctctacgcccgcgactttggggttcgtccgacgtctggatattccccgggcctatgtctctgcctgccgtgccagcacaataagatccctttcttccgcgtagcaccacccgtcgcgccgggaattactcctgctacgcgcttgttgtgcagactgcaccatcgtgggacctggctgtgatcgctcacagccatccctgccaaaccatggccactcttgccacgacgccacctcccgtagcgccctcgtctcccccaagctcggtgcagcggaaacctttgccgctgtcgaaacgctcatccgattcatattcgcagggtgagcttcagcatcgtggccatcataatctgcaagatgcgctatcagccgcaccgctcgacgtgaaagcttcgcctccgagaacggatcttctacccgaaacctgggctcaccctgcgaagtccaatttcggcgatgaattctttgaaacgcctgcgcaaacagattatacgcccggtcaggaccgcgagctacccaaatcgccgctcgcgcccccgccaccaccgcacagtccgaattatacccaagtcaagcaccagcaactatctcctcctaagcagcgaagcttagacaagccgttaccctcgaccttcgccgttgatctcccccacaggacaggacaggaaaaggcgctgagcccgagcatcctccaaatgagtgttgggcagtcctatggtgatgtttccgccgcctcggagcaaggcgaccgaagcacccgggagactagccccgagcatggcttgaatcgccagagccgagagtcagatacgaccattagcacccgacagccgacgtcgacagactcatcggtcgagacgagtgtgagttccgtctcgggagggcctaatgaagacgtgggatctcagaaagaatccttggttgaagagacaatacccgaagagccttcggttccacagttgcaataccaccatcagcctagggtcgccagcgtgcccctagagatggtctcccacggttcgtcccggacagatcttaccgaacagggccttgccatcaaccgtcacctaacacctaattcgttttacgtgaggaggagctcgatgccccggcccgcttcgtcgtactcactgtactctgaatccggtcgaggacgatcgcctgggttaggcggctctcaatcccgcagatcgcctgataaccgggcgtctacctatgcggacctattaaacgtcccatatcctcagcctgccccggcccctatcacgttcgataactcccaattgcgcaacaatgtgggaagtaacgcctccctcctgagcactcaaaagacacttgaaatgtatagacaaaatgtgaaaaagacaaatgacttcaacattcaatactcgtttgcagtttttcttatctctacagcccaagaacaaggtcttgactacgccgaaccttcgcgggcaaaggttaattcaaaacacgacgcacggaaggatgcagtggagtcatcgccaaccgagttagtccgagaggctaaaagtatcttgacgcggttggcaaacggtggttatccttttgcgcaatactatctggctgacggctttgcatctggtctgttcaataaaggcaaggaggattacaacgccgcgttcccgctttttgttctcgccgcaaagcacggtcacgccgaatcagccttccgagcaggtctgtgctatgaattcggatggggctgtaggaaagaccctgccaaagcagttcagtatttgaggaccgctgcatcaaaaaaccatcctggcgcgatgacgagacttggaaaagcatgcctatctggcgacttgggcgagaatcggtatcgagagggcctgaaatggctcaagagggctacagaatctgccgataccatgtataatgcagctccttatcacctcggagtgctgtatgagacgggttacggcgatgacattttcaaggacgagggctacgcagccgaactcttcacccaggccgctgaacttggccatgccgaagcgagttatcgcatgggagatgcttacgaacatggaaagttaggatgccctcgagacccagccctcagtgttcatttctacacgggtgcggctgatggcggacacccagctgctatgatgggcctatgcgcttggtacatggtgggagcagaccctattctcgagaaagacgaggaagaagcctacgagtgggcacgtcggtctgccgaacttggttttatcaaggcggcctatgcagtcggatatttcactgagatggggatagggtgccgtcgtgatatcctagaggccaacgtctggtacgtcaaagcagcggatgctggagacgaacgtgcgaagcagagactggaggccattcgcctggccgtcagtggcggcacaccgatggaagttgcgccaccgcgaaatgcgaagatgaggaaaagtcacggcaaggaagataaggagtgcgttgttatgtgagaggatgcctaggatatcgaagtgccacaaattgctctcggaaaagatgactttggatatcatcgatcattggaaaataaagcccaattgtctggcttggacgctagtcattgggttgggtatgtgcgccggtgcacatggtgaagaggcaccaaatggtttcttccggtagagtcttgggtgtcattggatcgattcatttacagtgtcttgccaaaatttcttgcattgcatctacacacgatgcaccagccgttgcatagccaggaactcaagtcagtatcgagtgccaacgatgcttttctgcatacccaataggcgtcgcctctttcggattccctttttttctcttacctaatctaccgagacacgggcgcagaggagagaggcatgataagatttaatgaggtggatatgagaggatggtgtcatggcctcttgcctttaccgaactctcttgtccatttgtacataaaccggcattcatccctgttgccttgttggcccatggccattagaatatatctgaatgggaacaacgggctccggatcacctacctactcataatctatatagatctgtttgtttgtg

SEQ ID NO: 8786 - DNA, 2967 bp, Muscodor strobelii
  misc_feature: SGI cDNA ID NO. 562720
  misc_feature: Encodes the peptide sequence at SEQ ID NO 8787
atggcggatcgactcttggctgcaaagcacggagtctataccgacgctttatccccccgggacgccaacgtccagcgaccaacccgcactgttgagcctgtcaaaccaaaagcagccgtggcggccaaggtagaaaaggagccgccggttcagccgccgcctcaggtccacgagcctccgagtttcgatcgcaagaatggcgctgtgtatcaggtcggaaagatgctgggcaagggtggctttgctgtctgctacgaaggccaattaccggggcagaggaagaagtacgccctcaagattgtcagaagcaagatgccaaccaagatggagcaaaagtttcaaaccgagcttcagatccactccaagatgcggcagcagaatattgtccagtttctgagggccttctctttcgacagctgcacctatctagtgttggagctgtgtccaaacggctccctcatggacatggtcaagcgtaggaaaggcgttaccgaagctgaggtgagattctactccatccagatcgccggcgcaatcaaatacatgcatgcaaaaggcataatccacagagacctgaaaatgggcaatatcttcttggacaagaacatgaatgcaaagattggcgatttcgggctagcggcgttgctagtcacgggtaaagatatgcaaactatccgtcgaacgacgctatgtggaacgcccaactatattgcacctgagatcctggagaaagggaaaaaggggcacgaccacatggtcgatatctggagtctgggaatcataatgttcgccatgttgacatcgaaaccacctttccaatcttcaactacggatgagatctatcgccgggcgagaaaccgagactacgaatggccgacacaaaagtttatatcagaagaagcgaaggatgccgtagcttccatgctcgaagaggcggacagacgaccagagccggatgctattgttcaacacgaatttttcgtttccggctatgtgcctacgcctgccgaaatcacgtcgaagctccgagactgcccccccgatgaggacaaattctatgcagtggatctgacaccgcgcgtaacatcgcaaatcatgcgaaatttgcaggcgttatgtgcggagtgcgaagttggcccttggaaccacagagacctaccatataaaagcacatggaaagaagtcgcgttagaagaaaaagccgggctgacaccaatcatcccactggctgaaggcattgtttatagaccttacgaggaggtcagcaaggagcaagacttgacccagctccctatccgagcgccaccacaaccccttaccaagctggaagaagagacttacccagggtcgtcagctcctacaggtctcttgagagcccccccacagagttttgccgctcaacagcgagctcagaataaacccgccaagtctgccgcaatacctagaacgcagacactaaacgaagtgccaccagcaagcgcaaacggtacagtacggcagcgaaccagacgggagctccctaagagctcaactgagagcaacgctggaaaagccgtggcaataccctcggcagttgcggatctaccacccgttagatccatttctgcatcacaacaaccaacaaacgcagtgacgagaaaggcgtcaattgaatcaaataaattgcagagccaggcaccccagaaggccagtgccgagacgaaactgagctccttgtttggctccaaggaacgagtgctcgctgttcccgatacgaaacctgatctggtcttagaccgacttcgtcgtcttcagttggagcttgaacgtgctctagcctcgaggtcaatggctactctagacgaatcatccacgccttctcctccccatattgtggtgaaatgggtggattattccaacaaatttggcttggggtatattctgaatgatgggagcgtcggctgcgttctcaagagcataccaggcagtgcaaaagggggcaagacggttatgcttccgcctagctgcattctggtccgaggagccgagcaacacttttgtcggcgagaggactcgacttacactgaccgccaccaaatcgtcccgatgacgagcgaagtgcaattctacgagaacaatggcgagcgtggcctctctactctcttcgtagccccttcacaattcaagcttgtattcaatgaggagggaactgcaggaagaatcccagtcggcaacgacatttacgattatcgcaaacgtgaacacctcgtactgtggaagaaattcgccaattacatgatcgcatatggccgtgatcaagacggttccgatgataccgggcgcattcaggtagccgcaaaacccaagcaggcaatgcctcccagtgacgtggtcacattctaccagcggactggagatgtcggatgctggttgtttggcgatggtcacatgcaatttaacttccctgatcacaccaaaatcgtgctcgacgctacgggtacttggtgccatttctggcatctatcccagcagtcagctaccaagctggccacaactggagcactcgatgagactgctttagacgaccgatctgtactgtcatatcctgttcagactctattgaactttgcgaccaagtctgctgttcggccaacacggaatggtagcctaagacggcctgaaattaaccctgcgttgcaaggtattccggcggccaacgattttcgcagaaagatcaagttcatccatggtattgtcaaggagtggaccttgaatgaaggtgttggtaacgcaaaaatggaccgccaaacccgtcaaatgtggcaaggaagccgcgagacggttgtgagcggacctagtaaacatgtctgggtcaccatcggagcacgatggggagactacagatactctgctgtcgtcgatcctaaacatcccggcatactgggcgaggaagtggaatctagatcatcctcgacaacatccacttga

SEQ ID NO: 8787 - protein, 988 aa, Muscodor strobelii
  misc_feature: SGI Peptide ID NO. 562720
  misc_feature (70)..(327): Pfam Id: PF00069 Pfam Desc: Protein kinase domain
  misc_feature (70)..(327): Pfam Id: PF07714 Pfam Desc: Protein tyrosine kinase
  misc_feature (70)..(287): Pfam Id: PF07714 Pfam Desc: Protein tyrosine kinase
  misc_feature (11)..(979): NCBI GI: 171696036 Blast Desc: protein product [Podospora anserina] gi|170948260|emb|CAP60424.1| protein product [Podospora anserina]
  misc_feature (15)..(981): NCBI GI: 116181844 Blast Desc: CHGG_01550 [Chaetomium globosum CBS 148.51] gi|88185847|gb|EAQ93315.1| CHGG_01550 [Chaetomium globosum CBS 148.51]
  misc_feature (1)..(979): NCBI GI: 261357442 Blast Desc: serine/threonine-protein kinase plo1 [Verticillium albo-atrum VaMs.102]
  misc_feature (66)..(979): NCBI GI: 256735047 Blast Desc: [Nectria haematococca mpVI 77-13-4]
  misc_feature (15)..(979): NCBI GI: 85114418 Blast Desc: NCU09258 [Neurospora crassa OR74A] gi|28926484|gb|EAA35457.1| conserved [Neurospora crassa OR74A] gi|38567010|emb|CAE76309.1| related to protein kinase CDC5
  misc_feature (11)..(979): NCBI GI: 145605303 Blast Desc: MGG_09960 [Magnaporthe grisea 70-15] gi|145013131|gb|EDJ97772.1| MGG_09960 [Magnaporthe grisea 70-15]
  misc_feature (61)..(979): NCBI GI: 46108778 Blast Desc: FG01271.1 [Gibberella zeae PH-1]
  misc_feature (15)..(971): NCBI GI: 154323294 Blast Desc: BC1G_00046 [Botryotinia fuckeliana B05.10] gi|150842275|gb|EDN17468.1| BC1G_00046 [Botryotinia fuckeliana B05.10]
  misc_feature (63)..(971): NCBI GI: 156057911 Blast Desc: SS1G_04687 [Sclerotinia sclerotiorum 1980] gi|154702472|gb|EDO02211.1| SS1G_04687 [Sclerotinia sclerotiorum 1980]
  misc_feature (15)..(965): NCBI GI: 70983684 Blast Desc: serine/threonine protein kinase [Aspergillus fumigatus Af293] gi|66844995|gb|EAL85331.1| serine/threonine protein kinase, [Aspergillus fumigatus Af293]
MADRLLAAKHGVYTDALSPRDANVQRPTRTVEPVKPKAAVAAKVEKEPPVQPPPQVHEPPSFDRKNGAVYQVGKMLGKGGFAVCYEGQLPGQRKKYALKIVRSKMPTKMEQKFQTELQIHSKMRQQNIVQFLRAFSFDSCTYLVLELCPNGSLMDMVKRRKGVTEAEVRFYSIQIAGAIKYMHAKGIIHRDLKMGNIFLDKNMNAKIGDFGLAALLVTGKDMQTIRRTTLCGTPNYIAPEILEKGKKGHDHMVDIWSLGIIMFAMLTSKPPFQSSTTDEIYRRARNRDYEWPTQKFISEEAKDAVASMLEEADRRPEPDAIVQHEFFVSGYVPTPAEITSKLRDCPPDEDKFYAVDLTPRVTSQIMRNLQALCAECEVGPWNHRDLPYKSTWKEVALEEKAGLTPIIPLAEGIVYRPYEEVSKEQDLTQLPIRAPPQPLTKLEEETYPGSSAPTGLLRAPPQSFAAQQRAQNKPAKSAAIPRTQTLNEVPPASANGTVRQRTRRELPKSSTESNAGKAVAIPSAVADLPPVRSISASQQPTNAVTRKASIESNKLQSQAPQKASAETKLSSLFGSKERVLAVPDTKPDLVLDRLRRLQLELERALASRSMATLDESSTPSPPHIVVKWVDYSNKFGLGYILNDGSVGCVLKSIPGSAKGGKTVMLPPSCILVRGAEQHFCRREDSTYTDRHQIVPMTSEVQFYENNGERGLSTLFVAPSQFKLVFNEEGTAGRIPVGNDIYDYRKREHLVLWKKFANYMIAYGRDQDGSDDTGRIQVAAKPKQAMPPSDVVTFYQRTGDVGCWLFGDGHMQFNFPDHTKIVLDATGTWCHFWHLSQQSATKLATTGALDETALDDRSVLSYPVQTLLNFATKSAVRPTRNGSLRRPEINPALQGIPAANDFRRKIKFIHGIVKEWTLNEGVGNAKMDRQTRQMWQGSRETVVSGPSKHVWVTIGARWGDYRYSAVVDPKHPGILGEEVESRSSSTTST

SEQ ID NO: 8788 - DNA, 3537 bp, Muscodor strobelii
  misc_feature: SGI EST ID NO. CUFF.21082.1
  misc_feature: Variant of the nucleotide sequence at SEQ ID NO 8786
tcttgatcgccgcctctataacccggttcctttcaattgagctgcttgggccgtgttcaagttgtttttccaaagcgcgtttttgttctaccatcgccgtccatcataccctttcattgcacaactacatgacttgagcattagaagatagtattgcattggtttcctttctggctccgttggtcgctttcgccagagccaggaatttcccagatggcggatcgactcttggctgcaaagcacggagtctataccgacgctttatccccccgggacgccaacgtccagcgaccaacccgcactgttgagcctgtcaaaccaaaagcagccgtggcggccaaggtagaaaaggagccgccggttcagccgccgcctcaggtccacgagcctccgagtttcgatcgcaagaatggcgctgtgtatcaggtcggaaagatgctgggcaagggtggctttgctgtctgctacgaaggccaattaccggggcagaggaagaagtacgccctcaagattgtcagaagcaagatgccaaccaagatggagcaaaagtttcaaaccgagcttcagatccactccaagatgcggcagcagaatattgtccagtttctgagggccttctctttcgacagctgcacctatctagtgttggagctgtgtccaaacggctccctcatggacatggtcaagcgtaggaaaggcgttaccgaagctgaggtgagattctactccatccagatcgccggcgcaatcaaatacatgcatgcaaaaggcataatccacagagacctgaaaatgggcaatatcttcttggacaagaacatgaatgcaaagattggcgatttcgggctagcggcgttgctagtcacgggtaaagatatgcaaactatccgtcgaacgacgctatgtggaacgcccaactatattgcacctgagatcctggagaaagggaaaaaggggcacgaccacatggtcgatatctggagtctgggaatcataatgttcgccatgttgacatcgaaaccacctttccaatcttcaactacggatgagatctatcgccgggcgagaaaccgagactacgaatggccgacacaaaagtttatatcagaagaagcgaaggatgccgtagcttccatgctcgaagaggcggacagacgaccagagccggatgctattgttcaacacgaatttttcgtttccggctatgtgcctacgcctgccgaaatcacgtcgaagctccgagactgcccccccgatgaggacaaattctatgcagtggatctgacaccgcgcgtaacatcgcaaatcatgcgaaatttgcaggcgttatgtgcggagtgcgaagttggcccttggaaccacagagacctaccatataaaagcacatggaaagaagtcgcgttagaagaaaaagccgggctgacaccaatcatcccactggctgaaggcattgtttatagaccttacgaggaggtcagcaaggagcaagacttgacccagctccctatccgagcgccaccacaaccccttaccaagctggaagaagagacttacccagggtcgtcagctcctacaggtctcttgagagcccccccacagagttttgccgctcaacagcgagctcagaataaacccgccaagtctgccgcaatacctagaacgcagacactaaacgaagtgccaccagcaagcgcaaacggtacagtacggcagcgaaccagacgggagctccctaagagctcaactgagagcaacgctggaaaagccgtggcaataccctcggcagttgcggatctaccacccgttagatccatttctgcatcacaacaaccaacaaacgcagtgacgagaaaggcgtcaattgaatcaaataaattgcagagccaggcaccccagaaggccagtgccgagacgaaactgagctccttgtttggctccaaggaacgagtgctcgctgttcccgatacgaaacctgatctggtcttagaccgacttcgtcgtcttcagttggagcttgaacgtgctctagcctcgaggtcaatggctactctagacgaatcatccacgccttctcctccccatattgtggtgaaatgggtggattattccaacaaatttggcttggggtatattctgaatgatgggagcgtcggctgcgttctcaagagcataccaggcagtgcaaaagggggcaagacggttatgcttccgcctagctgcattctggtccgaggagccgagcaacacttttgtcggcgagaggactcgacttacactgaccgccaccaaatcgtcccgatgacgagcgaagtgcaattctacgagaacaatggcgagcgtggcctctctactctcttcgtagccccttcacaattcaagcttgtattcaatgaggagggaactgcaggaagaatcccagtcggcaacgacatttacgattatcgcaaacgtgaacacctcgtactgtggaagaaattcgccaattacatgatcgcatatggccgtgatcaagacggttccgatgataccgggcgcattcaggtagccgcaaaacccaagcaggcaatgcctcccagtgacgtggtcacattctaccagcggactggagatgtcggatgctggttgtttggcgatggtcacatgcaatttaacttccctgatcacaccaaaatcgtgctcgacgctacgggtacttggtgccatttctggcatctatcccagcagtcagctaccaagctggccacaactggagcactcgatgagactgctttagacgaccgatctgtactgtcatatcctgttcagactctattgaactttgcgaccaagtctgctgttcggccaacacggaatggtagcctaagacggcctgaaattaaccctgcgttgcaaggtattccggcggccaacgattttcgcagaaagatcaagttcatccatggtattgtcaaggagtggaccttgaatgaaggtgttggtaacgcaaaaatggaccgccaaacccgtcaaatgtggcaaggaagccgcgagacggttgtgagcggacctagtaaacatgtctgggtcaccatcggagcacgatggggagactacagatactctgctgtcgtcgatcctaaacatcccggcatactgggcgaggaagtggaatctagatcatcctcgacaacatccacttgagacattgttgataaaggagacatcttggcatggacgtggtgttagagagttatgtttgcattctggaggagacgaacgtcttcatttagattcatgagagacgacagggcgttcttggtcttatttcctgcctgcactatcattgtcttcatggcatggcgtctgtgtgttcatggggtaatatgtccttgttcgctactccactagttttggtgttgagaatgcggcggaactcattcgagttgacacttgtcgacgacattataataaaatcatgacctgacgctttccaaactgatttgaagtactaagagtattaatctgcagtcatatgctttgttcgagtctttctgagaa

SEQ ID NO: 8789 - DNA, 882 bp, Muscodor strobelii
  misc_feature: SGI cDNA ID NO. 562721
  misc_feature: Encodes the peptide sequence at SEQ ID NO 8790
atgacgagcgaagtgcaattctacgagaacaatggcgagcgtggcctctctactctcttcgtagccccttcacaattcaagcttgtattcaatgaggagggaactgcaggaagaatcccagtcggcaacgacatttacgattatcgcaaacgtgaacacctcgtactgtggaagaaattcgccaattacatgatcgcatatggccgtgatcaagacggttccgatgataccgggcgcattcaggtagccgcaaaacccaagcaggcaatgcctcccagtgacgtggtcacattctaccagcggactggagatgtcggatgctggttgtttggcgatggtcacatgcaatttaacttccctgatcacaccaaaatcgtgctcgacgctacgggtacttggtgccatttctggcatctatcccagcagtcagctaccaagctggccacaactggagcactcgatgagactgctttagacgaccgatctgtactgtcatatcctgttcagactctattgaactttgcgaccaagtctgctgttcggccaacacggaatggtagcctaagacggcctgaaattaaccctgcgttgcaaggtattccggcggccaacgattttcgcagaaagatcaagttcatccatggtattgtcaaggagtggaccttgaatgaaggtgttggtaacgcaaaaatggaccgccaaacccgtcaaatgtggcaaggaagccgcgagacggttgtgagcggacctagtaaacatgtctgggtcaccatcggagcacgatggggagactacagatactctgctgtcgtcgatcctaaacatcccggcatactgggcgaggaagtggaatctagatcatcctcgacaacatccacttga

SEQ ID NO: 8790 - protein, 293 aa, Muscodor strobelii
  misc_feature: SGI Peptide ID NO. 562721
  misc_feature (1)..(286): NCBI GI: 116181844 Blast Desc: CHGG_01550 [Chaetomium globosum CBS 148.51] gi|88185847|gb|EAQ93315.1| CHGG_01550 [Chaetomium globosum CBS 148.51]
  misc_feature (1)..(284): NCBI GI: 171696036 Blast Desc: protein product [Podospora anserina] gi|170948260|emb|CAP60424.1| protein product [Podospora anserina]
  misc_feature (4)..(284): NCBI GI: 261357442 Blast Desc: serine/threonine-protein kinase plo1 [Verticillium albo-atrum VaMs.102]
  misc_feature (1)..(284): NCBI GI: 256735047 Blast Desc: [Nectria haematococca mpVI 77-13-4]
  misc_feature (5)..(284): NCBI GI: 85114418 Blast Desc: NCU09258 [Neurospora crassa OR74A] gi|28926484|gb|EAA35457.1| conserved [Neurospora crassa OR74A] gi|38567010|emb|CAE76309.1| related to protein kinase CDC5
  misc_feature (1)..(284): NCBI GI: 145605303 Blast Desc: MGG_09960 [Magnaporthe grisea 70-15] gi|145013131|gb|EDJ97772.1| MGG_09960 [Magnaporthe grisea 70-15]
  misc_feature (1)..(284): NCBI GI: 46108778 Blast Desc: FG01271.1 [Gibberella zeae PH-1]
  misc_feature (5)..(276): NCBI GI: 154323294 Blast Desc: BC1G_00046 [Botryotinia fuckeliana B05.10] gi|150842275|gb|EDN17468.1| BC1G_00046 [Botryotinia fuckeliana B05.10]
  misc_feature (5)..(276): NCBI GI: 156057911 Blast Desc: SS1G_04687 [Sclerotinia sclerotiorum 1980] gi|154702472|gb|EDO02211.1| SS1G_04687 [Sclerotinia sclerotiorum 1980]
  misc_feature (5)..(270): NCBI GI: 121719952 Blast Desc: serine/threonine protein kinase, [Aspergillus clavatus NRRL 1] gi|119404886|gb|EAW15248.1| serine/threonine protein kinase, [Aspergillus clavatus NRRL 1]
MTSEVQFYENNGERGLSTLFVAPSQFKLVFNEEGTAGRIPVGNDIYDYRKREHLVLWKKFANYMIAYGRDQDGSDDTGRIQVAAKPKQAMPPSDVVTFYQRTGDVGCWLFGDGHMQFNFPDHTKIVLDATGTWCHFWHLSQQSATKLATTGALDETALDDRSVLSYPVQTLLNFATKSAVRPTRNGSLRRPEINPALQGIPAANDFRRKIKFIHGIVKEWTLNEGVGNAKMDRQTRQMWQGSRETVVSGPSKHVWVTIGARWGDYRYSAVVDPKHPGILGEEVESRSSSTTST

SEQ ID NO: 8791 - DNA, 3537 bp, Muscodor strobelii; identical to SEQ ID NO: 8788
  misc_feature: SGI EST ID NO. CUFF.21082.1
  misc_feature: Variant of the nucleotide sequence at SEQ ID NO 8789

SEQ ID NO: 8792 - DNA, 672 bp, Muscodor strobelii
  misc_feature: SGI cDNA ID NO. 562722
  misc_feature: Encodes the peptide sequence at SEQ ID NO 8793
atggtgccattgcccttgttcaagttcgcctcgctttttgtcaagcacatatctaaatatggcgctaatcacatcaaagcccaggcccacgaccacccgggattcaggcgcattgctgcaagatatggccagatattccaccagataaacatgcgcctttccgttgcatccatgcggaatgtcgacgccgagttgaaagcaaaggagaaggccgaggccccgactgtcaaaacgaaagaacaaacagagaaggagcaggagctccgcgccagacatgggaccacaaacgcagaaaaccgagccaagaagatactaccgagaatcagcgtctggaaacgaaaattccgccctctccccgaagccaaggcagtggacctctttgcagacgttataggcgacgccttcatactatttgtagcctcggccttgattttatacgagtacctacgctcctcccagaaaccagaccacaatcgcgagaagatcgaagccctcaccgaaagatttgatagactagaggagagagagaagaagcttgccgaggctgaggagcagcaccggattagaaccatgatgctggaggatgttttgagggggcttgagcatcctaagactaaaaggccgttattgccgtctgcaacatcacaatcacaaccttcggggcagacttga

SEQ ID NO: 8793 - protein, 223 aa, Muscodor strobelii
  misc_feature: SGI Peptide ID NO. 562722
  misc_feature (116)..(185): Pfam Id: PF07047 Pfam Desc: Optic atrophy 3 protein (OPA3)
  misc_feature (5)..(53): Pfam Id: PF07047 Pfam Desc: Optic atrophy 3 protein (OPA3)
  misc_feature (1)..(215): NCBI GI: 145605305 Blast Desc: MGG_09959 [Magnaporthe grisea 70-15] gi|145013132|gb|EDJ97773.1| MGG_09959 [Magnaporthe grisea 70-15]
  misc_feature (1)..(210): NCBI GI: 171696038 Blast Desc: protein product [Podospora anserina] gi|170948261|emb|CAP60425.1| protein product [Podospora anserina]
  misc_feature (1)..(217): NCBI GI: 85114413 Blast Desc: NCU09257 [Neurospora crassa OR74A] gi|28926483|gb|EAA35456.1| conserved [Neurospora crassa OR74A] gi|38567009|emb|CAE76308.1| conserved [Neurospora crassa]
  misc_feature (1)..(212): NCBI GI: 261357439 Blast Desc: conserved [Verticillium albo-atrum VaMs.102]
  misc_feature (1)..(209): NCBI GI: 156057913 Blast Desc: SS1G_04688 [Sclerotinia sclerotiorum 1980] gi|154702473|gb|EDO02212.1| SS1G_04688 [Sclerotinia sclerotiorum 1980]
  misc_feature (1)..(212): NCBI GI: 46108776 Blast Desc: FG01270.1 [Gibberella zeae PH-1]
  misc_feature (35)..(215): NCBI GI: 116181842 Blast Desc: CHGG_01549 [Chaetomium globosum CBS 148.51] gi|88185846|gb|EAQ93314.1| CHGG_01549 [Chaetomium globosum CBS 148.51]
  misc_feature (1)..(222): NCBI GI: 154323292 Blast Desc: BC1G_00045 [Botryotinia fuckeliana B05.10] gi|150842274|gb|EDN17467.1| BC1G_00045 [Botryotinia fuckeliana B05.10]
  misc_feature (7)..(177): NCBI GI: 258578033 Blast Desc: conserved [Uncinocarpus reesii 1704] gi|237903464|gb|EEP77865.1| conserved [Uncinocarpus reesii 1704]
  misc_feature (7)..(209): NCBI GI: 238840149 Blast Desc: OPA3 domain-containing protein [Microsporum canis CBS 113480]
MVPLPLFKFASLFVKHISKYGANHIKAQAHDHPGFRRIAARYGQIFHQINMRLSVASMRNVDAELKAKEKAEAPTVKTKEQTEKEQELRARHGTTNAENRAKKILPRISVWKRKFRPLPEAKAVDLFADVIGDAFILFVASALILYEYLRSSQKPDHNREKIEALTERFDRLEEREKKLAEAEEQHRIRTMMLEDVLRGLEHPKTKRPLLPSATSQSQPSGQT

SEQ ID NO: 8794 - DNA, 2276 bp, Muscodor strobelii
  misc_feature: SGI EST ID NO. CUFF.21115.1
  misc_feature: Variant of the nucleotide sequence at SEQ ID NO 8792
gtcggaacgggatgacggattcgcagggtttccgcatctcgacgaactcggcccatggtaggttgtacagttagtagcaacaaacagctcgttcgcctgtcgaatacatagactctagtgaccaattacttgcttgctggctgcaattgattgcaactgaccacccgccaacctggttcttgggctcccgtactttgtacattgtgctatggttcgacactgttagccaagactttttgctcacgccgtagtggctactttctctcctctttcggacgcgatttgtggtctgtcagaggggcaagatggtgccattgcccttgttcaagttcgcctcgctttttgtcaagcacatatctaaatatggcgctaatcacatcaaagcccaggcccacgaccacccgggattcaggcgcattgctgcaagatatggccagatattccaccagataaacatgcgcctttccgttgcatccatgcggaatgtcgacgccgagttgaaagcaaaggagaaggccgaggccccgactgtcaaaacgaaagaacaaacagagaaggagcaggagctccgcgccagacatgggaccacaaacgcagaaaaccgagccaagaagatactaccgagaatcagcgtctggaaacgaaaattccgccctctccccgaagccaaggcagtggacctctttgcagacgttataggcgacgccttcatactatttgtagcctcggccttgattttatacgagtacctacgctcctcccagaaaccagaccacaatcgcgagaagatcgaagccctcaccgaaagatttgatagactagaggagagagagaagaagcttgccgaggctgaggagcagcaccggattagaaccatgatgctggaggatgttttgagggggcttgagcatcctaagactaaaaggccgttattgccgtctgcaacatcacaatcacaaccttcggggcagacttgagagataatattatcccccagaaatggggcagtgaaaagggcgttttctaaggatcgcttcctttgcccaggacaatcgacacgattgtgctctcctggtcccacccttcgccacggatcaggagctggccgatcaccgtatgtgatcaagctggctgttgttggatagctgtacgacgaccttgcagactcgagacactcgacttatttgctccacgacgtataatacaccacgctcaaaattgtacaacactacaagcaagatgacatggatgcagactttcgccacatatccttaccgactccgtaatgaaacgccacttcatcctctcagttgggctttctctcatatcaatcatttacaacccgtgggaaggacggaccgttgtttcgctgtattttatgatcagtccggagacgatctttcaactcgcagttagaaaaagtcagtggtagtcattttggaccaatgcagagttctccattttcattctttgatgtcttctcggtaattcagttcaacgatctacacacatttgctagtattgacagcatgtcgtaacaagaagcaccacatgcggggctcatcaggaaagtggacaaggatcgcgcaggtctctgcatgcggctgagattggaagcctctgggacgaactgcctctctgcgtgatcctatctccgcttttcgcatgctactgacatggaaggatgtggctgctaaatatcgaaaagctcgataaactagagctagtggaggtatctgaagaatcgacaccgaagtatgcaatcttatctcacacatggggtagcgaagaagtgacatttcaagatgttcagttggtttcccgtggccagtggtcctggagaggttccagcaggccgtccgcgatacaaagtaagaagggctttaccaagatacggaacgcatcagtattagcagctcgagatggataccagtatctttggatcgatacttgttgtattgacaaaactagcagcgccgagctctctgaggccatcaattcaatgtatcgatggtatcaaaaagcagccatctgctacgcatatatggaagatgttcaaaatggtcaccaagttggcttgttccacttactttgccagaatgctcgttggttcaccaggggttggacactccaggagctgatcgctccccatgatgttttgttttacggcaaagactgggaatttcttggaagcaaagcccgtgatagggacgtacgaacatctcttgctgatataacaggcattgatgtcagagtactcgaaggtgcaatcccac

SEQ ID NO: 8795 - DNA, 1608 bp, Muscodor strobelii
  misc_feature: SGI cDNA ID NO. 562723
  misc_feature: Reduced expression when VOC is produced
  misc_feature: Encodes the peptide sequence at SEQ ID NO 8796
atgtatcgatggtatcaaaaagcagccatctgctacgcatatatggaagatgttcaaaatggtcaccaagttggcttgttccacttactttgccagaatgctcgttggttcaccaggggttggacactccaggagctgatcgctccccatgatgttttgttttacggcaaagactgggaatttcttggaagcaaagcccgtgatagggacgtacgaacatctcttgctgatataacaggcattgatgtcagagtactcgaaggtgcaatcccaccttccgatattagtgtgagtactacttgtttcgatttaatggccattgccgcgcggatgaaatgggcttcgctgagaaagactacgcgaatagaagatatggcctattgtctcatggggctgttcgacgtcaacatgcctttactatatggggaaggcagaaaggccttcattcgattgcaagagcaaatattgaaggattccagcgaccattctatattcatgtggacatcgttcgaccccagctcccaagaagaactctctggccttcttgctgagacgcctcagagttttgctcaggctgagaattataagccgatgcctccttcagtcttccgtacaagcactacttggagcacaacgaaccaaggattgcaacttgtcctcttcctgataccatgtcttgacaaccacgacaaaatagtcgtgaacgagtacgatgctgtcttagagtgtgcaagacctgtttatccggtccctcagttcatggtgtccctgcacaatactattccgtcattttcggaggtttctaatctatcttgtgttctcaccgaggtctggcctgccaagtattgggatagtgaggctagcacacttcgtcctttgccgtctatttcgaacgagattgtggttgcgttcagatttgccgcccctatcctgaacttcaccgtagacctcattgtcggcttgaaatcgaagctcggaggaggttggggaatttggcacttgcaacaaccgtccacgggtgaagaactggacaagacttcggtattagccagcgacattatagaattgatgacgctggacaaggagccagaatcagtgaaaatgccacacatccagacaagtctgaaggacatcacatttcatgggagacaatactatcttgttgaggcaggcctcatcattgagctggaacacaattatgtagctcgacgatctctgattcagccaccctcaagtacacaagagaattgttctgctacattgttcaaaaatccacaggaaacacgtccatccgaagagttgctgattgacgtttcaagcaactcaaatgaattagacctagaagacatattaggagatattgcactccctatcagtctcgattctttctttgatggtgaggattcaaaccgtccgcagcaatctagctctagcttcgtacgactctcatgggcccgcgatccatctgaatacttcgagcagctggtcattcatggagctcgcacaaccgaaaccttcttattaagagcttgccaagaaggtcgagaagatagtgtcaaggtaagtgatctgaactatcagatatcaaaaccagccctttgtctttaa

SEQ ID NO: 8796 - protein, 535 aa, Muscodor strobelii
  misc_feature: SGI Peptide ID NO. 562723
  misc_feature (1)..(45): Pfam Id: PF06985 Pfam Desc: Heterokaryon incompatibility protein (HET)
  misc_feature (1)..(243): NCBI GI: 171683732 Blast Desc: protein product [Podospora anserina] gi|170941826|emb|CAP67479.1| protein product [Podospora anserina]
  misc_feature (1)..(244): NCBI GI: 145602171 Blast Desc: MGG_12935 [Magnaporthe grisea 70-15] gi|145010601|gb|EDJ95257.1| MGG_12935 [Magnaporthe grisea 70-15]
  misc_feature (1)..(243): NCBI GI: 115397489 Blast Desc: conserved [Aspergillus terreus NIH2624] gi|114192527|gb|EAU34227.1| conserved [Aspergillus terreus NIH2624]
  misc_feature (1)..(222): NCBI GI: 46126619 Blast Desc: FG07687.1 [Gibberella zeae PH-1]
  misc_feature (1)..(263): NCBI GI: 169780438 Blast Desc: [Aspergillus oryzae RIB40] gi|83773423|dbj|BAE63550.1| protein product [Aspergillus oryzae]
  misc_feature (1)..(244): NCBI GI: 238493477 Blast Desc: conserved [Aspergillus flavus NRRL3357] gi|220696469|gb|EED52811.1| conserved [Aspergillus flavus NRRL3357]
  misc_feature (1)..(220): NCBI GI: 169770123 Blast Desc: [Aspergillus oryzae RIB40] gi|83767390|dbj|BAE57529.1| protein product [Aspergillus oryzae]
  misc_feature (1)..(223): NCBI GI: 238485594 Blast Desc: ankyrin repeat-containing protein, [Aspergillus flavus NRRL3357] gi|220698914|gb|EED55253.1| ankyrin repeat-containing protein, [Aspergillus flavus NRRL3357]
  misc_feature (1)..(222): NCBI GI: 256720984 Blast Desc: NECHADRAFT_82249 [Nectria haematococca mpVI 77-13-4]
  misc_feature (1)..(224): NCBI GI: 239611724 Blast Desc: HET domain-containing protein [Ajellomyces dermatitidis ER-3]
  misc_feature: Useful for introducing or modulating the production of volatile compounds
MYRWYQKAAICYAYMEDVQNGHQVGLFHLLCQNARWFTRGWTLQELIAPHDVLFYGKDWEFLGSKARDRDVRTSLADITGIDVRVLEGAIPPSDISVSTTCFDLMAIAARMKWASLRKTTRIEDMAYCLMGLFDVNMPLLYGEGRKAFIRLQEQILKDSSDHSIFMWTSFDPSSQEELSGLLAETPQSFAQAENYKPMPPSVFRTSTTWSTTNQGLQLVLFLIPCLDNHDKIVVNEYDAVLECARPVYPVPQFMVSLHNTIPSFSEVSNLSCVLTEVWPAKYWDSEASTLRPLPSISNEIVVAFRFAAPILNFTVDLIVGLKSKLGGGWGIWHLQQPSTGEELDKTSVLASDIIELMTLDKEPESVKMPHIQTSLKDITFHGRQYYLVEAGLIIELEHNYVARRSLIQPPSSTQENCSATLFKNPQETRPSEELLIDVSSNSNELDLEDILGDIALPISLDSFFDGEDSNRPQQSSSSFVRLSWARDPSEYFEQLVIHGARTTETFLLRACQEGREDSVKVSDLNYQISKPALCL

SEQ ID NO: 8797 - DNA, 140 bp, Muscodor strobelii
  misc_feature: SGI EST ID NO. CUFF.21085.0
  misc_feature: Variant of the nucleotide sequence at SEQ ID NO 8795
ggcccgcgatccatctgaatacttcgagcagctggtcattcatggagctcgcacaaccgaaaccttcttattaagagcttgccaagaaggtcgagaagatagtgtcaaggtaagtgatctgaactatcagatatcaaaac

SEQ ID NO: 8798 - DNA, 435 bp, Muscodor strobelii
  misc_feature: SGI cDNA ID NO. 562724
  misc_feature: Encodes the peptide sequence at SEQ ID NO 8799
atgggaaaactcatcaagaaccactgggcgaggctcatcgtcttaacggcggcagcttaccagatcgccgcggccctcgaagcattcttctggcccaaggtgttttgggacttcctcaccaagacactggaccccgccgtcaagcctgtgccggtcctgcaaattgtcaacttgatattcggtatcggcatgttcgcgctagagtggccacttggtttcttggccgggtctacattccatcgtagcctcgaggctcgtctcgcgcttcttcctctggttgcactagccgccgtgctcttataccagggcacaaacccagccatctactatgttaccggcagcgttgtgtatttctgggcatatagcgagggagagataatctgcgctaagccatggactctgcctcaaagaggcagggcaggaacacgtgtataa

SEQ ID NO: 8799 - protein, 144 aa, Muscodor strobelii
  misc_feature: SGI Peptide ID NO. 562724
  misc_feature (1)..(143): NCBI GI: 46108772 Blast Desc: FG01268.1 [Gibberella zeae PH-1]
  misc_feature (1)..(144): NCBI GI: 261357438 Blast Desc: PRO41 protein [Verticillium albo-atrum VaMs.102]
  misc_feature (1)..(144): NCBI GI: 39965543 Blast Desc: MGG_09956 [Magnaporthe grisea 70-15] gi|145013135|gb|EDJ97776.1| MGG_09956 [Magnaporthe grisea 70-15]
  misc_feature (1)..(144): NCBI GI: 85112082 Blast Desc: NCU02767 [Neurospora crassa OR74A] gi|28926037|gb|EAA35026.1| conserved [Neurospora crassa OR74A]
  misc_feature (1)..(144): NCBI GI: 146327845 Blast Desc: PRO41 protein [Sordaria macrospora]
  misc_feature (1)..(141): NCBI GI: 116181838 Blast Desc: CHGG_01547 [Chaetomium globosum CBS 148.51] gi|88185844|gb|EAQ93312.1| CHGG_01547 [Chaetomium globosum CBS 148.51]
  misc_feature (1)..(143): NCBI GI: 189197559 Blast Desc: conserved [Pyrenophora tritici-repentis Pt-1C-BFP] gi|187981065|gb|EDU47691.1| conserved [Pyrenophora tritici-repentis Pt-1C-BFP]
  misc_feature (1)..(139): NCBI GI: 225683914 Blast Desc: conserved [Paracoccidioides brasiliensis Pb03]
  misc_feature (1)..(139): NCBI GI: 226293302 Blast Desc: conserved [Paracoccidioides brasiliensis Pb18]
  misc_feature (1)..(142): NCBI GI: 226278027 Blast Desc: conserved [Paracoccidioides brasiliensis Pb01]
MGKLIKNHWARLIVLTAAAYQIAAALEAFFWPKVFWDFLTKTLDPAVKPVPVLQIVNLIFGIGMFALEWPLGFLAGSTFHRSLEARLALLPLVALAAVLLYQGTNPAIYYVTGSVVYFWAYSEGEIICAKPWTLPQRGRAGTRV

SEQ ID NO: 8800 - DNA, 2033 bp, Muscodor strobelii
  misc_feature: SGI EST ID NO. CUFF.21103.0
  misc_feature: Variant of the nucleotide sequence at SEQ ID NO 8798
ttttgactctcgccccgcagatattggctcttgttgaggatatggcggtctcggccgtggctgatgatactctacacgtttcctagctggccatatacccatgaagaacccatccatttcttaaatctcttgcatgctgcctcgtgtctaaagatctcccattttgtacatgaagaaaccccttcgcatcatttcgggaaccccttcgagtctcatcgtcgtgtctgatctaccaccctaatctgtctcgccaaggaaacgaacccccatatacaggcgcttgaacgttttatctcaccagcaaccctagcgctaaatcgatttgagctgaacagaggcagtctgggattcttgcttcagatcgccgcttgttgcttcataatctcgtctcatagcgcatccatcttagtattcggtctgcggcctaactgcattttccttccaaggggatctgtctctctaccggatgataccaatgccgcgcctatgccagctgtcgatatagatctgatttcaagaacgtgggtctcggacgaaacagcctcactagcatcagggcggaagtgtcacagacattatccaaggagaagttcatcgctcttgatacaagctctcccaaactgggagccttgctcccccttgggctgagagctaagttgagaagatcaccaatatagcctctgtgagccccagtggcccgtcgctatctaattgttgattttccttttcttcccttcttcctctcgactgccagcgctgtgcactcgccttgtcgatagccttctttcatatcggctttctttcccagtcgttgtcttgttccattcattttcaggtccggtcacctgccttataaatatacctcgatacttaatacccttggccgtgccgacaactattttggagcttgaggagaatccggagggctttagaaagcgacgagaaatcaaaacgaaattagaaagagcgtgggataccttcaagggttgaattcagcgatttgtgtttattgaagggacgagagccatatcacgaacagtttcacgaaaatgggaaaactcatcaagaaccactgggcgaggctcatcgtcttaacggcggcagcttaccagatcgccgcggccctcgaagcattcttctggcccaaggtgttttgggacttcctcaccaagacactggaccccgccgtcaagcctgtgccggtcctgcaaattgtcaacttgatattcggtatcggcatgttcgcgctagagtggccacttggtttcttggccgggtctacattccatcgtagcctcgaggctcgtctcgcgcttcttcctctggttgcactagccgccgtgctcttataccagggcacaaacccagccatctactatgttaccggcagcgttgtgtatttctgggcatatagcgagggagagataatctgcgctaagccatggactctgcctcaaagaggcagggcaggaacacgtgtataaatctgcagggataaaacgagggaggaccagaagccgaggaatattttcacacatgcttcttggtataacccagactcccgtacatatgaaccaatcctacgatgaatcagccgctcctacctgaactcatctaattgtcgagttcgaattcgacatcgaaataaacatctctccgttgtatgtacgtatgcatcatgagatcgtcagctctcatgtcttattatatatctccatatatacattcggacaaacaacaagtcttgcacatccggcgttcaatgattggattttgcttatcgcatgttcttgggcgaatataaatcgccacgatgcatacgagttaatagtggaagaggtcggtagcgaggcatgtcgctcttcaattatgattaccatgatacgatgttactgttagaagatgcctcatcgtagatatacaagtcctcattgatgtcatgtatatatatgaatatatgaacatttgataggtacaatatggacgcgaaattaatgatcataacatttgtcttagtaattgttgcaagcaaa

SEQ ID NO: 8801 - DNA, 378 bp, Muscodor strobelii
  misc_feature: SGI cDNA ID NO. 562725
  misc_feature: Reduced expression when VOC is produced
  misc_feature: Encodes the peptide sequence at SEQ ID NO 8802
atgaccaagggcgaagccggcgtgaccaaggtccattaccagggccctcagaccaaggaggacttcatcctcctcgtcgacagtgaggcattggagaaagcacagaatggcgatggcttcaccactgccaacgtgaaccagattgtctccggcctttctatcttcgtgacgcacaagcacggtgcccagggcaagatggaccaggcctcgaagcaaaccctggcagccgagtttggaagcgaggaccacgaggagtgcatcagaaccattctcgaaaactcaaaagacattcagcagggtcagatgcctggacgcggaggctccaagaacgatgcccagttgggctccattgtcaacggacagcccggcacacgatag

SEQ ID NO: 8802 - protein, 125 aa, Muscodor strobelii
  misc_feature: SGI Peptide ID NO. 562725
  misc_feature (6)..(107): Pfam Id: PF01172 Pfam Desc: Shwachman-Bodian-Diamond syndrome (SBDS) protein
  misc_feature (6)..(93): Pfam Id: PF01172 Pfam Desc: Shwachman-Bodian-Diamond syndrome (SBDS) protein
  misc_feature (1)..(119): NCBI GI: 261196111 Blast Desc: conserved [Ajellomyces dermatitidis SLH14081] gi|239587592|gb|EEQ70235.1| conserved [Ajellomyces dermatitidis SLH14081] gi|239614548|gb|EEQ91535.1| conserved [Ajellomyces
  misc_feature (1)..(113): NCBI GI: 238840695 Blast Desc: conserved [Microsporum canis CBS 113480]
  misc_feature (3)..(120): NCBI GI: 146327846 Blast Desc: [Sordaria macrospora]
  misc_feature (9)..(112): NCBI GI: 156057917 Blast Desc: SS1G_04690 [Sclerotinia sclerotiorum 1980] gi|154702475|gb|EDO02214.1| SS1G_04690 [Sclerotinia sclerotiorum 1980]
  misc_feature (1)..(119): NCBI GI: 154277768 Blast Desc: conserved [Ajellomyces capsulatus NAm1] gi|150413303|gb|EDN08686.1| conserved [Ajellomyces capsulatus NAm1]
  misc_feature (1)..(119): NCBI GI: 225560953 Blast Desc: conserved [Ajellomyces capsulatus G186AR]
  misc_feature (1)..(119): NCBI GI: 240280488 Blast Desc: conserved [Ajellomyces capsulatus H143]
  misc_feature (1)..(112): NCBI GI: 39965529 Blast Desc: MGG_09955 [Magnaporthe grisea 70-15] gi|145013136|gb|EDJ97777.1| MGG_09955 [Magnaporthe grisea 70-15]
  misc_feature (9)..(112): NCBI GI: 154323290 Blast Desc: BC1G_00044 [Botryotinia fuckeliana B05.10] gi|150842273|gb|EDN17466.1| BC1G_00044 [Botryotinia fuckeliana B05.10]
  misc_feature (1)..(118): NCBI GI: 169770333 Blast Desc: [Aspergillus oryzae RIB40] gi|238487268|ref|XP_002374872.1| RNA binding protein, [Aspergillus flavus NRRL3357] gi|83767495|dbj|BAE57634.1| protein
  misc_feature: Useful for introducing or modulating the production of volatile compounds
MTKGEAGVTKVHYQGPQTKEDFILLVDSEALEKAQNGDGFTTANVNQIVSGLSIFVTHKHGAQGKMDQASKQTLAAEFGSEDHEECIRTILENSKDIQQGQMPGRGGSKNDAQLGSIVNGQPGTR

SEQ ID NO: 8803 - DNA, 991 bp, Muscodor strobelii
  misc_feature: SGI EST ID NO. CUFF.21177.1
  misc_feature: Variant of the nucleotide sequence at SEQ ID NO 8801
tgatgggatgaatgcaaacagatggctggagcttgtgtagcccttatatcaggtgctctgtcacaattcgctctctccatcccccctttttctacaattcacaaccattgacaaaacattcgatacccaacccacttcctctatcatcttcgcgtctcagcctcaacatctcgaggattcccagatatttgacaatcaacacaaccactgtaccaaacactacattaccccacagccaacatgaccaagggcgaagccggcgtgaccaaggtccattaccagggccctcagaccaaggaggacttcatcctcctcgtcgacagtgaggcattggagaaagcacagaatggcgatggcttcaccactgccaacgtgaaccagattgtctccggcctttctatcttcgtgacgcacaagcacggtgcccagggcaagatggaccaggcctcgaagcaaaccctggcagccgagtttggaagcgaggaccacgaggagtgcatcagaaccattctcgaaaactcaaaagacattcagcagggtcagatgcctggacgcggaggctccaagaacgatgcccagttgggctccattgtcaacggacagcccggcacacgatagatgaacggtgttcggttcgtggccaagagatagcagcttgctggtcgttgatgatatacccaaggctgtcaaggcaacttccttctattagcgaagactcaagttgccatggaccttgcattcgagtggcgtagctaggttcttaatgattgatgacatatcgcggcgtcagtatgggttattaggtagcgtgcgtttatacgctctccaccaaggaaagttcgctgaacttgtccttccacaagcacttataagtagctagcggaacatgaagctcatttgacttgccaatacctggtccttcgtttaccgtgcgtcatgattgatatagacgctgtcacaaagtggcccacctattcgggataacaacttg

SEQ ID NO: 8804 - DNA, 1014 bp, Muscodor strobelii
  misc_feature: SGI cDNA ID NO. 562726
  misc_feature: Encodes the peptide sequence at SEQ ID NO 8805
atgtggacggaacctcaactcgggattcaggatcacaacgggtgtcgaaaggatacagaagagacttggaaggcgttagataacataactagcctccgtctcagtctagagaatgacgatgatgtgctatcacgatgcactacagacgtgccggagattgttatcgaccatcagagtgatagcactatagaagaaggttcctctgcgtttgtaacgaaccgacctttccatagatggatgaagagtttacatcgacgagcacgacgaccgaaactcagcaatgacttcgccgagttcactccacccgagcccttctccggacagaaatcaaccctcaagagtggccaccgaaaatcattgtcggattcttcatatggatttgttgccgctgtgaggagtgccactgttagcatggctagtgcgagtatagtaactcgtccaagaagacatcagcctcgttcctctgtccatacgaagacagatcgcagcagccgtggatcgttctcagcccagagaatgtctgaagacagcatatatcccgagaaaactccaccaacagacccggcagtgacggaacgcttgcttcaaagacgacgaattatcgaggagctcatcaacacggaagagagttatattggcgacatcaaatttctcatgaacgtctatgtcacgatactcgcctcgttacctacgctacaatccaatcttcgatcttccatcaaccagaacttgacagacattattgaactgcatgaggagatacttggcgagcttcatcgtgttgttccagattctgaatacacgcaacctgagcatgtcgtagtgaaatcaacacctactccaagtcggagacatcatcgatggcgtagcttggactcggttccagaggacaaaggggggatatcatggctcagcagcgttcctagcctgatagctgagccgcacactgcagccgaagttgctcgcatcttcgctgagaaggtagcacgggagacccaagcccatttgagatga

SEQ ID NO: 8805 - protein, 337 aa, Muscodor strobelii
  misc_feature: SGI Peptide ID NO. 562726
  misc_feature (73)..(330): NCBI GI: 33950235 Blast Desc: RSP [Neurospora crassa]
  misc_feature (73)..(330): NCBI GI: 85112076 Blast Desc: NCU02764 [Neurospora crassa OR74A] gi|28926034|gb|EAA35023.1| [Neurospora crassa OR74A]
  misc_feature (74)..(330): NCBI GI: 171696050 Blast Desc: protein product [Podospora anserina] gi|170948267|emb|CAP60431.1| protein product [Podospora anserina]
  misc_feature (17)..(328): NCBI GI: 145605309 Blast Desc: MGG_09954 [Magnaporthe grisea 70-15] gi|145013137|gb|EDJ97778.1| MGG_09954 [Magnaporthe grisea 70-15]
  misc_feature (74)..(328): NCBI GI: 46108768 Blast Desc: FG01266.1 [Gibberella zeae PH-1]
  misc_feature (74)..(337): NCBI GI: 116181834 Blast Desc: CHGG_01545 [Chaetomium globosum CBS 148.51] gi|88185842|gb|EAQ93310.1| CHGG_01545 [Chaetomium globosum CBS 148.51]
  misc_feature (75)..(327): NCBI GI: 256735050 Blast Desc: NECHADRAFT_74501 [Nectria haematococca mpVI 77-13-4]
  misc_feature (71)..(328): NCBI GI: 156057591 Blast Desc: SS1G_04527 [Sclerotinia sclerotiorum 1980] gi|154702312|gb|EDO02051.1| SS1G_04527 [Sclerotinia sclerotiorum 1980]
  misc_feature (75)..(328): NCBI GI: 154323964 Blast Desc: BC1G_00381 [Botryotinia fuckeliana B05.10] gi|150842610|gb|EDN17803.1| BC1G_00381 [Botryotinia fuckeliana B05.10]
  misc_feature (71)..(330): NCBI GI: 189197457 Blast Desc: Rho guanyl nucleotide exchange factor [Pyrenophora tritici-repentis Pt-1C-BFP] gi|187981014|gb|EDU47640.1| Rho guanyl nucleotide exchange factor [Pyrenophora tritici-repentis
MWTEPQLGIQDHNGCRKDTEETWKALDNITSLRLSLENDDDVLSRCTTDVPEIVIDHQSDSTIEEGSSAFVTNRPFHRWMKSLHRRARRPKLSNDFAEFTPPEPFSGQKSTLKSGHRKSLSDSSYGFVAAVRSATVSMASASIVTRPRRHQPRSSVHTKTDRSSRGSFSAQRMSEDSIYPEKTPPTDPAVTERLLQRRRIIEELINTEESYIGDIKFLMNVYVTILASLPTLQSNLRSSINQNLTDIIELHEEILGELHRVVPDSEYTQPEHVVVKSTPTPSRRHHRWRSLDSVPEDKGGISWLSSVPSLIAEPHTAAEVARIFAEKVARETQAHLR

SEQ ID NO: 8806 - DNA, 1497 bp, Muscodor strobelii
  misc_feature: SGI cDNA ID NO. 562727
  misc_feature: Encodes the peptide sequence at SEQ ID NO 8807
atggcagcgaatgtgaagagtatcaaggtcgtcgacgcgaatctgaggcagcacaaaatagatgtcacacctggaacatatctcaacgacatccgagaccaggtctgcaaaaagctccaggtgcctgcagaaaagtatggcaactatgtgttgaaacacaagcagcgcagtcttgagatgtcccaacccatccgaacatctggcctcatcaacaatgctctactcgagcttgtcgtcacagccaacactcccctccccgtgaatattgccttgcaacttccggctcctgaatccagtctcttcccggacggtcgggtgaaacagaaacttcccagcaacttcacgatatggcaaatactacgccaagctgagagcggtgaggcgagcgcaggaaagaacttaaacatcaccgcaagaggcattgctcaaattgtgaaaggcgcacaggctggtagcggccagttatactacgagatgcctcacatagtcatagagaacagaaccatgtccagtttttccgaccttcaaaagacactatctcaactcggctactactcaggcagcgtcttgatgcgtctctcctttcagaagacagataagccgttaatagatgccatggcggagcttgaacagtatttcaagtcggaagacgagacaacccctgcgaaagctcaggtagaaattccaacgaccgccggtcttgagagtatcgataccgtgcctgaggtatccatcacgtctagtccgtcccatgaacatgtctccaagtcatccgtggagaagcaacaagcgatcacagacgccaacgtcgatactatggatgtcgacgaggcaccggcctctggtcatagaccaatgaccatcttttcagcgccttcgtcggacacgccagtcgccgcccttcggccagatacagaagatgactatacacccggcatcagtcaattgaaagcacaccagagacttttgaaatcgcaaacgggaaacaagcgtcttctctcggacgaagagctcgagcaaaaggcaaagacggaggaggaaaaactagatgccgtcaagtctataatcatcaggacgcgcttcccagacggtacctctgctcagtggggattcagtaccaaagacacaggagcaagcttatacgccgtgattcgggacgttatggtcaatccctccctacccttcagacttatagtcacggatgccaaaacaccaacaatcatcaaggaagattcgagcacattgatcaagggataccgcttgaagaacacacttgtcaatttcacgtgggaggatccaagcaaagtaccgaagaacacgccatttctgaaagacaaagtagcggctcaagcgcagaaagtcgttgtaccagaaacccccgaagtcgaagtagaagatgagaaacctcacccttcacaacctacgaaggcacgcagcggaggcgatggctcaagtggaaagatgcccaagtggcttaagggcttgggcaagaaatag

SEQ ID NO: 8807 - protein, 498 aa, Muscodor strobelii
  misc_feature: SGI Peptide ID NO. 562727
  misc_feature (8)..(498): NCBI GI: 256734343 Blast Desc: NECHADRAFT_74504 [Nectria haematococca mpVI 77-13-4]
  misc_feature (1)..(498): NCBI GI: 46108710 Blast Desc: FG01237.1 [Gibberella zeae PH-1]
  misc_feature (1)..(498): NCBI GI: 145603037 Blast Desc: MGG_04552 [Magnaporthe grisea 70-15] gi|145011368|gb|EDJ96024.1| MGG_04552 [Magnaporthe grisea 70-15]
  misc_feature (8)..(498): NCBI GI: 115398101 Blast Desc: conserved [Aspergillus terreus NIH2624] gi|114192833|gb|EAU34533.1| conserved [Aspergillus terreus NIH2624]
  misc_feature (8)..(498): NCBI GI: 261357433 Blast Desc: conserved [Verticillium albo-atrum VaMs.102]
  misc_feature (8)..(498): NCBI GI: 121706808 Blast Desc: UBX domain protein, [Aspergillus clavatus NRRL 1] gi|119399783|gb|EAW10209.1| UBX domain protein, [Aspergillus clavatus NRRL 1]
  misc_feature (1)..(498): NCBI GI: 238844719 Blast Desc: conserved [Microsporum canis CBS 113480]
  misc_feature (8)..(498): NCBI GI: 258566704 Blast Desc: conserved [Uncinocarpus reesii 1704] gi|237905542|gb|EEP79943.1| conserved [Uncinocarpus reesii 1704]
  misc_feature (8)..(498): NCBI GI: 242808752 Blast Desc: UBX domain protein, [Talaromyces stipitatus ATCC 10500] gi|218715854|gb|EED15276.1| UBX domain protein, [Talaromyces stipitatus ATCC 10500]
  misc_feature (8)..(498): NCBI GI: 212537591 Blast Desc: UBX domain protein, [Penicillium marneffei ATCC 18224] gi|210068693|gb|EEA22784.1| UBX domain protein, [Penicillium marneffei ATCC 18224]
MAANVKSIKVVDANLRQHKIDVTPGTYLNDIRDQVCKKLQVPAEKYGNYVLKHKQRSLEMSQPIRTSGLINNALLELVVTANTPLPVNIALQLPAPESSLFPDGRVKQKLPSNFTIWQILRQAESGEASAGKNLNITARGIAQIVKGAQAGSGQLYYEMPHIVIENRTMSSFSDLQKTLSQLGYYSGSVLMRLSFQKTDKPLIDAMAELEQYFKSEDETTPAKAQVEIPTTAGLESIDTVPEVSITSSPSHEHVSKSSVEKQQAITDANVDTMDVDEAPASGHRPMTIFSAPSSDTPVAALRPDTEDDYTPGISQLKAHQRLLKSQTGNKRLLSDEELEQKAKTEEEKLDAVKSIIIRTRFPDGTSAQWGFSTKDTGASLYAVIRDVMVNPSLPFRLIVTDAKTPTIIKEDSSTLIKGYRLKNTLVNFTWEDPSKVPKNTPFLKDKVAAQAQKVVVPETPEVEVEDEKPHPSQPTKARSGGDGSSGKMPKWLKGLGKK

SEQ ID NO: 8808 - DNA, 1956 bp, Muscodor strobelii
  misc_feature: SGI EST ID NO. CUFF.21136.0
  misc_feature: Variant of the nucleotide sequence at SEQ ID NO 8806
catttttctattgcctgcgacaagcttcgagctgacgtttggaggggcaagtgcatgtttagaatctcccacctacatgtacctagttaggacgcaagctccaatccataaaccactacctacatgtattcgaccccccagcatcagcaaataaattcaatgttgcctgcatataggactgcatgtttacaacgagcgtaagagtctacacgaatgtgtcactcctgttacttctcattataacttcctttgcgcctgtgcgaccttgaagtatctttgtctacatctcgaccagagtccatctctccctatccgcgcctgtattaggcatttgaccatggcagcgaatgtgaagagtatcaaggtcgtcgacgcgaatctgaggcagcacaaaatagatgtcacacctggaacatatctcaacgacatccgagaccaggtctgcaaaaagctccaggtgcctgcagaaaagtatggcaactatgtgttgaaacacaagcagcgcagtcttgagatgtcccaacccatccgaacatctggcctcatcaacaatgctctactcgagcttgtcgtcacagccaacactcccctccccgtgaatattgccttgcaacttccggctcctgaatccagtctcttcccggacggtcgggtgaaacagaaacttcccagcaacttcacgatatggcaaatactacgccaagctgagagcggtgaggcgagcgcaggaaagaacttaaacatcaccgcaagaggcattgctcaaattgtgaaaggcgcacaggctggtagcggccagttatactacgagatgcctcacatagtcatagagaacagaaccatgtccagtttttccgaccttcaaaagacactatctcaactcggctactactcaggcagcgtcttgatgcgtctctcctttcagaagacagataagccgttaatagatgccatggcggagcttgaacagtatttcaagtcggaagacgagacaacccctgcgaaagctcaggtagaaattccaacgaccgccggtcttgagagtatcgataccgtgcctgaggtatccatcacgtctagtccgtcccatgaacatgtctccaagtcatccgtggagaagcaacaagcgatcacagacgccaacgtcgatactatggatgtcgacgaggcaccggcctctggtcatagaccaatgaccatcttttcagcgccttcgtcggacacgccagtcgccgcccttcggccagatacagaagatgactatacacccggcatcagtcaattgaaagcacaccagagacttttgaaatcgcaaacgggaaacaagcgtcttctctcggacgaagagctcgagcaaaaggcaaagacggaggaggaaaaactagatgccgtcaagtctataatcatcaggacgcgcttcccagacggtacctctgctcagtggggattcagtaccaaagacacaggagcaagcttatacgccgtgattcgggacgttatggtcaatccctccctacccttcagacttatagtcacggatgccaaaacaccaacaatcatcaaggaagattcgagcacattgatcaagggataccgcttgaagaacacacttgtcaatttcacgtgggaggatccaagcaaagtaccgaagaacacgccatttctgaaagacaaagtagcggctcaagcgcagaaagtcgttgtaccagaaacccccgaagtcgaagtagaagatgagaaacctcacccttcacaacctacgaaggcacgcagcggaggcgatggctcaagtggaaagatgcccaagtggcttaagggcttgggcaagaaataggcgcaaataaagcatagacagcatagttgtaatatcatgacagcgaacgaattcaataatatgatgagttcattgtccatagagctcaaattcagattgccttgccacatggtggtcctaag

SEQ ID NO: 8809 - DNA, 621 bp, Muscodor strobelii
  misc_feature: SGI cDNA ID NO. 562728
  misc_feature: Encodes the peptide sequence at SEQ ID NO 8810
atgtcctctcccttctcaataaacggcggcgcctgtgtggccatggtaggtaaggattgcgtagccatcgcctgcgacctgcgtctcggtctgcaagccctcacagtctccaacaacttccccaagatcttccagtacggcgaggacgtcttcctcggcctcacaggcctcgcaacagatgtctccaccgtctccgacctcttccgctacaaggtcaacatgtaccgcctgcgcgaggagcggcccatcgccccctccaccttcgccaacctcgtctcctcctccctgtacgagaagcgcttcggccccttcttcgtgagccccgtcgtcgctggcctcgaccccaagaccggcgcccctttcatctgcggcttcgactcgatcggctgtatcgacttcgccaaggacttcatcgtcagcggcaccgccagcgagcagctctttggcatgtgtgagagtctctgggagcctgatttggcaccagaagatctcttcgaaaccatctcccaagccttgctcagcgccgttgatcgagacgctttatccggctggggtgctcacgtttacatcatcgagaagaacaaggtcactaagcggttactcaaaggacgacaggattaa

SEQ ID NO: 8810 - protein, 206 aa, Muscodor strobelii
  misc_feature: SGI Peptide ID NO. 562728
  misc_feature (7)..(191): Pfam Id: PF00227 Pfam Desc: Proteasome A-type and B-type
  misc_feature (1)..(206): NCBI GI: 145603039 Blast Desc: 20S proteasome peptidase [Magnaporthe grisea 70-15] gi|145011369|gb|EDJ96025.1| 20S proteasome peptidase [Magnaporthe grisea 70-15]
  misc_feature (1)..(206): NCBI GI: 256735051 Blast Desc: [Nectria haematococca mpVI 77-13-4]
  misc_feature (1)..(206): NCBI GI: 156036470 Blast Desc: SS1G_12924 [Sclerotinia sclerotiorum 1980] gi|154698329|gb|EDN98067.1| SS1G_12924 [Sclerotinia sclerotiorum 1980]
  misc_feature (1)..(206): NCBI GI: 145256886 Blast Desc: An04g01800 [Aspergillus niger] gi|134058458|emb|CAL00667.1| protein product [Aspergillus niger]
  misc_feature (1)..(206): NCBI GI: 189205423 Blast Desc: proteasome subunit beta type-3 [Pyrenophora tritici-repentis Pt-1C-BFP] gi|187975139|gb|EDU41765.1| proteasome subunit beta type-3 [Pyrenophora tritici-repentis
  misc_feature (1)..(206): NCBI GI: 238491746 Blast Desc: proteasome component Pup3, [Aspergillus flavus NRRL3357] gi|220697523|gb|EED53864.1| proteasome component Pup3, [Aspergillus flavus NRRL3357]
  misc_feature (8)..(206): NCBI GI: 171696000 Blast Desc: protein product [Podospora anserina] gi|170948242|emb|CAP60406.1| protein product [Podospora anserina]
  misc_feature (1)..(206): NCBI GI: 255950036 Blast Desc: Pc22g18820 [Penicillium chrysogenum Wisconsin 54-1255] gi|211592802|emb|CAP99170.1| Pc22g18820 [Penicillium chrysogenum Wisconsin 54-1255]
  misc_feature (1)..(206): NCBI GI: 121706806 Blast Desc: proteasome component Pup3, [Aspergillus clavatus NRRL 1] gi|119399782|gb|EAW10208.1| proteasome component Pup3, [Aspergillus clavatus NRRL 1]
  misc_feature (1)..(206): NCBI GI: 242808757 Blast Desc: proteasome component Pup3, [Talaromyces stipitatus ATCC 10500] gi|218715855|gb|EED15277.1| proteasome component Pup3, [Talaromyces stipitatus ATCC 10500]
  misc_feature (1)..(206): SWISSPROT Homolog: EC 3.4.25.1 Proteasome endopeptidase complex
MSSPFSINGGACVAMVGKDCVAIACDLRLGLQALTVSNNFPKIFQYGEDVFLGLTGLATDVSTVSDLFRYKVNMYRLREERPIAPSTFANLVSSSLYEKRFGPFFVSPVVAGLDPKTGAPFICGFDSIGCIDFAKDFIVSGTASEQLFGMCESLWEPDLAPEDLFETISQALLSAVDRDALSGWGAHVYIIEKNKVTKRLLKGRQD

SEQ ID NO: 8811 - DNA, 4991 bp, Muscodor strobelii
  misc_feature: SGI EST ID NO. CUFF.21258.0
  misc_feature: Variant of the nucleotide sequence at SEQ ID NO 8809
cagtgcgtgtttgccttgtgggtgctgcaacctacctggtaacgaccgactggcatcactgtagccagctctacagccattcaccatccacatcatcgccaaacgacagctactactgcgtgtaagtagagagctaacatcatccctctgcctgccttccacaaccataacagcagccccacgacatcgtcgccgaagtacacgcccgataaacgtagacaagcacaacccgccctctcaagcattcgctttcaccatctcacaggcgtcatcctcccaccatgtcctctcccttctcaataaacggcggcgcctgtgtggccatggtaggtaaggattgcgtagccatcgcctgcgacctgcgtctcggtctgcaagccctcacagtctccaacaacttccccaagatcttccagtacggcgaggacgtcttcctcggcctcacaggcctcgcaacagatgtctccaccgtctccgacctcttccgctacaaggtcaacatgtaccgcctgcgcgaggagcggcccatcgccccctccaccttcgccaacctcgtctcctcctccctgtacgagaagcgcttcggccccttcttcgtgagccccgtcgtcgctggcctcgaccccaagaccggcgcccctttcatctgcggcttcgactcgatcggctgtatcgacttcgccaaggacttcatcgtcagcggcaccgccagcgagcagctctttggcatgtgtgagagtctctgggagcctgatttggcaccagaagatctcttcgaaaccatctcccaagccttgctcagcgccgttgatcgagacgctttatccggctggggtgctcacgtttacatcatcgagaagaacaaggtcactaagcggttactcaaaggacgacaggattaagcaacaaaaaattagatatcaatgagtaatgaagatttcccctattctagagaggagcggctgggattgtgcgtgtgatgcaaagcgccacccacaaccccccgccttcatgaccgggagtcatgagatacggacgaggtctggcagctagcaaagacgcgcatgaaagacaggcccgtcacgcgagacctgtcatctgtaccaatacatgaatagcaaattatagagatgcatttggctgaagtcactgccgctgacatcgcacaaccagcttggactagtgtgaagtcatcataccagtttatcttccatctttgctgaaagctacgtctatgagcaattctcacgcagagctcgagctctaataatctaaaatgtacacgacgccatgctctagtctcgtctatgcatctttcttcgccttactaggctgttctgtgatgttcgggatgaagaattgtctctcaatggccttgagtacctcgtcaatcaatctgtgaaaaaccatcagtaattttgttagtttcgtttatttttggggatagctcacatgactggggcactgatgtacagtactgcttgccactcattccaatttaaaggaaggatggaaaacagtgtctggaggaaaggtgtgtacagtagtgcgaagtgcaaagccatagagaggccaatggcgtatacaagcatcatattagaccagagaggaagtgtcaggagagactcgctggaagacagtgcattcatggcgttcagcatctcgataacaacgagtatagagagtgaaactgtcgatgctgccttggcgttatgatcctcgaacatgctgcagccgatgcttgaaaactcggacgagcatcgatggaagtgagacaattggtagaagctgatctgggggccctcggagttgtacatgaaccaccaggcatatcctcccacagtggcaaggccgacgtaagttcctatgactaggtagcggaagaagagccagccaccaatgagagcttcgtcacgcttgcgaggctgtctgcgcatgatgtcgtggtcgggtgggttgaaggacaacgcagtagcaggaagaccatccgtaactaggttgacccacaggagttggacaggtataagtgcctctggcatgcctagagcagcagtgacaaagatactgacaacctcaccaatattggaagagatgagatatcggatgaactgctgggtgttgttgtagattgatcgaccttcctcaatcgcaacctcgatggtggcaaagttgtcgtcagcaaggaccatgtcggcagcgagcttggagacatcggtaccagagcccatagcaacaccaatatcagctttcttgagtgcaggggcatcattgacgccatcgccggtcatggcaaccacttcgttcagtgattgaaggagatcgacaagcttggacttgtggctgggctcaacacgggagaatagagaggcattcttggcagcctcaagctgctcactaggtgtaagattgtcgaattctcgcccagtgaaactcttgcccttgagatcttcaaattcgctaaacacaccaatctgtcggcaaatgctttcggcagtgttacgattatcaccggtgataacaatgactcgaatgccagcagccatacacttctgaatagccccggcaacctcaggtcgagggggatcgagcatgccaacgaggccgagcagagtaaggttttgttccagttgtgtgtagtgcgtcgacgacttggcagtcttggtcagcggattggatcctacatcatcaaggcttgctagggcgataacacggagcccacgattgccgtagtcaaccacttccttcatgagaagatcgtagagtttcttgtcgagaggaacccgagtgccatttgctccgacaagcgtatgtgtgcatcgctcaatgatggactcaggggcacctttgacgaggagcttttgttgcttcccagcctggacgagaactgacatgctcttgcggtctcgagaaaactcaaaagtggcaaggcggggaacttttgttcatattgagcactggcgtgatggacacagtcttcgggattcgtaccagcaggggcacatggtccaagtttctcggcaagcactcgcaaggcaccctcagtcggctctccaacattggaaaagacggccgatcgggcatcatacatgagctgggcatcgttacagagggcagcaacttcagtcatttgagcaattgtgctggatgtctcagtgaggttttgaacgaccttgccattgcgtttgacatcaccctttggagcaaaagtagtaccctcgacatcaagttcttccaaatcagtgcccttctcattgataaagacgaccttgttcacactcatctggtttgttgtgagagtgccagtcttgtcggaacagatgacgctgcagcttcccagggtttcgaccgacggcaagcttcgaaccacagcattcttcgcagccatcttacgtgttcctagggctagacacgtagtgataacaaccgcaaggccttcggggatagctgcgacaccaagcgacacagcaatcttgaggtaatagatggcacccttggtccagtttccatgactggggtctgcaaaattagggatgttgatgagccagacaagaacacagatgacggtaatgaccttggccagagtatcaccaaaatcattgagcttctgcttcaggggtgtgggctcggaaatctgagccgtgatgctctcgtggatatcgccaatggcggtgttagatcccgtcaagacaacaacagcctttgcccgtcccgtcacgacagtggttccggagaagagcatattggtctgatcttggaggacagccttttcatctttgaccacgttagcatggtccttgcccacgctctcgctttctcctgtcaagatggcctgatcgacagaaaagctgttgctctcgattgaaatgactcgacagtcagcagggatgcggtcgccgacagacaccgagacaatatctccaggcaccagctcctcagctttgattcgaatgacgtgtccgcttcggatgacactcgccacgttggcagagtattcttggagggcggcaatggccttttcagcactgctctcttgagagacaccgacgacggcattgaggatcagtatagtgagaatctaggaggggaggcaaagtcagttcacaagttgacaaatgtgtgcactacaaacttacaacaaggggatcgacgaaggcactccaaccaccttcgtcctcaaaaagagctaggacaaatgacacggcagcagaaccgagaagtatgatgactagttgatccttgaattgctcgagaataagctcccaaagaggagtaggaggttcttcgggtatagctagttgtagacaagacagaattagctttccgtacaatctaatcggacggaggcaatgttgttgcacgctctggagctacaaaacacactgcgacaggtctgcgtgcctaccattctttccgtgcttggttctcaggtcaattacttgcgcatcactaagaccgagcttggggtcgacggcgaagttgtccaagacagccttggtgggctttgcgaatgcgctctccatgcttccaggttggcaggtcttggtggggtgcggctcagggacaggacagcacaacaaaacaagcgaatggaggcgcacggaacagaaacccctgcgccgaccatacaaatgctcagaggagacgcgagttatggcgagtgatgcgatcgtgcagactgcaagaggcagaccagataggatataatgagtgagtgaccggcggcgaagaagacaggaatgcggttcgtcaaagaagccacatgtcttttttaaagttgggacggcgacttagaggtccactgctacggcagagaatgaagatggggctcacgagttgccactgaaagttaccgagtttccggacgacagacacgcgcgtgcacctcgactggcaaatcgatggaggaggtcacaattgtccgtgtagcgcgagggcacagcatatagatcacacatacacgtttgcaagttctctgcgagcacaggaaaagg

SEQ ID NO: 8812 - DNA, 2937 bp, Muscodor strobelii
  misc_feature: SGI cDNA ID NO. 562729
  misc_feature: Reduced expression when VOC is produced
  misc_feature: Encodes the peptide sequence at SEQ ID NO 8813
atggagagcgcattcgcaaagcccaccaaggctgtcttggacaacttcgccgtcgaccccaagctcggtcttagtgatgcgcaagtaattgacctgagaaccaagcacggaaagaatgctatacccgaagaacctcctactcctctttgggagcttattctcgagcaattcaaggatcaactagtcatcatacttctcggttctgctgccgtgtcatttgtcctagctctttttgaggacgaaggtggttggagtgccttcgtcgatccccttgttattctcactatactgatcctcaatgccgtcgtcggtgtctctcaagagagcagtgctgaaaaggccattgccgccctccaagaatactctgccaacgtggcgagtgtcatccgaagcggacacgtcattcgaatcaaagctgaggagctggtgcctggagatattgtctcggtgtctgtcggcgaccgcatccctgctgactgtcgagtcatttcaatcgagagcaacagcttttctgtcgatcaggccatcttgacaggagaaagcgagagcgtgggcaaggaccatgctaacgtggtcaaagatgaaaaggctgtcctccaagatcagaccaatatgctcttctccggaaccactgtcgtgacgggacgggcaaaggctgttgttgtcttgacgggatctaacaccgccattggcgatatccacgagagcatcacggctcagatttccgagcccacacccctgaagcagaagctcaatgattttggtgatactctggccaaggtcattaccgtcatctgtgttcttgtctggctcatcaacatccctaattttgcagaccccagtcatggaaactggaccaagggtgccatctattacctcaagattgctgtgtcgcttggtgtcgcagctatccccgaaggccttgcggttgttatcactacgtgtctagccctaggaacacgtaagatggctgcgaagaatgctgtggttcgaagcttgccgtcggtcgaaaccctgggaagctgcagcgtcatctgttccgacaagactggcactctcacaacaaaccagatgagtgtgaacaaggtcgtctttatcaatgagaagggcactgatttggaagaacttgatgtcgagggtactacttttgctccaaagggtgatgtcaaacgcaatggcaaggtcgttcaaaacctcactgagacatccagcacaattgctcaaatgactgaagttgctgccctctgtaacgatgcccagctcatgtatgatgcccgatcggccgtcttttccaatgttggagagccgactgagggtgccttgcgagtgcttgccgagaaacttggaccatgtgcccctgctgttccccgccttgccacttttgagttttctcgagaccgcaagagcatgtcagttctcgtccaggctgggaagcaacaaaagctcctcgtcaaaggtgcccctgagtccatcattgagcgatgcacacatacgcttgtcggagcaaatggcactcgggttcctctcgacaagaaactctacgatcttctcatgaaggaagtggttgactacggcaatcgtgggctccgtgttatcgccctagcaagccttgatgatgtaggatccaatccgctgaccaagactgccaagtcgtcgacgcactacacacaactggaacaaaaccttactctgctcggcctcgttggcatgctcgatccccctcgacctgaggttgccggggctattcagaagtgtatggctgctggcattcgagtcattgttatcaccggtgataatcgtaacactgccgaaagcatttgccgacagattggtgtgtttagcgaatttgaagatctcaagggcaagagtttcactgggcgagaattcgacaatcttacacctagtgagcagcttgaggctgccaagaatgcctctctattctcccgtgttgagcccagccacaagtccaagcttgtcgatctccttcaatcactgaacgaagtggttgccatgaccggcgatggcgtcaatgatgcccctgcactcaagaaagctgatattggtgttgctatgggctctggtaccgatgtctccaagctcgctgccgacatggtccttgctgacgacaactttgccaccatcgaggttgcgattgaggaaggtcgatcaatctacaacaacacccagcagttcatccgatatctcatctcttccaatattggtgaggttgtcagtatctttgtcactgctgctctaggcatgccagaggcacttatacctgtccaactcctgtgggtcaacctagttacggatggtcttcctgctactgcgttgtccttcaacccacccgaccacgacatcatgcgcagacagcctcgcaagcgtgacgaagctctcattggtggctggctcttcttccgctacctagtcataggaacttacgtcggccttgccactgtgggaggatatgcctggtggttcatgtacaactccgagggcccccagatcagcttctaccaattgtctcacttccatcgatgctcgtccgagttttcaagcatcggctgcagcatgttcgaggatcataacgccaaggcagcatcgacagtttcactctctatactcgttgttatcgagatgctgaacgccatgaatgcactgtcttccagcgagtctctcctgacacttcctctctggtctaatatgatgcttgtatacgccattggcctctctatggctttgcacttcgcactactgtacacacctttcctccagacactgttttccatccttcctttaaattggaatgagtggcaagcagtactgtacatcagtgccccagtcatattgattgacgaggtactcaaggccattgagagacaattcttcatcccgaacatcacagaacagcctagtaaggcgaagaaagatgcatag

SEQ ID NO: 8813 - protein, 978 aa, Muscodor strobelii
  misc_feature: SGI Peptide ID NO. 562729
  misc_feature (342)..(695): Pfam Id: PF00702 Pfam Desc: haloacid dehalogenase-like hydrolase
  misc_feature (790)..(962): Pfam Id: PF00689 Pfam Desc: Cation transporting ATPase, C-terminus
  misc_feature (3)..(77): Pfam Id: PF00690 Pfam Desc: Cation transporter/ATPase, N-terminus
  misc_feature (92)..(338): Pfam Id: PF00122 Pfam Desc: E1-E2 ATPase
  misc_feature (673)..(718): Pfam Id: PF08282 Pfam Desc: haloacid dehalogenase-like hydrolase
  misc_feature (1)..(976): NCBI GI: 6688833 Blast Desc: calcium P-type ATPase [Neurospora crassa]
  misc_feature (1)..(976): NCBI GI: 164427139 Blast Desc: calcium-transporting ATPase sarcoplasmic/endoplasmic reticulum type [Neurospora crassa OR74A] gi|157071623|gb|EAA35246.2| calcium-transporting ATPase reticulum
  misc_feature (1)..(977): NCBI GI: 145603041 Blast Desc: conserved [Magnaporthe grisea 70-15] gi|145011370|gb|EDJ96026.1| conserved [Magnaporthe grisea 70-15]
  misc_feature (1)..(977): NCBI GI: 256734342 Blast Desc: [Nectria haematococca mpVI 77-13-4]
  misc_feature (1)..(977): NCBI GI: 171695998 Blast Desc: protein product [Podospora anserina] gi|170948241|emb|CAP60405.1| protein product [Podospora anserina]
  misc_feature (1)..(977): NCBI GI: 116181898 Blast Desc: conserved [Chaetomium globosum CBS 148.51] gi|88185874|gb|EAQ93342.1| conserved [Chaetomium globosum CBS 148.51]
  misc_feature (1)..(977): NCBI GI: 46108766 Blast Desc: FG01265.1 [Gibberella zeae PH-1]
  misc_feature (1)..(973): NCBI GI: 156036468 Blast Desc: SS1G_12923 [Sclerotinia sclerotiorum 1980] gi|154698328|gb|EDN98066.1| SS1G_12923 [Sclerotinia sclerotiorum 1980]
  misc_feature (52)..(976): NCBI GI: 261357435 Blast Desc: calcium-transporting ATPase sarcoplasmic/endoplasmic reticulum type [Verticillium albo-atrum VaMs.102]
  misc_feature (1)..(978): NCBI GI: 258564690 Blast Desc: calcium-translocating P-type ATPase, SERCA-type [Uncinocarpus reesii 1704] gi|237908597|gb|EEP82998.1| calcium-translocating P-type ATPase, SERCA-type [Uncinocarpus
  misc_feature (1)..(961): SWISSPROT Homolog: EC 3.6.3.8 Calcium-transporting ATPase
  misc_feature: Useful for introducing or modulating the production of volatile compounds
MESAFAKPTKAVLDNFAVDPKLGLSDAQVIDLRTKHGKNAIPEEPPTPLWELILEQFKDQLVIILLGSAAVSFVLALFEDEGGWSAFVDPLVILTILILNAVVGVSQESSAEKAIAALQEYSANVASVIRSGHVIRIKAEELVPGDIVSVSVGDRIPADCRVISIESNSFSVDQAILTGESESVGKDHANVVKDEKAVLQDQTNMLFSGTTVVTGRAKAVVVLTGSNTAIGDIHESITAQISEPTPLKQKLNDFGDTLAKVITVICVLVWLINIPNFADPSHGNWTKGAIYYLKIAVSLGVAAIPEGLAVVITTCLALGTRKMAAKNAVVRSLPSVETLGSCSVICSDKTGTLTTNQMSVNKVVFINEKGTDLEELDVEGTTFAPKGDVKRNGKVVQNLTETSSTIAQMTEVAALCNDAQLMYDARSAVFSNVGEPTEGALRVLAEKLGPCAPAVPRLATFEFSRDRKSMSVLVQAGKQQKLLVKGAPESIIERCTHTLVGANGTRVPLDKKLYDLLMKEVVDYGNRGLRVIALASLDDVGSNPLTKTAKSSTHYTQLEQNLTLLGLVGMLDPPRPEVAGAIQKCMAAGIRVIVITGDNRNTAESICRQIGVFSEFEDLKGKSFTGREFDNLTPSEQLEAAKNASLFSRVEPSHKSKLVDLLQSLNEVVAMTGDGVNDAPALKKADIGVAMGSGTDVSKLAADMVLADDNFATIEVAIEEGRSIYNNTQQFIRYLISSNIGEVVSIFVTAALGMPEALIPVQLLWVNLVTDGLPATALSFNPPDHDIMRRQPRKRDEALIGGWLFFRYLVIGTYVGLATVGGYAWWFMYNSEGPQISFYQLSHFHRCSSEFSSIGCSMFEDHNAKAASTVSLSILVVIEMLNAMNALSSSESLLTLPLWSNMMLVYAIGLSMALHFALLYTPFLQTLFSILPLNWNEWQAVLYISAPVILIDEVLKAIERQFFIPNITEQPSKAKKDA

SEQ ID NO: 8814 - DNA, 4911 bp, Muscodor strobelii
  misc_feature: SGI EST ID NO. CUFF.21259.1
  misc_feature: Variant of the nucleotide sequence at SEQ ID NO 8812
ccttttcctgtgctcgcagagaacttgcaaacgtgtatgtgtgatctatatgctgtgccctcgcgctacacggacaattgtgacctcctccatcgatttgccagtcgaggtgcacgcgcgtgtctgtcgtccggaaactcggtaactttcagtggcaactcgtgagccccatcttcattctctgccgtagcagtggacctctaagtcgccgtcccaactttaaaaaagacatgtggcttctttgacgaaccgcattcctgtcttcttcgccgccggtcactcactcattatatcctatctggtctgcctcttgcagtctgcacgatcgcatcactcgccataactcgcgtctcctctgagcatttgtatggtcggcgcaggggtttctgttccgtgcgcctccattcgcttgttttgttgtgctgtcctgtccctgagccgcaccccaccaagacctgccaacctggaagcatggagagcgcattcgcaaagcccaccaaggctgtcttggacaacttcgccgtcgaccccaagctcggtcttagtgatgcgcaagtaattgacctgagaaccaagcacggaaagaatgctatacccgaagaacctcctactcctctttgggagcttattctcgagcaattcaaggatcaactagtcatcatacttctcggttctgctgccgtgtcatttgtcctagctctttttgaggacgaaggtggttggagtgccttcgtcgatccccttgttattctcactatactgatcctcaatgccgtcgtcggtgtctctcaagagagcagtgctgaaaaggccattgccgccctccaagaatactctgccaacgtggcgagtgtcatccgaagcggacacgtcattcgaatcaaagctgaggagctggtgcctggagatattgtctcggtgtctgtcggcgaccgcatccctgctgactgtcgagtcatttcaatcgagagcaacagcttttctgtcgatcaggccatcttgacaggagaaagcgagagcgtgggcaaggaccatgctaacgtggtcaaagatgaaaaggctgtcctccaagatcagaccaatatgctcttctccggaaccactgtcgtgacgggacgggcaaaggctgttgttgtcttgacgggatctaacaccgccattggcgatatccacgagagcatcacggctcagatttccgagcccacacccctgaagcagaagctcaatgattttggtgatactctggccaaggtcattaccgtcatctgtgttcttgtctggctcatcaacatccctaattttgcagaccccagtcatggaaactggaccaagggtgccatctattacctcaagattgctgtgtcgcttggtgtcgcagctatccccgaaggccttgcggttgttatcactacgtgtctagccctaggaacacgtaagatggctgcgaagaatgctgtggttcgaagcttgccgtcggtcgaaaccctgggaagctgcagcgtcatctgttccgacaagactggcactctcacaacaaaccagatgagtgtgaacaaggtcgtctttatcaatgagaagggcactgatttggaagaacttgatgtcgagggtactacttttgctccaaagggtgatgtcaaacgcaatggcaaggtcgttcaaaacctcactgagacatccagcacaattgctcaaatgactgaagttgctgccctctgtaacgatgcccagctcatgtatgatgcccgatcggccgtcttttccaatgttggagagccgactgagggtgccttgcgagtgcttgccgagaaacttggaccatgtgcccctgctggtacgaatcccgaagactgtgtccatcacgccagtgctcaatatgaacaaaagttccccgccttgccacttttgagttttctcgagaccgcaagagcatgtcagttctcgtccaggctgggaagcaacaaaagctcctcgtcaaaggtgcccctgagtccatcattgagcgatgcacacatacgcttgtcggagcaaatggcactcgggttcctctcgacaagaaactctacgatcttctcatgaaggaagtggttgactacggcaatcgtgggctccgtgttatcgccctagcaagccttgatgatgtaggatccaatccgctgaccaagactgccaagtcgtcgacgcactacacacaactggaacaaaaccttactctgctcggcctcgttggcatgctcgatccccctcgacctgaggttgccggggctattcagaagtgtatggctgctggcattcgagtcattgttatcaccggtgataatcgtaacactgccgaaagcatttgccgacagattggtgtgtttagcgaatttgaagatctcaagggcaagagtttcactgggcgagaattcgacaatcttacacctagtgagcagcttgaggctgccaagaatgcctctctattctcccgtgttgagcccagccacaagtccaagcttgtcgatctccttcaatcactgaacgaagtggttgccatgaccggcgatggcgtcaatgatgcccctgcactcaagaaagctgatattggtgttgctatgggctctggtaccgatgtctccaagctcgctgccgacatggtccttgctgacgacaactttgccaccatcgaggttgcgattgaggaaggtcgatcaatctacaacaacacccagcagttcatccgatatctcatctcttccaatattggtgaggttgtcagtatctttgtcactgctgctctaggcatgccagaggcacttatacctgtccaactcctgtgggtcaacctagttacggatggtcttcctgctactgcgttgtccttcaacccacccgaccacgacatcatgcgcagacagcctcgcaagcgtgacgaagctctcattggtggctggctcttcttccgctacctagtcataggaacttacgtcggccttgccactgtgggaggatatgcctggtggttcatgtacaactccgagggcccccagatcagcttctaccaattgtctcacttccatcgatgctcgtccgagttttcaagcatcggctgcagcatgttcgaggatcataacgccaaggcagcatcgacagtttcactctctatactcgttgttatcgagatgctgaacgccatgaatgcactgtcttccagcgagtctctcctgacacttcctctctggtctaatatgatgcttgtatacgccattggcctctctatggctttgcacttcgcactactgtacacacctttcctccagacactgttttccatccttcctttaaattggaatgagtggcaagcagtactgtacatcagtgccccagtcatattgattgacgaggtactcaaggccattgagagacaattcttcatcccgaacatcacagaacagcctagtaaggcgaagaaagatgcatagacgagactagagcatggcgtcgtgtacattttagattattagagctcgagctctgcgtgagaattgctcatagacgtagctttcagcaaagatggaagataaactggtatgatgacttcacactagtccaagctggttgtgcgatgtcagcggcagtgacttcagccaaatgcatctctataatttgctattcatgtattggtacagatgacaggtctcgcgtgacgggcctgtctttcatgcgcgtctttgctagctgccagacctcgtccgtatctcatgactcccggtcatgaaggcggggggttgtgggtggcgctttgcatcacacgcacaatcccagccgctcctctctagaataggggaaatcttcattactcattgatatctaattttttgttgcttaatcctgtcgtcctttgagtaaccgcttagtgaccttgttcttctcgatgatgtaaacgtgagcaccccagccggataaagcgtctcgatcaacggcgctgagcaaggcttgggagatggtttcgaagagatcttctggtgcctatttgggaagattgaattgttagccgcaacgtaaagatcgatatatatactatatggtacatgagtatactctgggtgacgtaccaaatcaggctcccagagactctcacacatgccaaagagctgctcgctggcggtgccgctgacgatgaagtccttggcgaagtcgatacagccgatcgagtcgaagccgcagatgaaaggggcgccggtcttggggtcgaggccagcgacgacggggctcacgaagaaggggccgaagcgcttctcgtacagggaggaggagacgaggttggcgaaggtggagggggcgatgggccgctcctcgcgcaggcggtacatgttgaccttgtagcggaagaggtcggagacggtggagacatctgttgcgaggcctgtgaggccgaggaagacgtcctcgccgtactggaagatcttggggaagttgttggagactgtgagggcttgcagaccgagacgcaggtcgcaggcgatggctacgcaatccttacctaccatggccacacaggcgccgccgtttattgagaagggagaggactgaggcgcagatgggtcagctctttcgggtgtctcgacgagctcggagcgaagcttaccatggtgggaggatgacgcctgtgagatggtgaaagcgaatgcttgagagggcgggttgtgcttgtctacgtttatcgggcgtgtacttcggcgacgatgtcgtggggctgctgttatggttgtggaaggcaggcagagggatgatgttagctctctacttacacgcagtagtagctgtcgtttggcgatgatgtggatggtgaatggctgtagagctggctacagtgatgccagtcggtcgttaccaggtaggttgcagcacccacaaggcaaacacgcactg

SEQ ID NO: 8815 - DNA, 648 bp, Muscodor strobelii
  misc_feature: SGI cDNA ID NO. 562730
  misc_feature: Encodes the peptide sequence at SEQ ID NO 8816
atggctcaaccaacccctaccttcaagctcgtgcttgttggcgacggtggtaccggcaagaccaccttcgtcaagcgtcacttgacgggtgagttcgagaagaagtacatggccacccttggagtcgaagtccatcctctcggcttcaccaccaacttcggtcagatcactttcgatgtctgggataccgccggccaggagaagtttggtggtctccgtgacggctactacatcaacggccagtgcggtatcatcatgttcgatgtcacctcccgtatcacctacaagaacgtccccaactggcaccgtgatcttgtccgcgtctgcgagaacattcccatcgtcctgtgcggcaacaaggtcgacgtgaaggagcgcaaggtcaaggccaagaccatcaccttccaccgcaagaagaatttgcagtactacgacatctctgccaagtcgaactacaacttcgagaagccgttcctctggttggcccgcaagctcactggcagtcaaagtctggaattcgttgctgctcccgctctggcccctcccactgcccaggtcgacgaggctctccttgagcaataccgcaaagagatggacgaggctgctgccatttctctgcctggcgaggatgatgatgatgacttgtaa

SEQ ID NO: 8816 - protein, 215 aa, Muscodor strobelii
  misc_feature: SGI Peptide ID NO. 562730
  misc_feature (9)..(122): Pfam Id: PF08477 Pfam Desc: Miro-like protein
  misc_feature (9)..(167): Pfam Id: PF00071 Pfam Desc: Ras family
  misc_feature (3)..(215): NCBI GI: 46108434 Blast Desc: RAN_BRUMA GTP-binding nuclear protein RAN/TC4 [Gibberella zeae PH-1] gi|256734422|gb|EEU47768.1| [Nectria haematococca mpVI 77-13-4]
  misc_feature (1)..(213): NCBI GI: 68489336 Blast Desc: RAN-like GTP binding protein [Candida albicans SC5314] gi|68489385|ref|XP_711485.1| RAN-like GTP binding protein [Candida albicans SC5314] gi|126136773|ref|XP_001384910.1| CBS
  misc_feature (1)..(213): NCBI GI: 50423731 Blast Desc: DEHA0F02244g [Debaryomyces hansenii CBS767] gi|49656119|emb|CAG88757.1| DEHA2F01980p [Debaryomyces hansenii]
  misc_feature (1)..(213): NCBI GI: 146421317 Blast Desc: GTP-binding nuclear protein GSP1/Ran [Pichia guilliermondii ATCC 6260] gi|146390023|gb|EDK38181.1| GTP-binding nuclear protein GSP1/Ran [Pichia guilliermondii ATCC 6260]
  misc_feature (2)..(213): NCBI GI: 149245044 Blast Desc: GTP-binding nuclear protein GSP1/Ran [Lodderomyces elongisporus NRRL YB-4239] gi|146449450|gb|EDK43706.1| GTP-binding nuclear protein GSP1/Ran [Lodderomyces elongisporus
  misc_feature (1)..(213): NCBI GI: 54036087 Blast Desc: GSP1_CANAL RecName: Full=GTP-binding nuclear protein GSP1/Ran gi|8698689|gb|AAF78478.1|AF190700_1 small G-protein Gsp1p [Candida albicans]
  misc_feature (1)..(213): NCBI GI: 212531235 Blast Desc: GTP-binding nuclear protein Ran, [Penicillium marneffei ATCC 18224] gi|210071138|gb|EEA25227.1| GTP-binding nuclear protein Ran, [Penicillium marneffei ATCC 18224]
  misc_feature (1)..(213): NCBI GI: 254582176 Blast Desc: ZYRO0D14784p [Zygosaccharomyces rouxii] gi|238939965|emb|CAR28140.1| ZYRO0D14784p [Zygosaccharomyces rouxii]
  misc_feature (1)..(213): NCBI GI: 45201390 Blast Desc: AGR294Cp [Ashbya gossypii ATCC 10895] gi|54036014|sp|Q74ZA9.1|GSP1_ASHGO RecName: Full=GTP-binding nuclear protein GSP1/Ran gi|44986324|gb|AAS54784.1| AGR294Cp ATCC
  misc_feature (1)..(213): NCBI GI: 163866417 Blast Desc: small GTPase [Penicillium marneffei]
MAQPTPTFKLVLVGDGGTGKTTFVKRHLTGEFEKKYMATLGVEVHPLGFTTNFGQITFDVWDTAGQEKFGGLRDGYYINGQCGIIMFDVTSRITYKNVPNWHRDLVRVCENIPIVLCGNKVDVKERKVKAKTITFHRKKNLQYYDISAKSNYNFEKPFLWLARKLTGSQSLEFVAAPALAPPTAQVDEALLEQYRKEMDEAAAISLPGEDDDDDL

SEQ ID NO: 8817 - DNA, 1488 bp, Muscodor strobelii
  misc_feature: SGI EST ID NO. CUFF.21314.1
  misc_feature: Variant of the nucleotide sequence at SEQ ID NO 8815
gtactcttgccgacccccaaaaggaggtacctaagagacctatccgggacatcacgtgagcaccagcgctgattctgccccgcaaccaccagccaatttttcgggcagcccaagcaacgccgctcagccaaaaaaagtcccgcccttcctaaactctttctgcagatcgagcagccagtctatcggtgaacgcaacaccaccaccttacctcccactcaaccgtctctctacatcgcctcgcatcaagcaaaaggtacgacctgcgccagcctcgtctcacgcatctcgccgcagacctctctcccgtccctctgcccgtctctacggccttgcacactcgttgcgcgcagcaagcacagactaaataaacccccacactgacgtcgggtgcaggctccatcctccgctgtttacctctgaccaacgtcgtgcacaatggctcaaccaacccctaccttcaagctcgtgcttgttggcgacggtggtaccggcaagaccaccttcgtcaagcgtcacttgacgggtgagttcgagaagaagtacatggccacccttggagtcgaagtccatcctctcggcttcaccaccaacttcggtcagatcactttcgatgtctgggataccgccggccaggagaagtttggtggtctccgtgacggctactacatcaacggccagtgcggtatcatcatgttcgatgtcacctcccgtatcacctacaagaacgtccccaactggcaccgtgatcttgtccgcgtctgcgagaacattcccatcgtcctgtgcggcaacaaggtcgacgtgaaggagcgcaaggtcaaggccaagaccatcaccttccaccgcaagaagaatttgcagtactacgacatctctgccaagtcgaactacaacttcgagaagccgttcctctggttggcccgcaagctcactggcagtcaaagtctggaattcgttgctgctcccgctctggcccctcccactgcccaggtcgacgaggctctccttgagcaataccgcaaagagatggacgaggctgctgccatttctctgcctggcgaggatgatgatgatgacttgtaaatggattacgacgtttagcttacttgagctaattggggaagcgtggcggtctcgttagtccgagcacgagttgtccacgtgggatgggatagcgtggaatcatgggtacggaagagttatgatgctacgcaaacggaaatgaataggcatgatggactgcagaggggaattttgcgccagccatgggcatgatgggatgcattgatctcagtagcgaaagggatcccgacgtagcgctgcgatgcagcctttagatagcaacccgatagacagctttacggggagacaaaaaaggcgtttaatctctccacctgtgcctttgtctatcattacttcagcgtgcttagtgagaagttcgtacagactcaaaatttcttttcatagtctagggccatgagaacctt

SEQ ID NO: 8818 - DNA, 687 bp, Muscodor strobelii
  misc_feature: SGI cDNA ID NO. 562731
  misc_feature: Encodes the peptide sequence at SEQ ID NO 8819
atggataccatacacgcaccaacggttccttcgggaccatcgtctcactcactgacaaatggcaacgcaaagcacctctcatttgccgaactgcagcagaagaaagataacatagaggccgagctgaaagcgctgggtggtgtcttggattctcataatgccaacatggaaactccgcttatgacgcgggatggctttcctagagctgatatcgacgtggcacaaatacgcactacgagatcacggataattcacctgaagaatgactacaaagacctgatgaatgcgatcgagaaatatcttcatgagcattttgcaagcttacaggagacggacactgttacgtctgccacgacagatagagccaccatgatgggagattcgctgcctcagactctggaagagcctttcgccaaggtcaacagtgtagagagcaacagccctgctgaggctgctggtctgaaggctggcgatgagattcgcaacttcggatacgtgaataaggaaaacaatgagggcctcagaaaagtaggcgagtgtgtgcagggaaacgaagggcaacgtgttctagtcaaagtgtcacgacgagccaacgcgggtgcaagacaagagcttcaactgtacttgacgcctagacgtaactggggaggtcgtggtatgcttggatgtcacatcctgccactataa

SEQ ID NO: 8819 - protein, 228 aa, Muscodor strobelii
  misc_feature: SGI Peptide ID NO. 562731
  misc_feature (1)..(228): NCBI GI: 116181832 Blast Desc: CHGG_01544 [Chaetomium globosum CBS 148.51] gi|88185841|gb|EAQ93309.1| CHGG_01544 [Chaetomium globosum CBS 148.51]
  misc_feature (1)..(219): NCBI GI: 164423074 Blast Desc: NCU11053 [Neurospora crassa OR74A] gi|157069937|gb|EDO64929.1| NCU11053 [Neurospora crassa OR74A]
  misc_feature (1)..(188): NCBI GI: 145605311 Blast Desc: MGG_09953 [Magnaporthe grisea 70-15] gi|145013138|gb|EDJ97779.1| MGG_09953 [Magnaporthe grisea 70-15]
  misc_feature (1)..(186): NCBI GI: 46108432 Blast Desc: FG01098.1 [Gibberella zeae PH-1]
  misc_feature (1)..(228): NCBI GI: 261357306 Blast Desc: 26S proteasome non-ATPase regulatory subunit 9 [Verticillium albo-atrum VaMs.102]
  misc_feature (1)..(228): NCBI GI: 189197459 Blast Desc: 26S proteasome non-ATPase regulatory subunit 9 [Pyrenophora tritici-repentis Pt-1C-BFP] gi|187981015|gb|EDU47641.1| 26S proteasome non-ATPase regulatory
  misc_feature (1)..(188): NCBI GI: 171696052 Blast Desc: protein product [Podospora anserina] gi|170948268|emb|CAP60432.1| protein product [Podospora anserina]
  misc_feature (2)..(228): NCBI GI: 121700236 Blast Desc: 26S proteasome non-ATPase regulatory subunit 9, [Aspergillus clavatus NRRL 1] gi|119396525|gb|EAW06957.1| 26S proteasome non-ATPase regulatory subunit 9, [Aspergillus clavatus
  misc_feature (1)..(228): NCBI GI: 156057587 Blast Desc: SS1G_04525 [Sclerotinia sclerotiorum 1980] gi|154702310|gb|EDO02049.1| SS1G_04525 [Sclerotinia sclerotiorum 1980]
  misc_feature (2)..(228): NCBI GI: 146324520 Blast Desc: 26S proteasome non-ATPase regulatory subunit Nas2 [Aspergillus fumigatus Af293] gi|129557287|gb|EAL89169.2| 26S proteasome non-ATPase regulatory subunit Nas2, [Aspergillus 26S
MDTIHAPTVPSGPSSHSLTNGNAKHLSFAELQQKKDNIEAELKALGGVLDSHNANMETPLMTRDGFPRADIDVAQIRTTRSRIIHLKNDYKDLMNAIEKYLHEHFASLQETDTVTSATTDRATMMGDSLPQTLEEPFAKVNSVESNSPAEAAGLKAGDEIRNFGYVNKENNEGLRKVGECVQGNEGQRVLVKVSRRANAGARQELQLYLTPRRNWGGRGMLGCHILPL

SEQ ID NO: 8820 - DNA, 1342 bp, Muscodor strobelii
  misc_feature: SGI EST ID NO. CUFF.21329.1
  misc_feature: Variant of the nucleotide sequence at SEQ ID NO 8818
tggcggggtaatctgtttgcacggtgccttacacctcccgccattacgtgaacccctccaggcacgtaatgtacgcgttgtaagccgggcatttacagttgccacccgtgaaactgtgaccaacattgatcttgcatttcgcgtatcttatgctctgccggaccatgcaagatcccaaggacaagtacatggccggatcttgttaatgaaccttcctcgcgaatggataccatacacgcaccaacggttccttcgggaccatcgtctcactcactgacaaatggcaacgcaaagcacctctcatttgccgaactgcagcagaagaaagataacatagaggccgagctgaaagcgctgggtggtgtcttggattctcataatgccaacatggaaactccgcttatgacgcgggatggctttcctagagctgatatcgacgtggcacaaatacgcactacgagatcacggataattcacctgaagaatgactacaaagacctgatgaatgcgatcgagaaatatcttcatgagcattttgcaagcttacaggagacggacactgttacgtctgccacgacagatagagccaccatgatgggagattcgctgcctcagactctggaagagcctttcgccaaggtcaacagtgtagagagcaacagccctgctgaggctgctggtctgaaggctggcgatgagattcgcaacttcggatacgtgaataaggaaaacaatgagggcctcagaaaagtaggcgagtgtgtgcagggaaacgaagggcaacgtgttctagtcaaagtgtcacgacgagccaacgcgggtgcaagacaagagcttcaactgtacttgacgcctagacgtaactggggaggtcgtggtatgcttggatgtcacatcctgccactataatcagttcagcaggataatgtgatcatatcatcctatctctggactatgatgcctgacaagcagaccaggaaaccaacagattatcactaactgacgcaagatgttaaaacatatcttttcgactacgatgatggtagtcgatgtttgatcgataatcaacagagactacggaaatgcagatataataaaatcgggcaagaagtgttgagattttgctcaatgcaacaagcagataactaggcatcacctgtatgtaggcagaaatagtggttatgtgtaagcaaaggggctgctcccgagtagatggtcgggcacttggttcttgatgagtcatcttcagtccaacccaacctaaaaaagatgagtagcaaaatctacctgccaaaccacttacacctgatcttcggaacttgatttatgaggtctatatcac

SEQ ID NO: 8821 - DNA, 1191 bp, Muscodor strobelii
  misc_feature: SGI cDNA ID NO. 562732
  misc_feature: Encodes the peptide sequence at SEQ ID NO 8822
atgagactcttctctcataatttgtttcgcatatctcttattggcgtcgtcattggaatttcatctccctcacgatttgataccacgttcgaacagcgaaacgatgtccgatcaccagctggtatatcgaatactctattcgcatcattcgagcgcttgtctcgcctcgtggatatcacgtattgtgtaggaacaacaggcattcgtcagcctttctcatgtctatcgcgatgtaaagattttccctcattggaactagtgacaacttggaacacgggtgccttaatgagcgatagttgtggctatatcgctgtcgaccatggcactgagttcgagcaccgagctatcattattgccttcagaggaacctacagcatcgctaatacggtggtcgacttaagcaccgtgcctcaagaatacgtgccctacccagcgcctggtgacgatgatgacggcgagggaccaagcaagccggatcacatgtgtctgaactgcacagtacacatggggtttttcacatcgtggcagattacaagacgtacgatcttgcccgaattgaaacagctacataaacgttaccccgatcatccaatctatatcattggtcatagtcttggcggcgccgttagtgccctcgccgcgctggagctcaaggtcatactgggatgggatgacattgtggtgacaacatttggcgagccgcgagttggaaatgttgggtttactcgatatctcgatgccgtctttgcactagacgctcaagagatgaacccagagcaggtgatatatcgtcgaattactcacgttgacgatcctgttccgctgctcccgctctccgaatggggctatagagcccacgcaggcgaatttttcatctccaagtacgatttatcgcctgagccaacagacattcgagcttgcattggggactatgatcccaaatgtatagccggctcagaggaagaatcggtggtcaaatcgaaaggtcaggccctctccgacttagaattggaaaatgcggatgccactgcgggtgggatatggcatttaccaacgcgaatcaagccctgggagctattcttcgcccatcgggactatttttggagattaggtctttgtattccgggtggcgatccggttgattggggcaggagtccgtatcctgagcaggcagataatgatgagctataa

SEQ ID NO: 8822 - protein, 396 aa, Muscodor strobelii
  misc_feature: SGI Peptide ID NO. 562732
  misc_feature (117)..(281): Pfam Id: PF01764 Pfam Desc: Lipase (class 3)
  misc_feature (2)..(396): NCBI GI: 256734345 Blast Desc: NECHADRAFT_30998 [Nectria haematococca mpVI 77-13-4]
  misc_feature (10)..(387): NCBI GI: 46108716 Blast Desc: FG01240.1 [Gibberella zeae PH-1]
  misc_feature (10)..(387): NCBI GI: 158562503 Blast Desc: triacylglycerol lipase FGL2 [Gibberella zeae]
  misc_feature (36)..(387): NCBI GI: 219966269 Blast Desc: [Hypocrea lixii]
  misc_feature (42)..(387): NCBI GI: 157061845 Blast Desc: extracellular lipase [Aureobasidium pullulans]
  misc_feature (42)..(387): NCBI GI: 156181702 Blast Desc: extracellular lipase [Aureobasidium pullulans]
  misc_feature (53)..(387): NCBI GI: 164427147 Blast Desc: NCU10506 [Neurospora crassa OR74A] gi|157071626|gb|EDO65275.1| NCU10506 [Neurospora crassa OR74A]
  misc_feature (42)..(396): NCBI GI: 39945146 Blast Desc: MGG_04555 [Magnaporthe grisea 70-15] gi|145011365|gb|EDJ96021.1| MGG_04555 [Magnaporthe grisea 70-15]
  misc_feature (42)..(382): NCBI GI: 212543367 Blast Desc: extracellular triacylglycerol lipase, [Penicillium marneffei ATCC 18224] gi|210066745|gb|EEA20838.1| extracellular triacylglycerol lipase, [Penicillium marneffei ATCC 18224]
  misc_feature (26)..(396): NCBI GI: 171696010 Blast Desc: protein product [Podospora anserina] gi|170948247|emb|CAP60411.1| protein product [Podospora anserina]
  misc_feature (114)..(317): SWISSPROT Homolog: EC 3.1.1.73 Feruloyl esterase
MRLFSHNLFRISLIGVVIGISSPSRFDTTFEQRNDVRSPAGISNTLFASFERLSRLVDITYCVGTTGIRQPFSCLSRCKDFPSLELVTTWNTGALMSDSCGYIAVDHGTEFEHRAIIIAFRGTYSIANTVVDLSTVPQEYVPYPAPGDDDDGEGPSKPDHMCLNCTVHMGFFTSWQITRRTILPELKQLHKRYPDHPIYIIGHSLGGAVSALAALELKVILGWDDIVVTTFGEPRVGNVGFTRYLDAVFALDAQEMNPEQVIYRRITHVDDPVPLLPLSEWGYRAHAGEFFISKYDLSPEPTDIRACIGDYDPKCIAGSEEESVVKSKGQALSDLELENADATAGGIWHLPTRIKPWELFFAHRDYFWRLGLCIPGGDPVDWGRSPYPEQADNDEL

SEQ ID NO: 8823 - DNA, 2418 bp, Muscodor strobelii
  misc_feature: SGI EST ID NO. CUFF.21167.1
  misc_feature: Variant of the nucleotide sequence at SEQ ID NO 8821
tcgcctattaactcagaacagcagttcttcggaacaatttgaagcagcaggacagatcacgcctcatctcgactgcaccaattctaccaccattgcgacatgtaccgccaatgagacaactatcactggtgattacgacagcttcgaacctgttccaacggatgcacctttgcgaagattttcgcgaacattaagagtgtaatgatgcgtcaggaagccttggaattcgaatagtcttgtgtccataacaaggacatcgccggctgagaggaggcacatccgagttgacctattcccgatttcgttgtcaaagtatctaatatgtattgggatgtcagcagtcaaagcataatatgttgggaggatgattaccgtctatcacaatggcagcggctcgatccgttgccagtggatcgcttccaaggtatcgtaaggaggtacctgattaatgggcattcagctacactacttcatggatgtttacccctggactcttgcttcttcaaccaaaataattatgtgaatttgaaacaaacagtgtctatggagttaggtaggaagagcttacttaatccccatgatattctgtgcttagtaggaccccataaggtacctcaccaacgggtgtggcttggagtagcagttgacatgcagctgggggttggggtcattcttcattgtaattggtgcccttcagaacgcgttgagcctgaacttacaactctttgatcacacgaccctgccatttccatttgcgattcactgacgcaatacacctcacttcagctttcacgttgtgatgtccagctcaggttgctttcatacccccctgcaacaccgaatcaatcgattcgccatcaatgtccgacctaaattcctataagctgtgaagctttcagcatccaagatatgattgttgacatttccccaatctgccgtgtgtagcgaacgccgtcaaatccaactagaagcgcatactcgtaccgcgatgagactcttctctcataatttgtttcgcatatctcttattggcgtcgtcattggaatttcatctccctcacgatttgataccacgttcgaacagcgaaacgatgtccgatcaccagctggtatatcgaatactctattcgcatcattcgagcgcttgtctcgcctcgtggatatcacgtattgtgtaggaacaacaggcattcgtcagcctttctcatgtctatcgcgatgtaaagattttccctcattggaactagtgacaacttggaacacgggtgccttaatgagcgatagttgtggctatatcgctgtcgaccatggcactgagttcgagcaccgagctatcattattgccttcagaggaacctacagcatcgctaatacggtggtcgacttaagcaccgtgcctcaagaatacgtgccctacccagcgcctggtgacgatgatgacggcgagggaccaagcaagccggatcacatgtgtctgaactgcacagtacacatggggtttttcacatcgtggcagattacaagacgtacgatcttgcccgaattgaaacagctacataaacgttaccccgatcatccaatctatatcattggtcatagtcttggcggcgccgttagtgccctcgccgcgctggagctcaaggtcatactgggatgggatgacattgtggtgacaacatttggcgagccgcgagttggaaatgttgggtttactcgatatctcgatgccgtctttgcactagacgctcaagagatgaacccagagcaggtgatatatcgtcgaattactcacgttgacgatcctgttccgctgctcccgctctccgaatggggctatagagcccacgcaggcgaatttttcatctccaagtacgatttatcgcctgagccaacagacattcgagcttgcattggggactatgatcccaaatgtatagccggctcagaggaagaatcggtggtcaaatcgaaaggtcaggccctctccgacttagaattggaaaatgcggatgccactgcgggtgggatatggcatttaccaacgcgaatcaagccctgggagctattcttcgcccatcgggactatttttggagattaggtctttgtattccgggtggcgatccggttgattggggcaggagtccgtatcctgagcaggcagataatgatgagctataagaggaacatccattgcatttcatcaaacggcccaataggggtgaaggaagtttcagctcttgaaaatcgatccgggaagtggtaggtcagcctagaatgacctgattcagttgatatcctgagaaacacattggataggttggaattgtaagggctactgggttcttgttaaataaattaaataaatcatgagcactttgctaccattcacagaaggcatagaaatcgatttggaccgc

SEQ ID NO: 8824 - DNA, 825 bp, Muscodor strobelii
  misc_feature: SGI cDNA ID NO. 562733
  misc_feature: Encodes the peptide sequence at SEQ ID NO 8825
atgactaccgaacgtgagagcaagactttccttgcccgcctctgcgagcaggccgagcgatacgatgagatggtcacctacatgaaggaggtcgccaagctcggcggggagctcagcgtcgatgagcgcaacctcctgtcggtcgcctacaagaacgttgtcggcacccgccgtgcctcgtggcgcatcatctcctccatcgagcagaaggaggagcagaagggctccgacaagcacgtctccaccatcaaggactaccgaaacaagattgagaccgagctcgagaaggtctgccaagacgtcttggacgttctggacgacagcctgatccccaatgctgcctctggcgagtccaaggtcttctaccacaagatgaagggtgactaccaccgctacctcgcagagttcgcttctggagagaagcgcaaggttgctgccaccgccgctcacgaggcttacaagagcgccacggatgttgcccagaccgagctcacccccacacaccccatccgtctcggtctcgcccttaacttctccgtattctactacgagattctcaactcgcccgaccgtgcttgccacctcgccaagcaggctttcgacgatgccatcgccgagcttgattcgctgtctgaggagtcttaccgcgacagcacccttatcatgcagttgctccgagacaacctcactctctggacctccagcgacagtgctgagggcgaggctgccgccgctgcccaagaggctcccaaggatgacaagcctgctgaggaggccgagaagcccaaggaggaggaggctcctgccgcagcccctgagtcgtaa

SEQ ID NO: 8825 - protein, 274 aa, Muscodor strobelii
  misc_feature: SGI Peptide ID NO. 562733
  misc_feature (5)..(240): Pfam Id: PF00244 Pfam Desc: 14-3-3 protein
  misc_feature (1)..(274): NCBI GI: 145603031 Blast Desc: MGG_13806 [Magnaporthe grisea 70-15] gi|145011362|gb|EDJ96018.1| MGG_13806 [Magnaporthe grisea 70-15]
  misc_feature (1)..(274): NCBI GI: 154308468 Blast Desc: 14-3-3 protein [Botryotinia fuckeliana B05.10] gi|150852835|gb|EDN28027.1| 14-3-3 protein [Botryotinia fuckeliana B05.10]
  misc_feature (1)..(272): NCBI GI: 156036464 Blast Desc: conserved [Sclerotinia sclerotiorum 1980] gi|154698326|gb|EDN98064.1| conserved [Sclerotinia sclerotiorum 1980]
  misc_feature (1)..(272): NCBI GI: 256734346 Blast Desc: [Nectria haematococca mpVI 77-13-4]
  misc_feature (1)..(274): NCBI GI: 145255758 Blast Desc: An18g06270 [Aspergillus niger] gi|134084674|emb|CAK43352.1| protein product [Aspergillus niger]
  misc_feature (7)..(268): NCBI GI: 116181886 Blast Desc: CHGG_01571 [Chaetomium globosum CBS 148.51] gi|88185868|gb|EAQ93336.1| CHGG_01571 [Chaetomium globosum CBS 148.51]
  misc_feature (1)..(253): NCBI GI: 12054276 Blast Desc: 14-3-3-like protein [Hypocrea jecorina]
  misc_feature (1)..(274): NCBI GI: 259484779 Blast Desc: TPA: 14-3-3 protein (Eurofung) [Aspergillus nidulans FGSC A4]
  misc_feature (1)..(260): NCBI GI: 226282286 Blast Desc: DNA damage checkpoint protein rad24 [Paracoccidioides brasiliensis Pb01]
  misc_feature (1)..(260): NCBI GI: 30351156 Blast Desc: 14-3-3-like protein [Paracoccidioides brasiliensis]
MTTERESKTFLARLCEQAERYDEMVTYMKEVAKLGGELSVDERNLLSVAYKNVVGTRRASWRIISSIEQKEEQKGSDKHVSTIKDYRNKIETELEKVCQDVLDVLDDSLIPNAASGESKVFYHKMKGDYHRYLAEFASGEKRKVAATAAHEAYKSATDVAQTELTPTHPIRLGLALNFSVFYYEILNSPDRACHLAKQAFDDAIAELDSLSEESYRDSTLIMQLLRDNLTLWTSSDSAEGEAAAAAQEAPKDDKPAEEAEKPKEEEAPAAAPES

SEQ ID NO: 8826 - DNA, 2473 bp, Muscodor strobelii
  misc_feature: SGI EST ID NO. CUFF.21410.0
  misc_feature: Variant of the nucleotide sequence at SEQ ID NO 8824
gttgcgcatgatcattcgttgaaacaaacaagaggtatcgttgtgaggtgggtgtcatggttcaaagagatgggggtgaaggtacgagctggtgattcaatgagggcacctagaggaagtaccaggcacctccaaatgccgcgcccagtgcagacgcacgggccagtggtaggtcattgtcggtgggtttggcgtagagtcttggggggcacgccaggcctgccttctcctcccgcaccccaaacctcaccattttgacggcgagcatccaaacccgatttcttgttgtaaacaactcctgcacgtcccagcatttcttcgacacttgcagccgcaacatcgccaaccatcatctcccgctccttgtcccagcatcttcacccgtaccacctacatccccagaaaccccctcacattgcccaacatgactaccgaacgtgagaggtacgttagctgaaccttccgtggctccggaggcgatgaagccgttggctagtctttgcttgttgcgcttgtttctaggactaaccctccgccctcctcacagcaagactttccttgcccgcctctgcgagcaggccgagcgatacgatgagatggtcacctacatgaaggaggtcgccaagctcggcggggagctcagcgtcgatgagcgcaacctcctgtcggtcgcctacaagaacgttgtcggcacccgccgtgcctcgtggcgcatcatctcctccatcgagcagaaggaggagcagaagggctccgacaagcacgtctccaccatcaaggactaccgaaacaagattgagaccgagctcgagaaggtctgccaagacgtcttggacgttctggacgacagcctgatccccaatgctgcctctggcgagtccaaggtcttctaccacaagatgaagggtgactaccaccgctacctcgcagagttcgcttctggagagaagcgcaaggttgctgccaccgccgctcacgaggcttacaagagcgccacggatgttgcccagaccgagctcacccccacacaccccatccgtctcggtctcgcccttaacttctccgtattctactacgagattctcaactcgcccgaccgtgcttgccacctcgccaagcaggctttcgacgatgccatcgccgagcttgattcgctgtctgaggagtcttaccgcgacagcacccttatcatgcagttgctccgagacaacctcactctctggacctccagcgacagtgctgagggcgaggctgccgccgctgcccaagaggctcccaaggatgacaagcctgctgaggaggccgagaagcccaaggaggaggaggctcctgccgcagcccctgagtcgtaaaagaaccttctctgggactacccccttatctcaactgagtgggaccgtgtgctctaaggaccctctcggtaacttgagttttatcgatacccaggtggcgaagaattcagcattggatgggagagacgcttgggagttggtctgatgcaaggctgaaaaatgcgaactgttgatttcccgtatcgctttttctctcgtgaatcattgtcagtcgagtctgctgcgacttcgacacgtctgcccaccgcgcagtgacagtgccacaaacgtcatcagaccgttattcgactatgttctgtcgctgtgtatagggcgcaagacgatgcgggacgctgtggttactgggccgtgggccttgatttcttgtcttttttcgttttagctgcacgaccccttgtttgttggtttgtttttgtgtgagatgctgtgttttctcttgcatggtctacgctaaagtctcgatgtcttgctgcgaaggaggggatgggagggcgaatttgctttcgtacacattcgaccagcttgcgcaacagtcggtaccttgcaaattgaaatcctcggaggcttgatgtagcatgatctggcttgggcggcctttgggcttactcatctctacctccacctggtaacagcatgtcctgctcaagagggcaccgagccatccagactatatgattaagcagcactcagaagtaaaaaagaaaaacccgactgcagatacaacgaagtttagacctctaattacgtgactgcctgttgtgtcaagccggctcgatgcatacctacggtgttgtggtgcaggccacataaacgataaggttagtatacgttagcacgaagtatcagacgagttctagctgtgcaaacctacaagagaatgcggtttgatatgcaactgacgggacttccttaccccattcaattagactaggtgttgcgtagaatactcagcagtgtttaagatgtacaggtatatcttgtcaatctgtttgttcaggccgattatctcatgtatctcattacaggtctagataaacgtcacgcgtatgagcagtttctccgggagactgaggctgtatcaagttcgcaaccagatgatttgggatgtacttgacgaaaat

SEQ ID NO: 8827 - DNA, 3969 bp, Muscodor strobelii
  misc_feature: SGI cDNA ID NO. 562734
  misc_feature: Reduced expression when VOC is produced
  misc_feature: Encodes the peptide sequence at SEQ ID NO 8828
atggatcagtaccagcacccgtccgtcgcccgcagcgtgcctgctcctccgcccgccaccgacagaccgagccagctcctgatccgcgactaccctcaccgcgccatcgccattgtcaccaacgaccatgccctcgtcttccgctacagctccaccacgaccgaggccatcgccgacggctccctcgtctccgtcggctcctcgcgctcccgcctcaacagcgagccgctggcctccaaatgcatggtcgagtttgcgccggtctcgcgccaactgctgagcgacttccgtcctctgatcccgcggcccgtctacggcacgctgggcctcattgccatcaaccacgacgtcttcctcagcgttataacccatgcgtcgcgcgttgccaccctgcgccccggcgagtccgtcgagaagattgtcaccgtcgacttcttctgtctcaacagcgccgaatacgatcatgtcatctccctcaatccctacgagaacgatgcctccgacggctacagccagaacctgggtcgtcgcgacggcgagatagagtacccctaccaggagctgcagaaattgctgagcaatggcagtttttactatagcaccaacttcgatcttaccaatagactacaagatagaccggtagactcggatacctttgatattgataatttcgatgatgcatttctgtggaactctttcatgatcaacccgttggttcagtttcggtcccggcttatggcacacgagcgtgaggcattggatgcgtcgagaatcctgacgtcggccatcagaggattttgtctgaccatgaccatacctcaaccatctgcgcccttacgcgattccaaatccgggcttccctcctttctcactgtcatctcccgtctatcgtgcaggagagcgggcacacgcttcaatagtcgtggaattgacgatgacggacatgtggccaactttgttgagacggagacgatttattggagcccttctggtgtactgttctcatacgcgcaagtccgcggctctgtgccggtcttttgggaacagactgctgggctggttcccggacagcagaagattgccgtcacccgctcggctgacgggacccaaccggcattcaacaaacatttcgaagaactcgagaagacttatggtgccgtccatattgtgaatcttctcagcgcttccaaacccggtgaggccgagcttacaaatttatatcattatggagttcagcattgcccgctcagccggccaggccaggcccaatggtcggaccacgctctgttgcgtgaaacagactatgatttccacgctgaaacgaaggttctgggttatgaagcggccaaagacatccgccgctacatcgaagattccgctgatggatttgcgtactatcttgcagagcaggcagatgatcaggtgggcttcgagcacagtgcaaagagcgacatccggaccgttgttgtattgcagcaagaaggcgtcttccggacaaactgtcttgactgtttagacagaacgaacttgatccagacactcatatcgcaactggctgtcgaagcgtttctcggacatcgaggtgtctttgcatctcctgatttctggatgcggcatagcacgctttgggccgacaatggcgatgctctttccaagatatacgcggggaccggtgccttgaagtcgtcatttacgagacacggtaaaatgtcctttgctggtgctattgcagacgtacggaagagtgctacaagactctacatcaataacttcgcggacaaggcgaggcaaaatacaattgatatgctgttggggagactcatgggacaagcacctgtccacttgtttgaccctatcagtgattttgtttcaatggagctcaataagcgtagtcccgagttctcctctactgagtctatcaccctctgggttggaacgttcaatttgaacggccggacaaccggaattaacgatgatctatccccatggctctggccacaaatgttaggttcttccatgaacccagatatctttgccgttggctttcaagaaattgtcgaattgagcgcccagcagattatgaacagtgatcctacgcgaaaacaagagtgggagaaagctatcaagacagcccttaacagtcgtgctaaggaaaccgggggagacaagtatgtcttgttacgaagcgggcaattggtcggtgcagctctatgtatttttgtgaaggcatccgtacttccaaaaataaaaaatgtggaaggtagtgtcaagaaaactggcatgtcaggcattgctggtaacaaaggagccgttgcaatcaggatggactatgctaatacacagctgtgctttgttactgctcatcttgcggctggattttcgaactacgatgagagaaataaggattatgccactatacaccatggactgaggttccagagaaataggggcatagatgaccatgatactgttatttggatgggcgatttcaattatcgcattggattgtcccatgagagagcaatggatcttgtcaaacaccaagacctagagaaactctacgagaatgaccagttaaatctgcaaatggtcgctgggctatcttttccatattattccgaagctaggattacgttcatgcccacgtacaaattcgacgttggaacggatcgatatgatacttccgagaaagcgcgtattcctgcgtggacagatcgaatattgcgcaagggaacaaacataaaacagttgtcatataactgcgctcctttgcgtttctctgaccatcggcccgtttacgctaccttttcatgcactgtaaatatcgtgaacgaagacgtccgcgagagaatcagtcgtgagctttaccatcgccgcaaggcagaggtcggccacactgccgcaacactaaatagtgaagattcagaggatgatgaagaccttatcggctacgatcctatcgagccaggcttaccggctgctagttcggatcagcaacgatggtggctcgacaacggtaagatggcaaaatccgcagctgctccgcccaagatgaacactggtgggagcgattactcgtcggtcgttctgaaccctggtcgttcatcaaatccattcagtgctacggaagaacccgaatgggttgccgtgcctcgggctgattcacgtctttcctctttctcatccagcatttccagctcgccatacgaacatattaatcattcgacaattctttctacatcgacttctggttctgcacctcggaagctaccacctccattcgacgcttctgccttaccggcgaagattggccgactgaatcttgcagacgagtcggcctcggcccagagaaacggtggtgcacctcccccaccaccgccgcggagacagacgaatggggatggtgtccaatcgccagtagctgcaacttcttctaggccacgcaatattccgcagatgaagactaattcgcctcgcagagtggtttcatcttcttcacaggtctccataaaatcttcgaggacaccgccccccgtagcgaagaagcccgcccatcttgcgtcgacatcacctccaaatagtccgccaaaagcacccgagccgagtgtcttcggctcgtttgatggccaaacaccaaaaccagatcttccacgtcgagcaacgtcaagtcatatttcggaattgacatctcagttggatgcgaaaggttccggaaggttaacgggaggcatgcatccggtgaggactaatcaacccgcgccacgcatattggggcagagtataccgcaagtgtcatcaagcgctgttagtctgcctggcttagcaagagaggagcgtaaacctgtcctgccaaacagaccccagcctcagcgaaagccgcttccacatgctgctagatcgcagaccatagatctccttggtgatacagggtttgagatgcacggatatgagacattaaaacccagttag

SEQ ID NO: 8828 - protein, 1322 aa, Muscodor strobelii
  misc_feature: SGI Peptide ID NO. 562734
  misc_feature (642)..(936): Pfam Id: PF03372 Pfam Desc: Endonuclease/Exonuclease/phosphatase family
  misc_feature (104)..(449): Pfam Id: PF02383 Pfam Desc: SacI homology domain
  misc_feature (104)..(407): Pfam Id: PF02383 Pfam Desc: SacI homology domain
  misc_feature (5)..(1322): NCBI GI: 46108722 Blast Desc: FG01243.1 [Gibberella zeae PH-1]
  misc_feature (9)..(1195): NCBI GI: 39945134 Blast Desc: MGG_04549 [Magnaporthe grisea 70-15] gi|145011371|gb|EDJ96027.1| MGG_04549 [Magnaporthe grisea 70-15]
  misc_feature (1)..(1322): NCBI GI: 116181882 Blast Desc: CHGG_01569 [Chaetomium globosum CBS 148.51] gi|88185866|gb|EAQ93334.1| CHGG_01569 [Chaetomium globosum CBS 148.51]
  misc_feature (18)..(1016): NCBI GI: 261357427 Blast Desc: synaptojanin-1 [Verticillium albo-atrum VaMs.102]
  misc_feature (25)..(1322): NCBI GI: 156057511 Blast Desc: SS1G_04487 [Sclerotinia sclerotiorum 1980] gi|154702272|gb|EDO02011.1| SS1G_04487 [Sclerotinia sclerotiorum 1980]
  misc_feature (25)..(1056): NCBI GI: 169601596 Blast Desc: SNOG_03666 [Phaeosphaeria nodorum SN15] gi|111067751|gb|EAT88871.1| SNOG_03666 [Phaeosphaeria nodorum SN15]
  misc_feature (25)..(1190): NCBI GI: 154324042 Blast Desc: BC1G_00420 [Botryotinia fuckeliana B05.10] gi|150842649|gb|EDN17842.1| BC1G_00420 [Botryotinia fuckeliana B05.10]
  misc_feature (25)..(1282): NCBI GI: 225680794 Blast Desc: synaptojanin-1 [Paracoccidioides brasiliensis Pb03]
  misc_feature (25)..(1282): NCBI GI: 226292490 Blast Desc: SacI domain and endonuclease/exonuclease/phosphatase family protein [Paracoccidioides brasiliensis Pb18]
  misc_feature (25)..(1055): NCBI GI: 154278848 Blast Desc: conserved [Ajellomyces capsulatus NAm1] gi|150412180|gb|EDN07567.1| conserved [Ajellomyces capsulatus NAm1]
  misc_feature (25)..(1049): SWISSPROT Homolog: EC 3.1.3.36 Phosphoinositide 5-phosphatase
  misc_feature: Useful for introducing or modulating the production of volatile compounds
MDQYQHPSVARSVPAPPPATDRPSQLLIRDYPHRAIAIVTNDHALVFRYSSTTTEAIADGSLVSVGSSRSRLNSEPLASKCMVEFAPVSRQLLSDFRPLIPRPVYGTLGLIAINHDVFLSVITHASRVATLRPGESVEKIVTVDFFCLNSAEYDHVISLNPYENDASDGYSQNLGRRDGEIEYPYQELQKLLSNGSFYYSTNFDLTNRLQDRPVDSDTFDIDNFDDAFLWNSFMINPLVQFRSRLMAHEREALDASRILTSAIRGFCLTMTIPQPSAPLRDSKSGLPSFLTVISRLSCRRAGTRFNSRGIDDDGHVANFVETETIYWSPSGVLFSYAQVRGSVPVFWEQTAGLVPGQQKIAVTRSADGTQPAFNKHFEELEKTYGAVHIVNLLSASKPGEAELTNLYHYGVQHCPLSRPGQAQWSDHALLRETDYDFHAETKVLGYEAAKDIRRYIEDSADGFAYYLAEQADDQVGFEHSAKSDIRTVVVLQQEGVFRTNCLDCLDRTNLIQTLISQLAVEAFLGHRGVFASPDFWMRHSTLWADNGDALSKIYAGTGALKSSFTRHGKMSFAGAIADVRKSATRLYINNFADKARQNTIDMLLGRLMGQAPVHLFDPISDFVSMELNKRSPEFSSTESITLWVGTFNLNGRTTGINDDLSPWLWPQMLGSSMNPDIFAVGFQEIVELSAQQIMNSDPTRKQEWEKAIKTALNSRAKETGGDKYVLLRSGQLVGAALCIFVKASVLPKIKNVEGSVKKTGMSGIAGNKGAVAIRMDYANTQLCFVTAHLAAGFSNYDERNKDYATIHHGLRFQRNRGIDDHDTVIWMGDFNYRIGLSHERAMDLVKHQDLEKLYENDQLNLQMVAGLSFPYYSEARITFMPTYKFDVGTDRYDTSEKARIPAWTDRILRKGTNIKQLSYNCAPLRFSDHRPVYATFSCTVNIVNEDVRERISRELYHRRKAEVGHTAATLNSEDSEDDEDLIGYDPIEPGLPAASSDQQRWWLDNGKMAKSAAAPPKMNTGGSDYSSVVLNPGRSSNPFSATEEPEWVAVPRADSRLSSFSSSISSSPYEHINHSTILSTSTSGSAPRKLPPPFDASALPAKIGRLNLADESASAQRNGGAPPPPPPRRQTNGDGVQSPVAATSSRPRNIPQMKTNSPRRVVSSSSQVSIKSSRTPPPVAKKPAHLASTSPPNSPPKAPEPSVFGSFDGQTPKPDLPRRATSSHISELTSQLDAKGSGRLTGGMHPVRTNQPAPRILGQSIPQVSSSAVSLPGLAREERKPVLPNRPQPQRKPLPHAARSQTIDLLGDTGFEMHGYETLKPS

SEQ ID NO: 8829 - DNA, 5002 bp, Muscodor strobelii
  misc_feature: SGI EST ID NO. CUFF.21201.0
  misc_feature: Variant of the nucleotide sequence at SEQ ID NO 8827
tttcgttacgacgtcacaggctgactacggtgcttgtgcttggactacgtgcgccgccgaccggtgtcaggacggcagcaagcacgaggacaagagcacaagagcacacgagcacacgagcagggcatctacacgcgttcgctgctctcgtcgggctcgccgccatccaactagcatgtgctcgagtccagctccagagccggcatggatcagtaccagcacccgtccgtcgcccgcagcgtgcctgctcctccgcccgccaccgacagaccgagccagctcctgatccgcgactaccctcaccgcgccatcgccattgtcaccaacgaccatgccctcgtcttccgctacagctccaccacgaccgaggccatcgccgacggctccctcgtctccgtcggctcctcgcgctcccgcctcaacagcgagccgctggcctccaaatgcatggtcgagtttgcgccggtctcgcgccaactgctgagcgacttccgtcctctgatcccgcggcccgtctacggcacgctgggcctcattgccatcaaccacgacgtcttcctcagcgttataacccatgcgtcgcgcgttgccaccctgcgccccggcgagtccgtcgagaagattgtcaccgtcgacttcttctgtctcaacagcgccgaatacgatcatgtcatctccctcaatccctacgagaacgatgcctccgacggctacagccagaacctgggtcgtcgcgacggcgagatagagtacccctaccaggagctgcagaaattgctgagcaatggcagtttttactatagcaccaacttcgatcttaccaatagactacaagatagaccggtagactcggatacctttgatattgataatttcgatgatgcatttctgtggaactctttcatgatcaacccgttggttcagtttcggtcccggcttatggcacacgagcgtgaggcattggatgcgtcgagaatcctgacgtcggccatcagaggattttgtctgaccatgaccatacctcaaccatctgcgcccttacgcgattccaaatccgggcttccctcctttctcactgtcatctcccgtctatcgtgcaggagagcgggcacacgcttcaatagtcgtggaattgacgatgacggacatgtggccaactttgttgagacggagacgatttattggagcccttctggtgtactgttctcatacgcgcaagtccgcggctctgtgccggtcttttgggaacagactgctgggctggttcccggacagcagaagattgccgtcacccgctcggctgacgggacccaaccggcattcaacaaacatttcgaagaactcgagaagacttatggtgccgtccatattgtgaatcttctcagcgcttccaaacccggtgaggccgagcttacaaatttatatcattatggagttcagcattgcccgctcagccggccaggccaggcccaatggtcggaccacgctctgttgcgtgaaacagactatgatttccacgctgaaacgaaggttctgggttatgaagcggccaaagacatccgccgctacatcgaagattccgctgatggatttgcgtactatcttgcagagcaggcagatgatcaggtgggcttcgagcacagtgcaaagagcgacatccggaccgttgttgtattgcagcaagaaggcgtcttccggacaaactgtcttgactgtttagacagaacgaacttgatccagacactcatatcgcaactggctgtcgaagcgtttctcggacatcgaggtgtctttgcatctcctgatttctggatgcggcatagcacgctttgggccgacaatggcgatgctctttccaagatatacgcggggaccggtgccttgaagtcgtcatttacgagacacggtaaaatgtcctttgctggtgctattgcagacgtacggaagagtgctacaagactctacatcaataacttcgcggacaaggcgaggcaaaatacaattgatatgctgttggggagactcatgggacaagcacctgtccacttgtttgaccctatcagtgattttgtttcaatggagctcaataagcgtagtcccgagttctcctctactgagtctatcaccctctgggttggaacgttcaatttgaacggccggacaaccggaattaacgatgatctatccccatggctctggccacaaatgttaggttcttccatgaacccagatatctttgccgttggctttcaagaaattgtcgaattgagcgcccagcagattatgaacagtgatcctacgcgaaaacaagagtgggagaaagctatcaagacagcccttaacagtcgtgctaaggaaaccgggggagacaagtatgtcttgttacgaagcgggcaattggtcggtgcagctctatgtatttttgtgaaggcatccgtacttccaaaaataaaaaatgtggaaggtagtgtcaagaaaactggcatgtcaggcattgctggtaacaaaggagccgttgcaatcaggatggactatgctaatacacagctgtgctttgttactgctcatcttgcggctggattttcgaactacgatgagagaaataaggattatgccactatacaccatggactgaggttccagagaaataggggcatagatgaccatgatactgttatttggatgggcgatttcaattatcgcattggattgtcccatgagagagcaatggatcttgtcaaacaccaagacctagagaaactctacgagaatgaccagttaaatctgcaaatggtcgctgggctatcttttccatattattccgaagctaggattacgttcatgcccacgtacaaattcgacgttggaacggatcgatatgatacttccgagaaagcgcgtattcctgcgtggacagatcgaatattgcgcaagggaacaaacataaaacagttgtcatataactgcgctcctttgcgtttctctgaccatcggcccgtttacgctaccttttcatgcactgtaaatatcgtgaacgaagacgtccgcgagagaatcagtcgtgagctttaccatcgccgcaaggcagaggtcggccacactgccgcaacactaaatagtgaagattcagaggatgatgaagaccttatcggctacgatcctatcgagccaggcttaccggctgctagttcggatcagcaacgatggtggctcgacaacggtaagatggcaaaatccgcagctgctccgcccaagatgaacactggtgggagcgattactcgtcggtcgttctgaaccctggtcgttcatcaaatccattcagtgctacggaagaacccgaatgggttgccgtgcctcgggctgattcacgtctttcctctttctcatccagcatttccagctcgccatacgaacatattaatcattcgacaattctttctacatcgacttctggttctgcacctcggaagctaccacctccattcgacgcttctgccttaccggcgaagattggccgactgaatcttgcagacgagtcggcctcggcccagagaaacggtggtgcacctcccccaccaccgccgcggagacagacgaatggggatggtgtccaatcgccagtagctgcaacttcttctaggccacgcaatattccgcagatgaagactaattcgcctcgcagagtggtttcatcttcttcacaggtctccataaaatcttcgaggacaccgccccccgtagcgaagaagcccgcccatcttgcgtcgacatcacctccaaatagtccgccaaaagcacccgagccgagtgtcttcggctcgtttgatggccaaacaccaaaaccagatcttccacgtcgagcaacgtcaagtcatatttcggaattgacatctcagttggatgcgaaaggttccggaaggttaacgggaggcatgcatccggtgaggactaatcaacccgcgccacgcatattggggcagagtataccgcaagtgtcatcaagcgctgttagtctgcctggcttagcaagagaggagcgtaaacctgtcctgccaaacagaccccagcctcagcgaaagccgcttccacatgctgctagatcgcagaccatagatctccttggtgatacagggtttgagatgcacggatatgagacattaaaacccagttagacctggctatgcaacgaaaactcgcaggaagaaatagatacatagaaatgtctagatcgccgtttaggtgtgaacaaaaacgcgtttgatgagaattcgcaacccaccatttatacataagccgtcaggatattgcagtcggtcgttagccttccattctcagggcattctgtcattggccaatagacttgacttgccgatctgatgccaaaatgagattttagtaagagctgctggcgtcgcgccgggatcaccgtcggggtgttaattgtcattgcacatcttaattgttgacgtcacttcaaaataaagttagcagcattagaggatatctcacatgcagtgatttgagatatcagccaagaacaccggatcaggtgtaccaattgtcacaacatgatattcgaattaccctacttcacttgactcattgcatattctacgccgcttgatcattacgacaatgctacttttacttagcttaattgcctgctttcgataggctctggtgactagctccagtttcaaactcaaaaaaaatacaaaccccttgcaaaatcgaatacgccgtagcggcacggatatagatgagaacatacttcttgggccgcggctcaagaggagtttttgggagctcggtgctgttatagattgctgatatgacggacgtgccgagatcgaagaaagccgccagactcgaccgcatcgatatttggcggaaagaggttgctgatgcccaggtcatctgcgtgtgctctgcccccaccgcgtcagagccgcgttccaagcacacagtgacggtgtctgccgttccgacgaaacaacggag

SEQ ID NO: 8830 - DNA, 948 bp, Muscodor strobelii
  misc_feature: SGI cDNA ID NO. 562735
  misc_feature: Reduced expression when VOC is produced
  misc_feature: Encodes the peptide sequence at SEQ ID NO 8831
atggcaaaatccgcagctgctccgcccaagatgaacactggtgggagcgattactcgtcggtcgttctgaaccctggtcgttcatcaaatccattcagtgctacggaagaacccgaatgggttgccgtgcctcgggctgattcacgtctttcctctttctcatccagcatttccagctcgccatacgaacatattaatcattcgacaattctttctacatcgacttctggttctgcacctcggaagctaccacctccattcgacgcttctgccttaccggcgaagattggccgactgaatcttgcagacgagtcggcctcggcccagagaaacggtggtgcacctcccccaccaccgccgcggagacagacgaatggggatggtgtccaatcgccagtagctgcaacttcttctaggccacgcaatattccgcagatgaagactaattcgcctcgcagagtggtttcatcttcttcacaggtctccataaaatcttcgaggacaccgccccccgtagcgaagaagcccgcccatcttgcgtcgacatcacctccaaatagtccgccaaaagcacccgagccgagtgtcttcggctcgtttgatggccaaacaccaaaaccagatcttccacgtcgagcaacgtcaagtcatatttcggaattgacatctcagttggatgcgaaaggttccggaaggttaacgggaggcatgcatccggtgaggactaatcaacccgcgccacgcatattggggcagagtataccgcaagtgtcatcaagcgctgttagtctgcctggcttagcaagagaggagcgtaaacctgtcctgccaaacagaccccagcctcagcgaaagccgcttccacatgctgctagatcgcagaccatagatctccttggtgatacagggtttgagatgcacggatatgagacattaaaacccagttag

SEQ ID NO: 8831 - protein, 315 aa, Muscodor strobelii
  misc_feature: SGI Peptide ID NO. 562735
  misc_feature (1)..(315): NCBI GI: 116181882 Blast Desc: CHGG_01569 [Chaetomium globosum CBS 148.51] gi|88185866|gb|EAQ93334.1| CHGG_01569 [Chaetomium globosum CBS 148.51]
  misc_feature (22)..(315): NCBI GI: 85113184 Blast Desc: synaptojanin-like protein [Neurospora crassa OR74A] gi|28926259|gb|EAA35239.1| synaptojanin-like protein [Neurospora crassa OR74A]
  misc_feature (2)..(188): NCBI GI: 46108722 Blast Desc: FG01243.1 [Gibberella zeae PH-1]
  misc_feature (2)..(196): NCBI GI: 39945134 Blast Desc: MGG_04549 [Magnaporthe grisea 70-15] gi|145011371|gb|EDJ96027.1| MGG_04549 [Magnaporthe grisea 70-15]
  misc_feature (1)..(183): NCBI GI: 156057511 Blast Desc: SS1G_04487 [Sclerotinia sclerotiorum 1980] gi|154702272|gb|EDO02011.1| SS1G_04487 [Sclerotinia sclerotiorum 1980]
  misc_feature (1)..(99): NCBI GI: 154324042 Blast Desc: BC1G_00420 [Botryotinia fuckeliana B05.10] gi|150842649|gb|EDN17842.1| BC1G_00420 [Botryotinia fuckeliana B05.10]
  misc_feature: Useful for introducing or modulating the production of volatile compounds
MAKSAAAPPKMNTGGSDYSSVVLNPGRSSNPFSATEEPEWVAVPRADSRLSSFSSSISSSPYEHINHSTILSTSTSGSAPRKLPPPFDASALPAKIGRLNLADESASAQRNGGAPPPPPPRRQTNGDGVQSPVAATSSRPRNIPQMKTNSPRRVVSSSSQVSIKSSRTPPPVAKKPAHLASTSPPNSPPKAPEPSVFGSFDGQTPKPDLPRRATSSHISELTSQLDAKGSGRLTGGMHPVRTNQPAPRILGQSIPQVSSSAVSLPGLAREERKPVLPNRPQPQRKPLPHAARSQTIDLLGDTGFEMHGYETLKPS

SEQ ID NO: 8832 - DNA, 5002 bp, Muscodor strobelii; identical to SEQ ID NO: 8829
  misc_feature: SGI EST ID NO. CUFF.21201.0
  misc_feature: Variant of the nucleotide sequence at SEQ ID NO 8830

SEQ ID NO: 8833 - DNA, 1767 bp, Muscodor strobelii
  misc_feature: SGI cDNA ID NO. 562736
  misc_feature: Encodes the peptide sequence at SEQ ID NO 8834
atggccgactttaatcaattcggcacttccgaggaggagaatgctgagatcaagaagctgagtcaggaggtggaagccgacaccgacagcttcgaagcttgggagaagctcatccgcgcctgcgaggcccaagaaggcggcctgaatcgcaactcgagcccccaagctctcgccactctacgcgatgcctacgaccgtttcctcctgaaattccctctgctcttcggctactggaagaagtacgccgacctcgagttcaacatatcgggtcctgaatcggcagagatgatatatgagcgcgggtgcgctggtatcaccaactgtgtcgatctgtgggcttcatactgctccttcaagatggagaccactcacacaccccatctggttcgagatctctttgaccgagccgctcagtgcgtcgggcttgatttcctcgcccaccctttctgggataagtacatcgagtacgaagagcgacaagaggctcaggataaaatcttcgctatcctacaacgagtcattcatatccccatgcaccagtatgcccgttacttcgagagattccgccaactcgcacacagccgccctatcgaggagcttgttcctgccgaagaccttgcccgtttccgggcagaagtcgaggccgaatctgcatcctacggaggcatggcgcgacctgagctcgaggtagaacgcgatctgcgggctaagattgatgcattctactatgagatctttcagcggactcaagacgagacgacgaagcgttggacatacgagtctgaagtcaagcgaccctatttccacgtaacagaactggaaaattctcaagttgcgaattggagaaagtatctggacttcgaggaagcccagggcgacgtggaccgtattgtcttcctttacgagcgatgcgtggttacatgcgctttgtacgacgaattctggttccgttatgccaggtggatgtcgggacagcctggaaaagaagaagaagtgcggcacatctacatgagagcggctaccatatttgtacccgttagcagacccggcattcggttgcagtttgcctactttgaagaagcgaacggacgtatcggagttgctcgcgatattcatgaagctatccttatgtcgctccctgacagtgtcgagacgatagtatcctgggccaatttcgagcgacgccagaatgggctcgatgctgcaattcaagtctacaaggcacagattgatgcgcagcatgtgagcattttcaccaaagctgtactcgtcacccaatgggccgcacttctgtggaaagtcaagggctcagtcgaggaagcacggacagtttttgctagaaacatgcagtggtacaccgacagccggcatttctggcagaagtggttgcaattcgagctagaacagcccacaagtttggaccttgaggttcagcatgctcaacatatccaggacatctttgacgaattgttagcaaagagccgtatctcatcatcggcaaagaaggagttgttcttgacatacttggactacttgcaggagcgaggcgacaaggacgcaatgaaaaaattcctctcactcgaccgtgaaatatatggtcctacttctacgtctgtccttgataagccgactttcaaggagaatggtgcgcctcgcgccgctctagatgatgctacgcgagtcaaagcagaaagccgatacccgaattactatgaatactatgcagagcttgatgcgagcgcgcccggcactgcaccctttcactaa

SEQ ID NO: 8834 - protein, 588 aa, Muscodor strobelii
  misc_feature: SGI Peptide ID NO. 562736
  misc_feature (1)..(588): NCBI GI: 46108724 Blast Desc: FG01244.1 [Gibberella zeae PH-1]
  misc_feature (1)..(588): NCBI GI: 171695982 Blast Desc: protein product [Podospora anserina] gi|170948233|emb|CAP60397.1| protein product [Podospora anserina]
  misc_feature (1)..(588): NCBI GI: 145603027 Blast Desc: MGG_04558 [Magnaporthe grisea 70-15] gi|145011360|gb|EDJ96016.1| MGG_04558 [Magnaporthe grisea 70-15]
  misc_feature (1)..(533): NCBI GI: 256734347 Blast Desc: [Nectria haematococca mpVI 77-13-4]
  misc_feature (1)..(587): NCBI GI: 116181880 Blast Desc: CHGG_01568 [Chaetomium globosum CBS 148.51] gi|88185865|gb|EAQ93333.1| CHGG_01568 [Chaetomium globosum CBS 148.51]
  misc_feature (1)..(588): NCBI GI: 164427153 Blast Desc: NCU10810 [Neurospora crassa OR74A] gi|157071629|gb|EDO65276.1| conserved [Neurospora crassa OR74A]
  misc_feature (1)..(588): NCBI GI: 156058077 Blast Desc: SS1G_04770 [Sclerotinia sclerotiorum 1980] gi|154702555|gb|EDO02294.1| SS1G_04770 [Sclerotinia sclerotiorum 1980]
  misc_feature (1)..(585): NCBI GI: 261357426 Blast Desc: pre-mRNA-processing factor 39 [Verticillium albo-atrum VaMs.102]
  misc_feature (1)..(588): NCBI GI: 154298997 Blast Desc: BC1G_11811 [Botryotinia fuckeliana B05.10] gi|150857514|gb|EDN32706.1| BC1G_11811 [Botryotinia fuckeliana B05.10]
  misc_feature (1)..(570): NCBI GI: 70994154 Blast Desc: mRNA splicing protein (Prp39) [Aspergillus fumigatus Af293] gi|66849558|gb|EAL89886.1| mRNA splicing protein (Prp39), [Aspergillus fumigatus Af293] gi|159125161|gb|EDP50278.1| mRNA
MADFNQFGTSEEENAEIKKLSQEVEADTDSFEAWEKLIRACEAQEGGLNRNSSPQALATLRDAYDRFLLKFPLLFGYWKKYADLEFNISGPESAEMIYERGCAGITNCVDLWASYCSFKMETTHTPHLVRDLFDRAAQCVGLDFLAHPFWDKYIEYEERQEAQDKIFAILQRVIHIPMHQYARYFERFRQLAHSRPIEELVPAEDLARFRAEVEAESASYGGMARPELEVERDLRAKIDAFYYEIFQRTQDETTKRWTYESEVKRPYFHVTELENSQVANWRKYLDFEEAQGDVDRIVFLYERCVVTCALYDEFWFRYARWMSGQPGKEEEVRHIYMRAATIFVPVSRPGIRLQFAYFEEANGRIGVARDIHEAILMSLPDSVETIVSWANFERRQNGLDAAIQVYKAQIDAQHVSIFTKAVLVTQWAALLWKVKGSVEEARTVFARNMQWYTDSRHFWQKWLQFELEQPTSLDLEVQHAQHIQDIFDELLAKSRISSSAKKELFLTYLDYLQERGDKDAMKKFLSLDREIYGPTSTSVLDKPTFKENGAPRAALDDATRVKAESRYPNYYEYYAELDASAPGTAPFH

SEQ ID NO: 8835 - DNA, 2976 bp, Muscodor strobelii
  misc_feature: SGI EST ID NO. CUFF.21186.3
  misc_feature: Variant of the nucleotide sequence at SEQ ID NO 8833
caaaattccaatcgcagctaggatccctccctgtcttcccatcacccccaatccgctcatctcatccatccgtccggcatctctctcttgctatcacgagacgcccttcgcagcattggcggcattgaagcaaagacccctctgttgactggcactcatccgtcgggcgcgccattgttgctcagcgctacaaagcctcggtctcccacgcgccagctctgcgctgcagccttatattccccaccagccatctcgactctcccggccaagacggcgttgaaaagtgcacatcgcatacgaagcttcagtgacaatactagatccatctctggagcccgtccttataccagaatggccgactttaatcaattcggcacttccgaggaggagaatgctgagatcaagaagctgagtcaggaggtggaagccgacaccgacagcttcgaagcttgggagaagctcatccgcgcctgcgaggcccaagaaggcggcctgaatcgcaactcgagcccccaagctctcgccactctacgcgatgcctacgaccgtttcctcctgaaattccctctgctcttcggctactggaagaagtacgccgacctcgagttcaacatatcgggtcctgaatcggcagagatgatatatgagcgcgggtgcgctggtatcaccaactgtgtcgatctgtgggcttcatactgctccttcaagatggagaccactcacacaccccatctggttcgagatctctttgaccgagccgctcagtgcgtcgggcttgatttcctcgcccaccctttctgggataagtacatcgagtacgaagagcgacaagaggctcaggataaaatcttcgctatcctacaacgagtcattcatatccccatgcaccagtatgcccgttacttcgagagattccgccaactcgcacacagccgccctatcgaggagcttgttcctgccgaagaccttgcccgtttccgggcagaagtcgaggccgaatctgcatcctacggaggcatggcgcgacctgagctcgaggtagaacgcgatctgcgggctaagattgatgcattctactatgagatctttcagcggactcaagacgagacgacgaagcgttggacatacgagtctgaagtcaagcgaccctatttccacgtaacagaactggaaaattctcaagttgcgaattggagaaagtatctggacttcgaggaagcccagggcgacgtggaccgtattgtcttcctttacgagcgatgcgtggttacatgcgctttgtacgacgaattctggttccgttatgccaggtggatgtcgggacagcctggaaaagaagaagaagtgcggcacatctacatgagagcggctaccatatttgtacccgttagcagacccggcattcggttgcagtttgcctactttgaagaagcgaacggacgtatcggagttgctcgcgatattcatgaagctatccttatgtcgctccctgacagtgtcgagacgatagtatcctgggccaatttcgagcgacgccagaatgggctcgatgctgcaattcaagtctacaaggcacagattgatgcgcagcatgtgagcattttcaccaaagctgtactcgtcacccaatgggccgcacttctgtggaaagtcaagggctcagtcgaggaagcacggacagtttttgctagaaacatgcagtggtacaccgacagccggcatttctggcagaagtggttgcaattcgagctagaacagcccacaagtttggaccttgaggttcagcatgctcaacatatccaggacatctttgacgaattgttagcaaagagccgtatctcatcatcggcaaagaaggagttgttcttgacatacttggactacttgcaggagcgaggcgacaaggacgcaatgaaaaaattcctctcactcgaccgtgaaatatatggtcctacttctacgtctgtccttgataagccgactttcaaggagaatggtgcgcctcgcgccgctctagatgatgctacgcgagtcaaagcagaaagccgatacccgaattactatgaatactatgcagagcttgatgcgagcgcgcccggcactgcaccctttcactaagggcgaaagggtagcgaattagctttaggttattgaacctttgatttgtactatatggttttctcggtctctcccaagtcggcgtctcgatgctttaaggatactcggacaatgctcttgggcactttttctgtgccacaagcctgttgagatagaagacatcactgtccgtggtgtgcgcctatgccaaaatgtgtatgatcgtggcagtcagggactggccactacggggatttgtcggcaagcagataatgtcaggtgttgccaaattaagaaacataggcatttcactcgaccggcaatgagtttcaatgcatttattaaaactaaaaggaaaaatgcaggctttcctcatttgcctagagcacttggtacgtgaagcacagaatatgttgaggatgggagtaagtgaaagaatattcaaatcaagatgatacgagccgacttctacacagaagcataagttctaggtttaatgtaaatgtttgtttaggcataatctataagtacaggatgcggtcgatcttcctctcaggctttaagctatcgcagcatcaaccggaatgaagatagcccactcgccattcatgtcgtccacgacagagacaagttcctggatctccgctttgaaagtagaatttatgccattagtgttgaacgtgttatccgtagcgtccagccgcatcatcattgcttgtgagacatcggccgctgctatcgcctctttggtgaatatgtagtctacttgcatgaagtcgtcgcccactttgatggcgttgcctgacgatactacccaggataagggatctaggtacatcatgccggcgggtggcgtaatggaagcttgctttgggaaga

SEQ ID NO: 8836 - DNA, 1824 bp, Muscodor strobelii
  misc_feature: SGI cDNA ID NO. 562737
  misc_feature: Encodes the peptide sequence at SEQ ID NO 8837
atggccgactttaatcaattcggcacttccgaggaggagaatgctgagatcaagaagctgagtcaggaggtggaagccgacaccgacagcttcgaagcttgggagaagctcatccgcgcctgcgaggcccaagaaggcggcctgaatcgcaactcgagcccccaagctctcgccactctacgcgatgcctacgaccgtttcctcctgaaattccctctgctcttcggctactggaagaagtacgccgacctcgagttcaacatatcgggtcctgaatcggcagagatggtaagaaccgttgcacccccttggctgtggtttgcgtccgctgactgctggggccagatatatgagcgcgggtgcgctggtatcaccaactgtgtcgatctgtgggcttcatactgctccttcaagatggagaccactcacacaccccatctggttcgagatctctttgaccgagccgctcagtgcgtcgggcttgatttcctcgcccaccctttctgggataagtacatcgagtacgaagagcgacaagaggctcaggataaaatcttcgctatcctacaacgagtcattcatatccccatgcaccagtatgcccgttacttcgagagattccgccaactcgcacacagccgccctatcgaggagcttgttcctgccgaagaccttgcccgtttccgggcagaagtcgaggccgaatctgcatcctacggaggcatggcgcgacctgagctcgaggtagaacgcgatctgcgggctaagattgatgcattctactatgagatctttcagcggactcaagacgagacgacgaagcgttggacatacgagtctgaagtcaagcgaccctatttccacgtaacagaactggaaaattctcaagttgcgaattggagaaagtatctggacttcgaggaagcccagggcgacgtggaccgtattgtcttcctttacgagcgatgcgtggttacatgcgctttgtacgacgaattctggttccgttatgccaggtggatgtcgggacagcctggaaaagaagaagaagtgcggcacatctacatgagagcggctaccatatttgtacccgttagcagacccggcattcggttgcagtttgcctactttgaagaagcgaacggacgtatcggagttgctcgcgatattcatgaagctatccttatgtcgctccctgacagtgtcgagacgatagtatcctgggccaatttcgagcgacgccagaatgggctcgatgctgcaattcaagtctacaaggcacagattgatgcgcagcatgtgagcattttcaccaaagctgtactcgtcacccaatgggccgcacttctgtggaaagtcaagggctcagtcgaggaagcacggacagtttttgctagaaacatgcagtggtacaccgacagccggcatttctggcagaagtggttgcaattcgagctagaacagcccacaagtttggaccttgaggttcagcatgctcaacatatccaggacatctttgacgaattgttagcaaagagccgtatctcatcatcggcaaagaaggagttgttcttgacatacttggactacttgcaggagcgaggcgacaaggacgcaatgaaaaaattcctctcactcgaccgtgaaatatatggtcctacttctacgtctgtccttgataagccgactttcaaggagaatggtgcgcctcgcgccgctctagatgatgctacgcgagtcaaagcagaaagccgatacccgaattactatgaatactatgcagagcttgatgcgagcgcgcccggcactgcaccctttcactaa

SEQ ID NO: 8837 - protein, 607 aa, Muscodor strobelii
  misc_feature: SGI Peptide ID NO. 562737
  misc_feature (1)..(607): NCBI GI: 46108724 Blast Desc: FG01244.1 [Gibberella zeae PH-1]
  misc_feature (1)..(607): NCBI GI: 171695982 Blast Desc: protein product [Podospora anserina] gi|170948233|emb|CAP60397.1| protein product [Podospora anserina]
  misc_feature (1)..(607): NCBI GI: 145603027 Blast Desc: MGG_04558 [Magnaporthe grisea 70-15] gi|145011360|gb|EDJ96016.1| MGG_04558 [Magnaporthe grisea 70-15]
  misc_feature (1)..(552): NCBI GI: 256734347 Blast Desc: [Nectria haematococca mpVI 77-13-4]
  misc_feature (1)..(607): NCBI GI: 164427153 Blast Desc: NCU10810 [Neurospora crassa OR74A] gi|157071629|gb|EDO65276.1| conserved [Neurospora crassa OR74A]
  misc_feature (1)..(606): NCBI GI: 116181880 Blast Desc: CHGG_01568 [Chaetomium globosum CBS 148.51] gi|88185865|gb|EAQ93333.1| CHGG_01568 [Chaetomium globosum CBS 148.51]
  misc_feature (1)..(607): NCBI GI: 156058077 Blast Desc: SS1G_04770 [Sclerotinia sclerotiorum 1980] gi|154702555|gb|EDO02294.1| SS1G_04770 [Sclerotinia sclerotiorum 1980]
  misc_feature (1)..(604): NCBI GI: 261357426 Blast Desc: pre-mRNA-processing factor 39 [Verticillium albo-atrum VaMs.102]
  misc_feature (1)..(607): NCBI GI: 154298997 Blast Desc: BC1G_11811 [Botryotinia fuckeliana B05.10] gi|150857514|gb|EDN32706.1| BC1G_11811 [Botryotinia fuckeliana B05.10]
  misc_feature (1)..(589): NCBI GI: 70994154 Blast Desc: mRNA splicing protein (Prp39) [Aspergillus fumigatus Af293] gi|66849558|gb|EAL89886.1| mRNA splicing protein (Prp39), [Aspergillus fumigatus Af293] gi|159125161|gb|EDP50278.1| mRNA
MADFNQFGTSEEENAEIKKLSQEVEADTDSFEAWEKLIRACEAQEGGLNRNSSPQALATLRDAYDRFLLKFPLLFGYWKKYADLEFNISGPESAEMVRTVAPPWLWFASADCWGQIYERGCAGITNCVDLWASYCSFKMETTHTPHLVRDLFDRAAQCVGLDFLAHPFWDKYIEYEERQEAQDKIFAILQRVIHIPMHQYARYFERFRQLAHSRPIEELVPAEDLARFRAEVEAESASYGGMARPELEVERDLRAKIDAFYYEIFQRTQDETTKRWTYESEVKRPYFHVTELENSQVANWRKYLDFEEAQGDVDRIVFLYERCVVTCALYDEFWFRYARWMSGQPGKEEEVRHIYMRAATIFVPVSRPGIRLQFAYFEEANGRIGVARDIHEAILMSLPDSVETIVSWANFERRQNGLDAAIQVYKAQIDAQHVSIFTKAVLVTQWAALLWKVKGSVEEARTVFARNMQWYTDSRHFWQKWLQFELEQPTSLDLEVQHAQHIQDIFDELLAKSRISSSAKKELFLTYLDYLQERGDKDAMKKFLSLDREIYGPTSTSVLDKPTFKENGAPRAALDDATRVKAESRYPNYYEYYAELDASAPGTAPFH

SEQ ID NO: 8838 - DNA, 2976 bp, Muscodor strobelii; identical to SEQ ID NO: 8835
  misc_feature: SGI EST ID NO. CUFF.21186.3
  misc_feature: Variant of the nucleotide sequence at SEQ ID NO 8836

SEQ ID NO: 8839 - DNA, 699 bp, Muscodor strobelii
  misc_feature: SGI cDNA ID NO. 562738
  misc_feature: Encodes the peptide sequence at SEQ ID NO 8840
atgcaattccatcttctcgcactcgcactcttaggagcagccagccctgctttgtgtcgtccccaagacatcacagccaacgcacataggggcggcagcagcaacaacaacggccgtccaggtaacgatatcggcaatggaacgggttcgaatacaaatgcaggagactcaaatgccggggatgggaacacatcagccgacaccgtccaaactctcacagtaaataccgtcgtagatggctcggaaattacacaaggcttctttggccatccaaatccagtgcaaggcaaccaactagaagtgaagacagtactgcctcacaacttcgtcggccaactcgaagtagaatacaacggcacagactcaaacaccataaccgtcttcccaaagcaagcttccattacgccacccgccggcatgatgtacctagatcccttatcctgggtagtatcgtcaggcaacgccatcaaagtgggcgacgacttcatgcaagtagactacatattcaccaaagaggcgatagcagcggccgatgtctcacaagcaatgatgatgcggctggacgctacggataacacgttcaacactaatggcataaattctactttcaaagcggagatccaggaacttgtctctgtcgtggacgacatgaatggcgagtgggctatcttcattccggttgatgctgcgatagcttaa

SEQ ID NO: 8840 - protein, 232 aa, Muscodor strobelii
  misc_feature: SGI Peptide ID NO. 562738
  misc_feature (96)..(226): NCBI GI: 85109529 Blast Desc: NCU07581 [Neurospora crassa OR74A] gi|28924607|gb|EAA33725.1| [Neurospora crassa OR74A]
  misc_feature (25)..(225): NCBI GI: 261361625 Blast Desc: conserved [Verticillium albo-atrum VaMs.102]
  misc_feature (85)..(226): NCBI GI: 116192891 Blast Desc: CHGG_06163 [Chaetomium globosum CBS 148.51] gi|88182076|gb|EAQ89544.1| CHGG_06163 [Chaetomium globosum CBS 148.51]
  misc_feature (88)..(226): NCBI GI: 171684105 Blast Desc: protein product [Podospora anserina] gi|170942013|emb|CAP67665.1| protein product [Podospora anserina]
  misc_feature (100)..(230): NCBI GI: 256728247 Blast Desc: NECHADRAFT_87842 [Nectria haematococca mpVI 77-13-4]
  misc_feature (93)..(227): NCBI GI: 169603391 Blast Desc: SNOG_04705 [Phaeosphaeria nodorum SN15] gi|111067345|gb|EAT88465.1| SNOG_04705 [Phaeosphaeria nodorum SN15]
MQFHLLALALLGAASPALCRPQDITANAHRGGSSNNNGRPGNDIGNGTGSNTNAGDSNAGDGNTSADTVQTLTVNTVVDGSEITQGFFGHPNPVQGNQLEVKTVLPHNFVGQLEVEYNGTDSNTITVFPKQASITPPAGMMYLDPLSWVVSSGNAIKVGDDFMQVDYIFTKEAIAAADVSQAMMMRLDATDNTFNTNGINSTFKAEIQELVSVVDDMNGEWAIFIPVDAAIA

SEQ ID NO: 8841 - DNA, 1071 bp, Muscodor strobelii
  misc_feature: SGI cDNA ID NO. 562739
  misc_feature: Encodes the peptide sequence at SEQ ID NO 8842
atgtctgccgccaacgcctcccgccagtttgctcgcgcggcgctgcgcacaacggcccgaaacacatttgcgacttcatctcgtcaggctttccgccaaggtggtcgtcgcttctattcctctgagcctcccaaggcggccagcacttcgccacttctttatatcgctggcgcagccgttgctggaggcgccgggtactacttttacacccaaggcgtcacaactcccaagatattcgcccccacccaggccgattaccagaaggtctacaacgagattgcctcgcgcttggaggagaaggacgattatgatgatggcagctatggccctgttctcgtccgtctggcttggcacgcaagtggtacctttgacaaggagactggtaccggaggatcgaacggtgctactatgcgattcgctcctgagggtgaccatggtgcgaatgctggtttaaagcatgcgcgtgacttcctcgagcctgtgaaggccaagttcccatggatcacctattctgacctctggatccttgctggcgtttgcgccatccaggaaatgctgggccctgctattccttacagacctggccgtgctgacaaggaggccgccgcttgcactcccgacggtcgtctccccgatgctgctcaaggcaccaagcatttgagagatattttctaccgtatgggttttaacgaccaggagatcgtagcgctttctggtgcccatgctcttggtcgatgccacaccgaccgatctggcttcgatggaccttggactttcagtcccaccgttcttaccaacgactactacaccctactcctctcagagaagtggtccatccgcaagtgggatggtccccgacagtttgaggacaagggaaagacgttgatgatgttgcccgctgactacgctctcattgaggacaaggccatgaagccttgggtcgagaagtacgccaaggacaatgatctcttctttaaggatttctctgccgtcatcgtcaaactgttcgagcttggtgtccccttcaaagccgaggtcgagccgatggtcttcaagacaagtaatgcctag

SEQ ID NO: 8842 - protein, 356 aa, Muscodor strobelii
  misc_feature: SGI Peptide ID NO. 562739
  misc_feature (89)..(320): Pfam Id: PF00141 Pfam Desc: Peroxidase
  misc_feature (6)..(356): NCBI GI: 85112032 Blast Desc: cytochrome c peroxidase, mitochondrial precursor [Neurospora crassa OR74A] gi|74629019|sp|Q7SDV9.1|CCPR_NEUCR RecName: Full=Cytochrome c peroxidase, mitochondrial; Short=CCP;
  misc_feature (4)..(356): NCBI GI: 116181878 Blast Desc: CHGG_01567 [Chaetomium globosum CBS 148.51] gi|88185864|gb|EAQ93332.1| CHGG_01567 [Chaetomium globosum CBS 148.51]
  misc_feature (4)..(355): NCBI GI: 226501108 Blast Desc: LOC100273188 [Zea mays] gi|194702652|gb|ACF85410.1| [Zea mays]
  misc_feature (4)..(347): NCBI GI: 46108726 Blast Desc: FG01245.1 [Gibberella zeae PH-1] gi|84028812|sp|Q4ING3.1|CCPR_GIBZE RecName: Full=Cytochrome c peroxidase, mitochondrial; Short=CCP; Flags: Precursor
  misc_feature (18)..(347): NCBI GI: 256734348 Blast Desc: [Nectria haematococca mpVI 77-13-4]
  misc_feature (4)..(356): NCBI GI: 171695984 Blast Desc: protein product [Podospora anserina] gi|170948234|emb|CAP60398.1| protein product [Podospora anserina]
  misc_feature (4)..(355): NCBI GI: 145603053 Blast Desc: MGG_04545 [Magnaporthe grisea 70-15] gi|223635111|sp|A4QVH4.1|CCPR_MAGGR RecName: Full=Cytochrome c peroxidase, mitochondrial; Short=CCP; Flags: Precursor MGG_04545
  misc_feature (4)..(356): NCBI GI: 154308482 Blast Desc: ascorbate peroxidase [Botryotinia fuckeliana B05.10] gi|150852842|gb|EDN28034.1| ascorbate peroxidase [Botryotinia fuckeliana B05.10]
  misc_feature (4)..(352): NCBI GI: 156036478 Blast Desc: SS1G_12928 [Sclerotinia sclerotiorum 1980] gi|154698333|gb|EDN98071.1| SS1G_12928 [Sclerotinia sclerotiorum 1980]
  misc_feature (2)..(355): NCBI GI: 242801281 Blast Desc: cytochrome c peroxidase Ccp1, [Talaromyces stipitatus ATCC 10500] gi|218717075|gb|EED16496.1| cytochrome c peroxidase Ccp1, [Talaromyces stipitatus ATCC 10500]
  misc_feature (28)..(356): SWISSPROT Homolog: EC 1.11.1.5 Cytochrome-c peroxidase
MSAANASRQFARAALRTTARNTFATSSRQAFRQGGRRFYSSEPPKAASTSPLLYIAGAAVAGGAGYYFYTQGVTTPKIFAPTQADYQKVYNEIASRLEEKDDYDDGSYGPVLVRLAWHASGTFDKETGTGGSNGATMRFAPEGDHGANAGLKHARDFLEPVKAKFPWITYSDLWILAGVCAIQEMLGPAIPYRPGRADKEAAACTPDGRLPDAAQGTKHLRDIFYRMGFNDQEIVALSGAHALGRCHTDRSGFDGPWTFSPTVLTNDYYTLLLSEKWSIRKWDGPRQFEDKGKTLMMLPADYALIEDKAMKPWVEKYAKDNDLFFKDFSAVIVKLFELGVPFKAEVEPMVFKTSNA

SEQ ID NO: 8843 - DNA, 2139 bp, Muscodor strobelii
  misc_feature: SGI EST ID NO. CUFF.21204.1
  misc_feature: Variant of the nucleotide sequence at SEQ ID NO 8841
ccgggataggcgatcatgggctcaaaacggcgaaactttccacatgatgtgcgtgtagttgtcaacgcaataacgggtcataagccaactctcgagccactttcagacttgcctgtctaatatatggcgctacaagttgttcgtaaggtagaatggtgcaaggcaccgcacttcaaacgggaaacttagaagtacgtgtctttgcatcgctgatcgtgagttcacctagcgataagatacgcaaacgtgtataattcgttccctttccaatctctgcgtccgtacttgacctctacaccgacgtaacaaaatgtctgccgccaacgcctcccgccagtttgctcgcgcggcgctgcgcacaacggcccgaaacacatttgcgacttcatctcgtcaggctttccgccaaggtggtcgtcgcttctattcctctgagcctcccaaggcggccagcacttcgccacttctttatatcgctggcgcagccgttgctggaggcgccgggtactacttttacacccaaggcgtcacaactcccaagatattcgcccccacccaggccgattaccagaaggtctacaacgagattgcctcgcgcttggaggagaaggacgattatgatgatggcagctatggccctgttctcgtccgtctggcttggcacgcaagtggtacctttgacaaggagactggtaccggaggatcgaacggtgctactatgcgattcgctcctgagggtgaccatggtgcgaatgctggtttaaagcatgcgcgtgacttcctcgagcctgtgaaggccaagttcccatggatcacctattctgacctctggatccttgctggcgtttgcgccatccaggaaatgctgggccctgctattccttacagacctggccgtgctgacaaggaggccgccgcttgcactcccgacggtcgtctccccgatgctgctcaaggcaccaagcatttgagagatattttctaccgtatgggttttaacgaccaggagatcgtagcgctttctggtgcccatgctcttggtcgatgccacaccgaccgatctggcttcgatggaccttggactttcagtcccaccgttcttaccaacgactactacaccctactcctctcagagaagtggtccatccgcaagtgggatggtccccgacagtttgaggacaagggaaagacgttgatgatgttgcccgctgactacgctctcattgaggacaaggccatgaagccttgggtcgagaagtacgccaaggacaatgatctcttctttaaggatttctctgccgtcatcgtcaaactgttcgagcttggtgtccccttcaaagccgaggtcgagccgatggtcttcaagacaagtaatgcctagactcataccgaatccagaacccgaatcagtgcgacttaaaatcaatgataccaagacatagacggtgcggaaattgtaagacgatagacgaagaaagactgtattttgaggtcattctccccagagagcaaatcctgaggagattcggggtggaggtaatgtccatcggaagttgagttgtatctaccttacccgttgtttccccaagtgagcgagctttgatatgctttccgcaactctgtaaaacaataagacaaatttcaaaagtttaacaccatcgtgtagtcgtgtgaattcaaaaccagcgtcagcgatgaggacaggccgttagtgatgatgaatagtatttacgaaaccaaggggctgtcgtaattgaagagatgtcgttgagcagatggctccaaaaggggcatggaggttagaggttggaggttcatgcacgttgctccgcatggcctagtgaggcagggtacccatacaccaacgtcccaaccccgcaagcgagatgtttctctccggacacttctctcccgggaacaactaaatcgattagacgaatcagattaatcgcaatgctggtatctgaggtaagtggttgacgcctcgacaacaaattgcgcttggttcgaccagaagaggagcaagcattgtgggccataaagcaagcacttcccgacggtgaaatattggtactagaagtattcggctggaacatatactatgagtatatgagcctcatagctagcaagacagtgcgc

SEQ ID NO: 8844 - DNA, 1062 bp, Muscodor strobelii
  misc_feature: SGI cDNA ID NO. 562740
  misc_feature: Elevated expression when VOC is produced
  misc_feature: Encodes the peptide sequence at SEQ ID NO 8845
atgcttcgagatcttctcttgggagctgtcttgtatagcggccttggccttggccagacttcaactggctcagccgtcacgaccacgagtacagtcgtttgctcagcaaactacggcagttcgaaaccgacggctgtcccgacgagctcgactacaacggtcatctcttcgttgagaacagcgccggctgtaacggtacctcgagcgtacactcgagtgaccgcggatccagtcacgacgacgctgcatacgtcgacttctgtcgatattatcatcgctactgtcacaagcggcacgttccaagcctactcaaaagagctcacgactctcgcaactgctacctggccggtgactgtctgtaccaacgatgtcaagccaaccaccgtgaccaagtacactggatcatacactcctctgcctggccagcctagccaatcgtcggggggcccaggatcgtacatcactgaggtagtctgcactacatctatcatctcctcgatccagcttttccctaccgtcacggcaccgacgacagctactatcgtgactacgcctaccgtcatcatctcggacattacagcatcgacggtatcaacccttacctatgctacggtgacaacgtggtccacgaccgttacaagccttatcgtcagctacacgccggctcaaaccgtgcagaccgtgtccacggcttgcgagcccacagcgacggtgacgcttgacgctcgttgcaacccagacaacattgtcacaagcatcgatggtcttggactcgtgtctggcaattatgccactaatacctcagtcacgtacacgagaattgagccgttcgctagtgacatgagcctgtgctgtcaggcatgccttgataatgagggctgcggcgcgtccatgtccggtgaatctggctactgcgggctgtactacgtctctgatgcgcacgcagatcctgtatgtaacgactttgtcttcagttttcagacgcaaaagggatactacccagggcaagggcttcgcgtgcagagcggttgtggtagcatcgaggtagagtctaagtcttga

SEQ ID NO: 8845 - protein, 353 aa, Muscodor strobelii
  misc_feature: SGI Peptide ID NO. 562740
  misc_feature: Useful for introducing or modulating the production of volatile compounds
MLRDLLLGAVLYSGLGLGQTSTGSAVTTTSTVVCSANYGSSKPTAVPTSSTTTVISSLRTAPAVTVPRAYTRVTADPVTTTLHTSTSVDIIIATVTSGTFQAYSKELTTLATATWPVTVCTNDVKPTTVTKYTGSYTPLPGQPSQSSGGPGSYITEVVCTTSIISSIQLFPTVTAPTTATIVTTPTVIISDITASTVSTLTYATVTTWSTTVTSLIVSYTPAQTVQTVSTACEPTATVTLDARCNPDNIVTSIDGLGLVSGNYATNTSVTYTRIEPFASDMSLCCQACLDNEGCGASMSGESGYCGLYYVSDAHADPVCNDFVFSFQTQKGYYPGQGLRVQSGCGSIEVESKS

SEQ ID NO: 8846 - DNA, 1803 bp, Muscodor strobelii
  misc_feature: SGI EST ID NO. CUFF.21195.0
  misc_feature: Variant of the nucleotide sequence at SEQ ID NO 8844
ctctccgacccgtttctctttcattatccactaggatatcatgctacttgcctcgacgagcttaggccgtttctgccgcctagtgactgctcaaataatcccgacataagtgattatgaattggacgaaagtcccatgcgctcattcaggcgtaaccagattgttatgtatctattggatgtcgttcgatcctcacttcagggtaatggggagggatgcggaaggttgcatcgtgcgctagtagtcgcgagtagataatttgaatgccggtagatataatataaggcattgtacctgctgatcatgacatatctaattcgtcttgcgagccgacgtgccacttagttgctcagtgatcgacaggctacattgtgtactgggatctgatatcgcatcctgccaactccacgatgcttcgagatcttctcttgggagctgtcttgtatagcggccttggccttggccagacttcaactggctcagccgtcacgaccacgagtacagtcgtttgctcagcaaactacggcagttcgaaaccgacggctgtcccgacgagctcgactacaacggtcatctcttcgttgagaacagcgccggctgtaacggtacctcgagcgtacactcgagtgaccgcggatccagtcacgacgacgctgcatacgtcgacttctgtcgatattatcatcgctactgtcacaagcggcacgttccaagcctactcaaaagagctcacgactctcgcaactgctacctggccggtgactgtctgtaccaacgatgtcaagccaaccaccgtgaccaagtacactggatcatacactcctctgcctggccagcctagccaatcgtcggggggcccaggatcgtacatcactgaggtagtctgcactacatctatcatctcctcgatccagcttttccctaccgtcacggcaccgacgacagctactatcgtgactacgcctaccgtcatcatctcggacattacagcatcgacggtatcaacccttacctatgctacggtgacaacgtggtccacgaccgttacaagccttatcgtcagctacacgccggctcaaaccgtgcagaccgtgtccacggcttgcgagcccacagcgacggtgacgcttgacgctcgttgcaacccagacaacattgtcacaagcatcgatggtcttggactcgtgtctggcaattatgccactaatacctcagtcacgtacacgagaattgagccgttcgctagtgacatgagcctgtgctgtcaggcatgccttgataatgagggctgcggcgcgtccatgtccggtgaatctggctactgcgggctgtactacgtctctgatgcgcacgcagatcctgtatgtaacgactttgtcttcagttttcagacgcaaaagggatactacccagggcaagggcttcgcgtgcagagcggttgtggtagcatcgaggtagagtctaagtcttgagataaggttgacgggaacagaaaggggttaaaagggttgaatctaggacgataccatttgatgctgtctcgtaacttgaatcgctataatcaagaatagtgttcgtgtttaggtgaccattactattcgagattgaaacgagaaaaataactgcaattgcactaattggttgtacaaggaactaaagatgagattgttacttgattacaaccacgcaaatagctgtaaccgatgtgacagagcacctctctggacgcgatgagtccggtagttaaagcgagttttgacttgcaaaaactgcgaaagcaaaccgtaaaccgtccttacatac

SEQ ID NO: 8847 - DNA, 972 bp, Muscodor strobelii
  misc_feature: SGI cDNA ID NO. 562741
  misc_feature: Encodes the peptide sequence at SEQ ID NO 8848
atgccgttactttcaacggcgcgcatacccacaacactgggtcgccgtcttctcccgcgcctctcgcatcagtcatccaaattccagcgacgctgggctgaagtccacgatgtgcgattcctggctaccacgcaggccccgcgccacgtcgccgagaaatacaaagagaaattagatcgcaaggctcgggaagagggacattccgacgtcaccgcgctgaaagacgcctacgccggccgcatccgcgaattcaagcaaaaggacagcatatccgtcccggggcttgacgctctgctagccgacgaagagcccgaatcgcaaggccaaactgcgggaacttcaaaacgagcttcggaagatagaccgagatcctcgagctccaccataaaacctctctccgaaatcctcgatctcgaaaaggcccgcgcactgcccattaaggaactatccgcgatatggcgtctccgccacgccgccaacagcaactcgctctgcgccgtcataccctccagaacacacatggccatgcagcgaacggcgcgtctgaacccgacctttgtcctgcccgtcccgcgcaaggagcaaggtgccgagatccacttcctgcagtgggtgttcgacgccatgtctggaacctcgacggtactgttcacccagctcgccgagtacaagttacgcggggagttcgcgcagccacataccagcataacgcattacaccgactacggagcagaggacgggttaagtctggagaagaatcagggcgttgcgctcatggcgggcacgttagaggagaatcgtggtgcgagtttgcaggatgcgcagtttttggttatgctcttgcagaagttctatggtgaggagggactcgctgcaagcgcggagaaaaggaaattactggaagattttaataagggcgacccgaacttttcgattgagaagttgctggaggagtgtgagaagtttgattga

SEQ ID NO: 8848 - protein, 323 aa, Muscodor strobelii
  misc_feature: SGI Peptide ID NO. 562741
  misc_feature (49)..(323): Pfam Id: PF06644 Pfam Desc: ATP11 protein
  misc_feature (130)..(323): Pfam Id: PF06644 Pfam Desc: ATP11 protein
  misc_feature (29)..(322): NCBI GI: 85112030 Blast Desc: NCU03296 [Neurospora crassa OR74A] gi|28925994|gb|EAA34986.1| conserved [Neurospora crassa OR74A]
  misc_feature (29)..(322): NCBI GI: 116181876 Blast Desc: CHGG_01566 [Chaetomium globosum CBS 148.51] gi|88185863|gb|EAQ93331.1| CHGG_01566 [Chaetomium globosum CBS 148.51]
  misc_feature (4)..(322): NCBI GI: 256729662 Blast Desc: [Nectria haematococca mpVI 77-13-4]
  misc_feature (4)..(322): NCBI GI: 46122441 Blast Desc: FG05598.1 [Gibberella zeae PH-1]
  misc_feature (29)..(322): NCBI GI: 156036228 Blast Desc: SS1G_12802 [Sclerotinia sclerotiorum 1980] gi|154698208|gb|EDN97946.1| SS1G_12802 [Sclerotinia sclerotiorum 1980]
  misc_feature (29)..(322): NCBI GI: 154314385 Blast Desc: BC1G_05286 [Botryotinia fuckeliana B05.10] gi|150848931|gb|EDN24124.1| BC1G_05286 [Botryotinia fuckeliana B05.10]
  misc_feature (29)..(322): NCBI GI: 238482161 Blast Desc: F1F0 ATP synthase assembly protein Atp11, [Aspergillus flavus NRRL3357] gi|220700369|gb|EED56707.1| F1F0 ATP synthase assembly protein Atp11, [Aspergillus flavus NRRL3357]
  misc_feature (29)..(322): NCBI GI: 169765596 Blast Desc: [Aspergillus oryzae RIB40] gi|83765124|dbj|BAE55267.1| protein product [Aspergillus oryzae]
  misc_feature (29)..(274): NCBI GI: 261357418 Blast Desc: ATP11 [Verticillium albo-atrum VaMs.102]
  misc_feature (24)..(299): NCBI GI: 145603055 Blast Desc: MGG_04544 [Magnaporthe grisea 70-15] gi|145011381|gb|EDJ96037.1| MGG_04544 [Magnaporthe grisea 70-15]
MPLLSTARIPTTLGRRLLPRLSHQSSKFQRRWAEVHDVRFLATTQAPRHVAEKYKEKLDRKAREEGHSDVTALKDAYAGRIREFKQKDSISVPGLDALLADEEPESQGQTAGTSKRASEDRPRSSSSTIKPLSEILDLEKARALPIKELSAIWRLRHAANSNSLCAVIPSRTHMAMQRTARLNPTFVLPVPRKEQGAEIHFLQWVFDAMSGTSTVLFTQLAEYKLRGEFAQPHTSITHYTDYGAEDGLSLEKNQGVALMAGTLEENRGASLQDAQFLVMLLQKFYGEEGLAASAEKRKLLEDFNKGDPNFSIEKLLEECEKFD

SEQ ID NO: 8849 - DNA, 1341 bp, Muscodor strobelii
  misc_feature: SGI EST ID NO. CUFF.21198.0
  misc_feature: Variant of the nucleotide sequence at SEQ ID NO 8847
gtcccagtccatgcatcattcactcggcatcgttgaacctgattaacgctcgatcctcgacagtttccttacttgtttcttcattttgtgactgtttaactggcatatcgcgattcatcacagcatgccgttactttcaacggcgcgcatacccacaacactgggtcgccgtcttctcccgcgcctctcgcatcagtcatccaaattccagcgacgctgggctgaagtccacgatgtgcgattcctggctaccacgcaggccccgcgccacgtcgccgagaaatacaaagagaaattagatcgcaaggctcgggaagagggacattccgacgtcaccgcgctgaaagacgcctacgccggccgcatccgcgaattcaagcaaaaggacagcatatccgtcccggggcttgacgctctgctagccgacgaagagcccgaatcgcaaggccaaactgcgggaacttcaaaacgagcttcggaagatagaccgagatcctcgagctccaccataaaacctctctccgaaatcctcgatctcgaaaaggcccgcgcactgcccattaaggaactatccgcgatatggcgtctccgccacgccgccaacagcaactcgctctgcgccgtcataccctccagaacacacatggccatgcagcgaacggcgcgtctgaacccgacctttgtcctgcccgtcccgcgcaaggagcaaggtgccgagatccacttcctgcagtgggtgttcgacgccatgtctggaacctcgacggtactgttcacccagctcgccgagtacaagttacgcggggagttcgcgcagccacataccagcataacgcattacaccgactacggagcagaggacgggttaagtctggagaagaatcagggcgttgcgctcatggcgggcacgttagaggagaatcgtggtgcgagtttgcaggatgcgcagtttttggttatgctcttgcagaagttctatggtgaggagggactcgctgcaagcgcggagaaaaggaaattactggaagattttaataagggcgacccgaacttttcgattgagaagttgctggaggagtgtgagaagtttgattgaggtgcatattgatataggatatatccgcaagtgtcttcaagtgctgaagtcatgttgcacaaggaaatagttgtaagatcaacaaaggtttcaatagttcaagtgggcattctcgccatgctcactatagaagcattggatgaaggtggcttattaccgtgttgtacatatatctcgttgtatagtagatgtacaatcacttcgacctaggagatagacttggtcgtagtcaccgcaccgtcgcc

SEQ ID NO: 8850 - DNA, 1671 bp, Muscodor strobelii
  misc_feature: SGI cDNA ID NO. 562742
  misc_feature: Reduced expression when VOC is produced
  misc_feature: Encodes the peptide sequence at SEQ ID NO 8851
atgcctgtgttttcgcagtacgacacgcttgatattccagacgtcgacttatggacctatcttttcgagaggaaagacaagccattttcagatgacaaagagatctacatagatccagataccaagcgttcgtacacgtggaaacaatgcaaggagacggcccgggagtttggtaacgggctgcggtcgcagtgggggttcaagaaaggcgacgtcttagcattcttcagtcctaataacatcgattatgccccggtcttcttcggtgtgcactacattggtggtattgccaccaccgctaatcccgcgtacacggtcaaggagctcgcatttcagctaaaggactcgggagccaaaggaattgtcactcaggttcccatgctcccggctgtccgtgaagccgcgcgcacaatcggtctaccggaagaccggatcatacttcttggtgatctgcgggatcccagtggcaagttcaagcacttcactgagctgaagtcaaccggccttttgaagtcgctttcctctgggcagacgcgtgtgaacccaaaacaagaccttacgtttttagtatatagctcaggaaccactgggctgccgaaaggtgttcaactgacgcacaccaatatcattgcgaacattgcacaattggagtttgctgaccggttcaatgctgtgtaccactcagggggcccggacgggaaaggtgataagcaacttgctattctacctttcttccatgtctatggtctcacagtcatcgcactcacagccttgcgcatgggactaatgaccgtcgtcctacccaaatttgatttggagaaggcatgccaggtaattcaggaatatggcataactttcgcatcgattccgccgccggtcgtcctcgcactggcaaagagcccaatcgtatcaaaatacgatctctcatcggttcgcttcatgaactctggtgccgcgcccttgggccgtgatttggtcgagatggtgtgggatcgtttgacaatcccgatcatgcaaggttacggcttatcagagacttcgccaacgctcacaaagggactgatatctgattggaaacgatataatggctctgtagggaagttgctgtcgaatattgaggcgaagatcgtagatccggatggcaaagagttggcttctggtcaagagggcgaagtcttagtcaagggccccaacgtgttccctggttatcttaaccggccagagttacaaaaagacacattcagtgaagatggctatttcaagacaggagatatcgggtattttgatccgaagggcaatctttacatcaccgatcgggtgaaggagttgattaagtacaagggcttccaagtagcgcccgccgagctcgaaggactattgttaggacacgacgagatcgcagatgcgtgtgtcataccagcgcacgacaagcagcgagaaacggaagttcctcgtgcctatatagtcatgaagcccggtttagcgcaagacgaagcaaaggcggccgagatcctcgaatggcttgactctcgcgttgcgaaccacaagaagctccgagggggtgtgcgattcatcggtgtgattcccaaaaatgctagtggtaaattgctgcgtcggatattgaaggagcaagctagggctgaagatagggctgcgggggcgaaattgtaa

SEQ ID NO: 8851 - protein, 556 aa, Muscodor strobelii
  misc_feature: SGI Peptide ID NO. 562742
  misc_feature (46)..(471): Pfam Id: PF00501 Pfam Desc: AMP-binding enzyme
  misc_feature (1)..(552): NCBI GI: 156036226 Blast Desc: SS1G_12801 [Sclerotinia sclerotiorum 1980] gi|154698207|gb|EDN97945.1| SS1G_12801 [Sclerotinia sclerotiorum 1980]
  misc_feature (1)..(552): NCBI GI: 154314383 Blast Desc: BC1G_05285 [Botryotinia fuckeliana B05.10] gi|150848930|gb|EDN24123.1| BC1G_05285 [Botryotinia fuckeliana B05.10]
  misc_feature (1)..(556): NCBI GI: 119177143 Blast Desc: CIMG_07552 [Coccidioides immitis RS]
  misc_feature (1)..(556): NCBI GI: 240107756 Blast Desc: AMP-binding enzyme, [Coccidioides posadasii C735 delta SOWgp]
  misc_feature (1)..(541): NCBI GI: 115395980 Blast Desc: ATEG_04451 [Aspergillus terreus NIH2624] gi|114193198|gb|EAU34898.1| ATEG_04451 [Aspergillus terreus NIH2624]
  misc_feature (1)..(556): NCBI GI: 67539640 Blast Desc: AN5990.2 [Aspergillus nidulans FGSC A4] gi|40738549|gb|EAA57739.1| AN5990.2 [Aspergillus nidulans FGSC A4] gi|259479827|tpe|CBF70407.1| TPA: phenylacetyl-CoA ligase,
  misc_feature (1)..(555): NCBI GI: 189205505 Blast Desc: 4-coumarate-CoA ligase 2 [Pyrenophora tritici-repentis Pt-1C-BFP] gi|187975180|gb|EDU41806.1| 4-coumarate-CoA ligase 2 [Pyrenophora tritici-repentis Pt-1C-BFP]
  misc_feature (1)..(541): NCBI GI: 169783528 Blast Desc: [Aspergillus oryzae RIB40] gi|83774970|dbj|BAE65093.1| protein product [Aspergillus oryzae]
  misc_feature (1)..(554): NCBI GI: 119480943 Blast Desc: phenylacetyl-CoA ligase, [Neosartorya fischeri NRRL 181] gi|119408654|gb|EAW18603.1| phenylacetyl-CoA ligase, [Neosartorya fischeri NRRL 181]
  misc_feature (1)..(552): NCBI GI: 159129425 Blast Desc: phenylacetyl-CoA ligase, [Aspergillus fumigatus A1163]
  misc_feature (12)..(548): SWISSPROT Homolog: EC 6.2.1.12 4-coumarate--CoA ligase
  misc_feature: Useful for introducing or modulating the production of volatile compounds
MPVFSQYDTLDIPDVDLWTYLFERKDKPFSDDKEIYIDPDTKRSYTWKQCKETAREFGNGLRSQWGFKKGDVLAFFSPNNIDYAPVFFGVHYIGGIATTANPAYTVKELAFQLKDSGAKGIVTQVPMLPAVREAARTIGLPEDRIILLGDLRDPSGKFKHFTELKSTGLLKSLSSGQTRVNPKQDLTFLVYSSGTTGLPKGVQLTHTNIIANIAQLEFADRFNAVYHSGGPDGKGDKQLAILPFFHVYGLTVIALTALRMGLMTVVLPKFDLEKACQVIQEYGITFASIPPPVVLALAKSPIVSKYDLSSVRFMNSGAAPLGRDLVEMVWDRLTIPIMQGYGLSETSPTLTKGLISDWKRYNGSVGKLLSNIEAKIVDPDGKELASGQEGEVLVKGPNVFPGYLNRPELQKDTFSEDGYFKTGDIGYFDPKGNLYITDRVKELIKYKGFQVAPAELEGLLLGHDEIADACVIPAHDKQRETEVPRAYIVMKPGLAQDEAKAAEILEWLDSRVANHKKLRGGVRFIGVIPKNASGKLLRRILKEQARAEDRAAGAKL

SEQ ID NO: 8852 - DNA, 2169 bp, Muscodor strobelii
  misc_feature: SGI EST ID NO. CUFF.21281.0
  misc_feature: Variant of the nucleotide sequence at SEQ ID NO 8850
agggaatcaacatggtaggaaacgcctacaatagccgcaattgaaatagaaatgacttcaatgacttcagtcctccttcaatttgtgcatagttgctgaatgctattacagtcttgggtatctacagagattccgtaaagaggcgacgcattctgctctgctctgatctggacgtcaacccccacgttccactgctcttcggggtgcatattaggcgatcttggcccttcggatagctacagctcgccaacgtcatcaccatgcctgtgttttcgcagtacgacacgcttgatattccagacgtcgacttatggacctatcttttcgagaggaaagacaagccattttcagatgacaaagagatctacatagatccagataccaagcgttcgtacacgtggaaacaatgcaaggagacggcccgggagtttggtaacgggctgcggtcgcagtgggggttcaagaaaggcgacgtcttagcattcttcagtcctaataacatcgattatgccccggtcttcttcggtgtgcactacattggtggtattgccaccaccgctaatcccgcgtacacggtcaaggagctcgcatttcagctaaaggactcgggagccaaaggaattgtcactcaggttcccatgctcccggctgtccgtgaagccgcgcgcacaatcggtctaccggaagaccggatcatacttcttggtgatctgcgggatcccagtggcaagttcaagcacttcactgagctgaagtcaaccggccttttgaagtcgctttcctctgggcagacgcgtgtgaacccaaaacaagaccttacgtttttagtatatagctcaggaaccactgggctgccgaaaggtgttcaactgacgcacaccaatatcattgcgaacattgcacaattggagtttgctgaccggttcaatgctgtgtaccactcagggggcccggacgggaaaggtgataagcaacttgctattctacctttcttccatgtctatggtctcacagtcatcgcactcacagccttgcgcatgggactaatgaccgtcgtcctacccaaatttgatttggagaaggcatgccaggtaattcaggaatatggcataactttcgcatcgattccgccgccggtcgtcctcgcactggcaaagagcccaatcgtatcaaaatacgatctctcatcggttcgcttcatgaactctggtgccgcgcccttgggccgtgatttggtcgagatggtgtgggatcgtttgacaatcccgatcatgcaaggttacggcttatcagagacttcgccaacgctcacaaagggactgatatctgattggaaacgatataatggctctgtagggaagttgctgtcgaatattgaggcgaagatcgtagatccggatggcaaagagttggcttctggtcaagagggcgaagtcttagtcaagggccccaacgtgttccctggttatcttaaccggccagagttacaaaaagacacattcagtgaagatggctatttcaagacaggagatatcgggtattttgatccgaagggcaatctttacatcaccgatcgggtgaaggagttgattaagtacagtgagtctcagcatcccctatgctattaatcgttcgaaaatgcaccactaatgtcattccaaagagggcttccaagtagcgcccgccgagctcgaaggactattgttaggacacgacgagatcgcagatgcgtgtgtcataccagcgcacgacaagcagcgagaaacggaagttcctcgtgcctatatagtcatgaagcccggtttagcgcaagacgaagcaaaggcggccgagatcctcgaatggcttgactctcgcgttgcgaaccacaagaagctccgagggggtgtgcgattcatcggtgtgattcccaaaaatgctagtggtaaattgctgcgtcggatattgaaggagcaagctagggctgaagatagggctgcgggggcgaaattgtaaacctgggcttcttgttacgtatataatgaatgtgataccagaagattgcggttgtcaaaagaataatctgcgacattgccttacgggacatataaacattgagccactaccaaatggctgtaacaagtctgcaagtataaaattattgaaaattgttgttgggttaaattcaac

SEQ ID NO: 8853 - DNA, 2157 bp, Muscodor strobelii
  misc_feature: SGI cDNA ID NO. 562743
  misc_feature: Reduced expression when VOC is produced
  misc_feature: Encodes the peptide sequence at SEQ ID NO 8854
atgaccgtggccgagggcgagaagagcccagaatcccgcccatcacattcatcgacgaccgcgatcgagttcactgcccaggccgagaaactgtcgctacaaaaacctgtccaagcagagcatccggactcggctgccgtcgaagctcactttgtcacacccgaagatgctgtcatagtcaccgccgacggaaatcgcctcccaggcgtccctcttcaagaggcttataaactgaatgcgctaaaggatgagctggacgaccaaagttcgcagcctcgtaccgaccacggccgtccatccacctctccaagtcgatccgatgaaaaagataagcacctgacggtaccacgtcgcaatggcaaagcgctacagaaatccgccgaaggttcactacaaacatcgatgccgccctcacacacgaaccccttattccctcctttgccactttacggcccaccgagtatccttcgcaatttgcaatgttggactttccgattttcatcgttcttcttgagcgctggatttcttggcgtcattgtcttgggctccctatttacgagccttcctcctctctgtaatcgcatatggctgcggttgactttccgaaacccacacgcctcgagaccgttctacgaggaagagatgagacggcgcagtgtccgtaaggaacaggagcggacatggaaaaggaggaagtcgatagacaaaggcaatgctgggcaggaaaatcctttgggcaatgatggtttcattccgaccgaaggaggtccagaccctgttgtttgcgatcctggatactacgcgcgtcgagtcgggttggatatcgaggaatttgaagtgcagactgaggatggctttatcattgacttatggcatgtttacgacccgagagagtacactaaagcagacaagtcgagaagagaggaccgagggcccgaactcttctccggtgaacccaagcagaagcgactcaaagaccctaatgggaaacaaaagttccccgttctattaatgcacgggttgcttcaaagcgcaggcgcttactgtgtcaacgatgatgactccctagcgttttatttatgcaaaagcggttacgatgtgtggctaggtaataatcggtgtgggtttacaccaaagcacaaattgttagagtattcagacccacggatgtggtgctggaatattcgccaaatgggagtatttgatcttgcggcgctcacttctagagttctccacgagaccggctttgagaaaattggacttgtgtgccactcgcaaggcacaacacaaaccttcgtggcactggcaaaggaacagcgcccggagcttggtgagaagctcacagtgttttgcgctctggcgcctgcggcttatgcaggctccttaattggcaagatgtacttcaaattcatgagggtaataacgccgagcatgttccgtcttatgttcggcattcacgcctttattccaatcatgatgacgatgcattccatcattcctccaggcttctacgggtggcttggctataaagtcttctcgtttctattcgactggaccgactcacgatgggaccgtgctctgaaaaatcgcatgtttcagttcgcacctgtctatgtaagcgctgagtcgatgcgctggtggctaggacgagaatgttttgcaaagcacaaatgtatcctttccacgaaagaagaatggcgctcagaggatcgggaggatggagaagagctaaaagactctcgcaggaaagattctgttttgtcacatcgttcaacagaccttctcaagcgcaagcctaaaggctcaacttcttggtacaatgaacaggtcccaccgattgcattatgggtggctggaaatgacaatctcgtggatgggagaaagctcatacgacgctttgaacgaggaagagagccgcatgtcaacatcgtccacagcaaagtcatccctgaatacgaacatctcgacgtcatctgggcgatggatgcggttgatcaggtattcgaagaggttcgagaggttttgtggaagacttgcaatgttcgagagaaatgccgcgttcccaagaattgcgaggccctcgaggcttgggtgcccccagcaagcaaaccgaacaacgaagagaccgagcagtctagcagtgactcgccgtattga

SEQ ID NO: 8854 - protein, 718 aa, Muscodor strobelii
  misc_feature: SGI Peptide ID NO. 562743
  misc_feature (18)..(699): NCBI GI: 46122439 Blast Desc: FG05597.1 [Gibberella zeae PH-1]
  misc_feature (1)..(714): NCBI GI: 256729849 Blast Desc: [Nectria haematococca mpVI 77-13-4]
  misc_feature (4)..(699): NCBI GI: 39974651 Blast Desc: MGG_00528 [Magnaporthe grisea 70-15] gi|110628933|gb|ABG79931.1| triacylglycerol lipase [Magnaporthe grisea] gi|145018572|gb|EDK02851.1| MGG_00528 [Magnaporthe grisea
  misc_feature (3)..(714): NCBI GI: 116182004 Blast Desc: CHGG_01630 [Chaetomium globosum CBS 148.51] gi|88185927|gb|EAQ93395.1| CHGG_01630 [Chaetomium globosum CBS 148.51]
  misc_feature (17)..(709): NCBI GI: 85117508 Blast Desc: NCU08372 [Neurospora crassa OR74A] gi|28927081|gb|EAA36039.1| NCU08372 [Neurospora crassa OR74A]
  misc_feature (18)..(699): NCBI GI: 171687305 Blast Desc: protein product [Podospora anserina] gi|170943614|emb|CAP69266.1| protein product [Podospora anserina]
  misc_feature (24)..(697): NCBI GI: 156062652 Blast Desc: SS1G_01442 [Sclerotinia sclerotiorum 1980] gi|154696778|gb|EDN96516.1| SS1G_01442 [Sclerotinia sclerotiorum 1980]
  misc_feature (18)..(576): NCBI GI: 261357417 Blast Desc: sterol esterase [Verticillium albo-atrum VaMs.102]
  misc_feature (24)..(671): NCBI GI: 154308916 Blast Desc: BC1G_07986 [Botryotinia fuckeliana B05.10] gi|150852612|gb|EDN27804.1| BC1G_07986 [Botryotinia fuckeliana B05.10]
  misc_feature (23)..(689): NCBI GI: 242820064 Blast Desc: ab-hydrolase associated lipase, [Talaromyces stipitatus ATCC 10500] gi|218713906|gb|EED13330.1| ab-hydrolase associated lipase, [Talaromyces stipitatus ATCC 10500]
  misc_feature (229)..(675): SWISSPROT Homolog: EC 3.1.1.13 Sterol esterase
  misc_feature: Useful for introducing or modulating the production of volatile compounds
MTVAEGEKSPESRPSHSSTTAIEFTAQAEKLSLQKPVQAEHPDSAAVEAHFVTPEDAVIVTADGNRLPGVPLQEAYKLNALKDELDDQSSQPRTDHGRPSTSPSRSDEKDKHLTVPRRNGKALQKSAEGSLQTSMPPSHTNPLFPPLPLYGPPSILRNLQCWTFRFSSFFLSAGFLGVIVLGSLFTSLPPLCNRIWLRLTFRNPHASRPFYEEEMRRRSVRKEQERTWKRRKSIDKGNAGQENPLGNDGFIPTEGGPDPVVCDPGYYARRVGLDIEEFEVQTEDGFIIDLWHVYDPREYTKADKSRREDRGPELFSGEPKQKRLKDPNGKQKFPVLLMHGLLQSAGAYCVNDDDSLAFYLCKSGYDVWLGNNRCGFTPKHKLLEYSDPRMWCWNIRQMGVFDLAALTSRVLHETGFEKIGLVCHSQGTTQTFVALAKEQRPELGEKLTVFCALAPAAYAGSLIGKMYFKFMRVITPSMFRLMFGIHAFIPIMMTMHSIIPPGFYGWLGYKVFSFLFDWTDSRWDRALKNRMFQFAPVYVSAESMRWWLGRECFAKHKCILSTKEEWRSEDREDGEELKDSRRKDSVLSHRSTDLLKRKPKGSTSWYNEQVPPIALWVAGNDNLVDGRKLIRRFERGREPHVNIVHSKVIPEYEHLDVIWAMDAVDQVFEEVREVLWKTCNVREKCRVPKNCEALEAWVPPASKPNNEETEQSSSDSPY

SEQ ID NO: 8855 - DNA, 2942 bp, Muscodor strobelii
  misc_feature: SGI EST ID NO. CUFF.21211.0
  misc_feature: Variant of the nucleotide sequence at SEQ ID NO 8853
tctgtttacgccaaaaagcataataattattgagcccagacaaccgcatttgtgttttccagtcgagaacagcacgactctctcagctatgagaaataagcgatgtggtcggcgggtgggaaactaagataaaagggtgaagttgcatggggtaaatttaagatttcgtgggaacagggactcagccgatctcagtagtgtattgatcgtagattaacaatatgatcggcacccaaaaccattccatgtcttgggttcttccttgtttcatcatgactatatttacatagcctcttccatacattctgtatatacaagttctttgatcccgtttttaagaggagtaaacctcgattgataatttcgcttccccaatgcagagacgaaaagccccttgattcgaaaatatgaccgtggccgagggcgagaagagcccagaatcccgcccatcacattcatcgacgaccgcgatcgagttcactgcccaggccgagaaactgtcgctacaaaaacctgtccaagcagagcatccggactcggctgccgtcgaagctcactttgtcacacccgaagatgctgtcatagtcaccgccgacggaaatcgcctcccaggcgtccctcttcaagaggcttataaactgaatgcgctaaaggatgagctggacgaccaaagttcgcagcctcgtaccgaccacggccgtccatccacctctccaagtcgatccgatgaaaaagataagcacctgacggtaccacgtcgcaatggcaaagcgctacagaaatccgccgaaggttcactacaaacatcgatgccgccctcacacacgaaccccttattccctcctttgccactttacggcccaccgagtatccttcgcaatttgcaatgttggactttccgattttcatcgttcttcttgagcgctggatttcttggcgtcattgtcttgggctccctatttacgagccttcctcctctctgtaatcgcatatggctgcggttgactttccgaaacccacacgcctcgagaccgttctacgaggaagagatgagacggcgcagtgtccgtaaggaacaggagcggacatggaaaaggaggaagtcgatagacaaaggcaatgctgggcaggaaaatcctttgggcaatgatggtttcattccgaccgaaggaggtccagaccctgttgtttgcgatcctggatactacgcgcgtcgagtcgggttggatatcgaggaatttgaagtgcagactgaggatggctttatcattgacttatggcatgtttacgacccgagagagtacactaaagcagacaagtcgagaagagaggaccgagggcccgaactcttctccggtgaacccaagcagaagcgactcaaagaccctaatgggaaacaaaagttccccgttctattaatgcacgggttgcttcaaagcgcaggcgcttactgtgtcaacgatgatgactccctagcgttttatttatgcaaaagcggttacgatgtgtggctaggtaataatcggtgtgggtttacaccaaagcacaaattgttagagtattcagacccacggatgtggtgctggaatattcgccaaatgggagtatttgatcttgcggcgctcacttctagagttctccacgagaccggctttgagaaaattggacttgtgtgccactcgcaaggcacaacacaaaccttcgtggcactggcaaaggaacagcgcccggagcttggtgagaagctcacagtgttttgcgctctggcgcctgcggcttatgcaggctccttaattggcaagatgtacttcaaattcatgagggtaataacgccgagcatgttccgtcttatgttcggcattcacgcctttattccaatcatgatgacgatgcattccatcattcctccaggcttctacgggtggcttggctataaagtcttctcgtttctattcgactggaccgactcacgatgggaccgtgctctgaaaaatcgcatgtttcagttcgcacctgtctatgtaagcgctgagtcgatgcgctggtggctaggacgagaatgttttgcaaagcacaaatgtatcctttccacgaaagaagaatggcgctcagaggatcgggaggatggagaagagctaaaagactctcgcaggaaagattctgttttgtcacatcgttcaacagaccttctcaagcgcaagcctaaaggctcaacttcttggtacaatgaacaggtcccaccgattgcattatgggtggctggaaatgacaatctcgtggatgggagaaagctcatacgacgctttgaacgaggaagagagccgcatgtcaacatcgtccacagcaaagtcatccctgaatacgaacatctcgacgtcatctgggcgatggatgcggttgatcaggtattcgaagaggttcgagaggttttgtggaagacttgcaatgttcgagagaaatgccgcgttcccaagaattgcgaggccctcgaggcttgggtgcccccagcaagcaaaccgaacaacgaagagaccgagcagtctagcagtgactcgccgtattgaacgcgcctcaaaggcacatggacgatctttgggttatgcgtgatgcacgtttatgagaaccttcaggctgcgtaattgggaatcggatatttgacactgttcatattacctcaggtgtactatgccattggatacgtttgttggttttcttggtgtttttgcatgtttagcgtataagcaggccacgacactattactatttggcattagaccaacctgcagctccgttaccccagaatatggggcttaatatcgaggacataataagcatcgtacatagccgagatataccacataaattagagaagtaatagagtgttaccgagactgtggatatcttgactctgatcgcggagtctaggagttgatcagttacgc

SEQ ID NO: 8856 - DNA, 4200 bp, Muscodor strobelii
  misc_feature: SGI cDNA ID NO. 562744
  misc_feature: Reduced expression when VOC is produced
  misc_feature: Encodes the peptide sequence at SEQ ID NO 8857
atggccaatccatcagactgcagccgcggtttagatcctcggcgcaatcgcaaaaggagacggaggcaggacaagcccccaatctctgcgcgactcgtcctcgacgaccacgtgaggggagacgtgggcatcctgtctgacgacctcttcgctgatctgtttccctacttgcggccatacgagtcggacgagcccgagcagagctacgctcccccagtccatcatgttgccattgccccttggactccagatcccacgccccaacgcacaagctggacaattgtccccgtcaccaagtccaccgccctcgcccactcgaccttgcagttctccacgtcctccttagctctccagaacttcgccagcgtgctgcaacagaccgccccctccaagctgtccgcccacagcaggagtggaatcgagatacacgtgctcgacgtcgctgcgttggctctcgacaccgtattcgtgaacctcgagagcgacctggtgaagaggctggagaacggcgagggcaccttctttagagatcacccgacaaacaaaggcaagcaacctgcaacggccgagacacctgccgatcgtctggctacggctcttcgtgttgctctgggcgctctgcacgtcgtccacgacggcgacttatttcatcttcccttgccaccacatcccgtaacccatgcgccctcccttcctggaaaagtaacactatgcgagcctgtatctcaggggatcctcgctccaacgaccaagatcatcgtaacgcgtggccactcccaatccaagaacgaccgtgccgcaatcacctctacgcaggccctcaatggtgtcaatcacgacgacgaagatacggcaaccgaccaattctactctgccgccgaagagcgctacaggaccgatgcccagaacgagacgtcagactttgtcacggaaacagagacggaggtgtcggagatggagaacgacgaagaactctcggatgactctatggacgagatgatatctctgtccatccctgccttgcctcctacagctgcgagtggtgtgtctacaatgcagccggggacgcccatgactattggcacgatcggccgcggcaggaagaccaacggcatcaacacgccaggctccgtattttcgagcttcactgcaacgaccgctcgtcctgatcgccctaaaggacgcctctttaaagcgcaaggtctggtgaacccaatccctcacggcctacttcacccaaagccgacagctgaagacgatggcgaggctttcatcttcgtcgacatcaattcattgacacggattggctgtttttcgggtgattgggtgcgcgtggaagctgcggaggaacctccgtccaacggaatgggtctgttcggactgggcagcttcgggcattcagaagaagaggcgaattggagacctgctaaagtttttggtcttcccgatgggatgggtcgccgaccaatgacaagaataccaagttcgagacatgaaccaggtggtcgacggttatcttttttcgagtctcaaatacagaagcccatgggtcctggtgcatatgtgtcccctcttttgcttgccaacctagaaaacacaccgtatgtgcgcttgtcaccgctcaaaaggcacgcataccccccgaggcctggccagagcaagattacaagctcatctcatccaccatatgcccgggatgtgacgatacagcagattcggagccccgtctcgtccgaaaaggcacttcaaaccgctattctaggtggtttgaaatcccactttgcccgcagcttacgtatcgttagaaccggcgatttgattgccgtaccccttgacacacgcttaggcaggactctacaagaatccgcaacctcaagcgatgggctcgcagtggatgatctcttggctatagccgctgctggtcacacagcagtcagtaactcatccaggcctgatgccattgcctggttcagaattggacatattgtcaggcaaaagtcagaaatgccagatgatgaggacgatgaggatatctggggcggagtcgcatgcgtgaacagttctcttacccagatcgcccaatctggcagcgttacgaactcaatccccggcacaaaggacagcaattggccattttatctcggtctcgaggaaacgccccaatctgcgccaacggcacttgccacaacactccaacagccctcccaaaatttcgtctcgcccttacgacggaggttgagagagctcatggcggctgcgaccagtaagagggctattcacttgaagatgccgccagtagcgatactccttgtgtcaacacagcggaatattggaaaggcaacgatggccataagcgccagctcggacattggtctccatagcttcacgatcgatgcatatgatatcgtcaatgagagtggtgctggaggtagtgacgtgaagactgaaggattcctgaaagctcgagctgagcgtgccatgagctgtggatccgactgctgcgcattgttaattcgtcacgttgaagctcttacagcggataggatggtaactgccgtgaaggaaatcctagccgaggcgagagtcttgattgctactacaacagaggttgacaaagtaccagacggtgtgcgcggactgttcacgcacgaaatcgagatgagcgcgcccgatgagagtgagcgtgaaggtattttacggtctattgtcgatggccgtggtgtagccttggctccaggagtccaattaagcggcgttgccatcaagacggctgctctcgttgccggtgacctcgtcgatgtggtagagagagcaatggttgcccgggactcacgtcttgaatccctgtcgttgaaggcctccacagccgactccaatatatcgattcgtgatattcaagtagcgggtggctcatcggcaagatgtttgacaaaatcagattttgatatcgccgtcgacgcagcccgcaagaatttcgcggatgcaattggcgcacctaagatacccaatgttacctgggacgatgttggtggtctaaataatgtcaaggaagccgtcatggagactatacaactgcctctagagcggccggaacttttcgcgaagggtatgaagaaacgctctggtatcctgttctatgggcctcccggaactggtaagacattgctcgccaaagctatcgccacagagtacagtttgaatttcttcagtgttaagggacctgaattactaaacatgtacattggtgaatccgaagccaacgttcgtagggttttccaacgcgcacgagatgcgcgaccttgtgttgtcttctttgatgagcttgactctgtagctcccaagagaggcaaccaaggtgacagcggcggtgtcatggaccgtattgtgtcgcaactcttggctgaactagatggcatgtctggcggtgatgatggaggaggtggtgtgttcgtcatcggtgccaccaatcgaccagatcttctggatcaggcactgttacgtccaggtcgatttgacaagatgttgtacttgggcgtttccgatacccatgccaaacagctcacgatcatggaagccctcaccaggaaattcacgctccacccctccgtatctctggcgtctgtggctgaacatctgccctttacttatacaggcgccgatttttacgccctgtgcagcgacgccatgcttaaagctgtgacacggcaagcagccgccgtcgacgcaaaaatcaaggcacttaatgcgaaccgaccggagtcattgcatcatatctcgactgctaacttcttcgaccatcatgcaacgcctgacgacatcgcagtcatggtcacagagaaagacttcctggacgccaatcgcgagctaattcccagcgtcagtgccggtgaactcgcacactacgatcgtgtgcgtcaaacatttgagggtggtaaggataaagcacaagtctctaacaccgtcgctacgcccatctctgctactttcgaccggccatcttcgaaaggcaagggtaagggcaaggcggtgaataaaggaaaaggaaaggccattgctacagctagcgatgatgaggacgacgatgatgtggataatgattatgctggttatggcagcgttaatggacgctccaaggggaagggaaaagccgttgctaggtttcaggactctacgggtagtgatgatgatgggttgtattaa

SEQ ID NO: 8857 - protein, 1399 aa, Muscodor strobelii
  misc_feature: SGI Peptide ID NO. 562744
  misc_feature (1042)..(1234): Pfam Id: PF00004 Pfam Desc: ATPase family associated with various cellular activities (AAA)
  misc_feature (862)..(944): Pfam Id: PF00004 Pfam Desc: ATPase family associated with various cellular activities (AAA)
  misc_feature (1043)..(1062): Pfam Id: PF01078 Pfam Desc: Magnesium chelatase, subunit ChlI
  misc_feature (23)..(1399): NCBI GI: 116182002 Blast Desc: CHGG_01629 [Chaetomium globosum CBS 148.51] gi|88185926|gb|EAQ93394.1| CHGG_01629 [Chaetomium globosum CBS 148.51]
  misc_feature (23)..(1399): NCBI GI: 51701840 Blast Desc: PEX6_GLOLA RecName: Full=Peroxisomal biogenesis factor 6; AltName: Full=Peroxin-6; AltName: Full=ClaPEX6 gi|13249305|gb|AAK16738.1|AF343063_1 Pex6 protein [Colletotrichum
  misc_feature (23)..(1399): NCBI GI: 39974649 Blast Desc: MGG_00529 [Magnaporthe grisea 70-15] gi|110628929|gb|ABG79929.1| PEX6 protein [Magnaporthe grisea] gi|145018571|gb|EDK02850.1| MGG_00529 [Magnaporthe grisea 70-15]
  misc_feature (23)..(1314): NCBI GI: 85117512 Blast Desc: peroxisomal biogenesis factor 6 [Neurospora crassa OR74A] gi|51701798|sp|Q7SGP2.1|PEX6_NEUCR RecName: Full=Peroxisomal biogenesis factor 6; AltName: Full=Peroxin-6 6
  misc_feature (23)..(1399): NCBI GI: 156062650 Blast Desc: SS1G_01441 [Sclerotinia sclerotiorum 1980] gi|154696777|gb|EDN96515.1| SS1G_01441 [Sclerotinia sclerotiorum 1980]
  misc_feature (23)..(1399): NCBI GI: 171687307 Blast Desc: protein product [Podospora anserina] gi|170943615|emb|CAP69267.1| protein product [Podospora anserina]
  misc_feature (256)..(1399): NCBI GI: 256729663 Blast Desc: [Nectria haematococca mpVI 77-13-4]
  misc_feature (256)..(1399): NCBI GI: 46122437 Blast Desc: FG05596.1 [Gibberella zeae PH-1]
  misc_feature (24)..(1339): NCBI GI: 231292279 Blast Desc: peroxin 6 [Alternaria alternata]
  misc_feature (14)..(1309): NCBI GI: 258575415 Blast Desc: peroxisomal biogenesis factor 6 [Uncinocarpus reesii 1704] gi|237902155|gb|EEP76556.1| peroxisomal biogenesis factor 6 [Uncinocarpus reesii 1704]
  misc_feature: Useful for introducing or modulating the production of volatile compounds
MANPSDCSRGLDPRRNRKRRRRQDKPPISARLVLDDHVRGDVGILSDDLFADLFPYLRPYESDEPEQSYAPPVHHVAIAPWTPDPTPQRTSWTIVPVTKSTALAHSTLQFSTSSLALQNFASVLQQTAPSKLSAHSRSGIEIHVLDVAALALDTVFVNLESDLVKRLENGEGTFFRDHPTNKGKQPATAETPADRLATALRVALGALHVVHDGDLFHLPLPPHPVTHAPSLPGKVTLCEPVSQGILAPTTKIIVTRGHSQSKNDRAAITSTQALNGVNHDDEDTATDQFYSAAEERYRTDAQNETSDFVTETETEVSEMENDEELSDDSMDEMISLSIPALPPTAASGVSTMQPGTPMTIGTIGRGRKTNGINTPGSVFSSFTATTARPDRPKGRLFKAQGLVNPIPHGLLHPKPTAEDDGEAFIFVDINSLTRIGCFSGDWVRVEAAEEPPSNGMGLFGLGSFGHSEEEANWRPAKVFGLPDGMGRRPMTRIPSSRHEPGGRRLSFFESQIQKPMGPGAYVSPLLLANLENTPYVRLSPLKRHAYPPRPGQSKITSSSHPPYARDVTIQQIRSPVSSEKALQTAILGGLKSHFARSLRIVRTGDLIAVPLDTRLGRTLQESATSSDGLAVDDLLAIAAAGHTAVSNSSRPDAIAWFRIGHIVRQKSEMPDDEDDEDIWGGVACVNSSLTQIAQSGSVTNSIPGTKDSNWPFYLGLEETPQSAPTALATTLQQPSQNFVSPLRRRLRELMAAATSKRAIHLKMPPVAILLVSTQRNIGKATMAISASSDIGLHSFTIDAYDIVNESGAGGSDVKTEGFLKARAERAMSCGSDCCALLIRHVEALTADRMVTAVKEILAEARVLIATTTEVDKVPDGVRGLFTHEIEMSAPDESEREGILRSIVDGRGVALAPGVQLSGVAIKTAALVAGDLVDVVERAMVARDSRLESLSLKASTADSNISIRDIQVAGGSSARCLTKSDFDIAVDAARKNFADAIGAPKIPNVTWDDVGGLNNVKEAVMETIQLPLERPELFAKGMKKRSGILFYGPPGTGKTLLAKAIATEYSLNFFSVKGPELLNMYIGESEANVRRVFQRARDARPCVVFFDELDSVAPKRGNQGDSGGVMDRIVSQLLAELDGMSGGDDGGGGVFVIGATNRPDLLDQALLRPGRFDKMLYLGVSDTHAKQLTIMEALTRKFTLHPSVSLASVAEHLPFTYTGADFYALCSDAMLKAVTRQAAAVDAKIKALNANRPESLHHISTANFFDHHATPDDIAVMVTEKDFLDANRELIPSVSAGELAHYDRVRQTFEGGKDKAQVSNTVATPISATFDRPSSKGKGKGKAVNKGKGKAIATASDDEDDDDVDNDYAGYGSVNGRSKGKGKAVARFQDSTGSDDDGLY

SEQ ID NO: 8858 - DNA, 6087 bp, Muscodor strobelii
  misc_feature: SGI EST ID NO. CUFF.21350.0
  misc_feature: Variant of the nucleotide sequence at SEQ ID NO 8856
cttgcatcgtttcaacccgccgagatcccaacacaccgcactttatattttgcggaagtgcttctactattaagcttgagtaaaatagtatttctacctactatcttcttctagcctaccaccggcttagtccgtcctttgcgcacgctctcgttccatcggtaagctttgctttgcgcagcattgtaatctccagatgaacgcaggtcgcggtcgacacagctcgtagtctagcttcaaagctccaaagctgaggtggacgggtgtgaggtggcgcacgtgtcgggaaatggccaatccatcagactgcagccgcggtttagatcctcggcgcaatcgcaaaaggagacggaggcaggacaagcccccaatctctgcgcgactcgtcctcgacgaccacgtgaggggagacgtgggcatcctgtctgacgacctcttcgctgatctgtttccctacttgcggccatacgagtcggacgagcccgagcagagctacgctcccccagtccatcatgttgccattgccccttggactccagatcccacgccccaacgcacaagctggacaattgtccccgtcaccaagtccaccgccctcgcccactcgaccttgcagttctccacgtcctccttagctctccagaacttcgccagcgtgctgcaacagaccgccccctccaagctgtccgcccacagcaggagtggaatcgagatacacgtgctcgacgtcgctgcgttggctctcgacaccgtattcgtgaacctcgagagcgacctggtgaagaggctggagaacggcgagggcaccttctttagagatcacccgacaaacaaaggcaagcaacctgcaacggccgagacacctgccgatcgtctggctacggctcttcgtgttgctctgggcgctctgcacgtcgtccacgacggcgacttatttcatcttcccttgccaccacatcccgtaacccatgcgccctcccttcctggaaaagtaacactatgcgagcctgtatctcaggggatcctcgctccaacgaccaagatcatcgtaacgcgtggccactcccaatccaagaacgaccgtgccgcaatcacctctacgcaggccctcaatggtgtcaatcacgacgacgaagatacggcaaccgaccaattctactctgccgccgaagagcgctacaggaccgatgcccagaacgagacgtcagactttgtcacggaaacagagacggaggtgtcggagatggagaacgacgaagaactctcggatgactctatggacgagatgatatctctgtccatccctgccttgcctcctacagctgcgagtggtgtgtctacaatgcagccggggacgcccatgactattggcacgatcggccgcggcaggaagaccaacggcatcaacacgccaggctccgtattttcgagcttcactgcaacgaccgctcgtcctgatcgccctaaaggacgcctctttaaagcgcaaggtctggtgaacccaatccctcacggcctacttcacccaaagccgacagctgaagacgatggcgaggctttcatcttcgtcgacatcaattcattgacacggattggctgtttttcgggtgattgggtgcgcgtggaagctgcggaggaacctccgtccaacggaatgggtctgttcggactgggcagcttcgggcattcagaagaagaggcgaattggagacctgctaaagtttttggtcttcccgatgggatgggtcgccgaccaatgacaagaataccaagttcgagacatgaaccaggtggtcgacggttatcttttttcgagtctcaaatacagaagcccatgggtcctggtgcatatgtgtcccctcttttgcttgccaacctagaaaacacaccgtatgtgcgcttgtcaccgctcaaaaggcacgcataccccccgaggcctggccagagcaagattacaagctcatctcatccaccatatgcccgggatgtgacgatacagcagattcggagccccgtctcgtccgaaaaggcacttcaaaccgctattctaggtggtttgaaatcccactttgcccgcagcttacgtatcgttagaaccggcgatttgattgccgtaccccttgacacacgcttaggcaggactctacaagaatccgcaacctcaagcgatgggctcgcagtggatgatctcttggctatagccgctgctggtcacacagcagtcagtaactcatccaggcctgatgccattgcctggttcagaattggacatattgtcaggcaaaagtcagaaatgccagatgatgaggacgatgaggatatctggggcggagtcgcatgcgtgaacagttctcttacccagatcgcccaatctggcagcgttacgaactcaatccccggcacaaaggacagcaattggccattttatctcggtctcgaggaaacgccccaatctgcgccaacggcacttgccacaacactccaacagccctcccaaaatttcgtctcgcccttacgacggaggttgagagagctcatggcggctgcgaccagtaagagggctattcacttgaagatgccgccagtagcgatactccttgtgtcaacacagcggaatattggaaaggcaacgatggccataagcgccagctcggacattggtctccatagcttcacgatcgatgcatatgatatcgtcaatgagagtggtgctggaggtagtgacgtgaagactgaaggattcctgaaagctcgagctgagcgtgccatgagctgtggatccgactgctgcgcattgttaattcgtcacgttgaagctcttacagcggataggatggtaactgccgtgaaggaaatcctagccgaggcgagagtcttgattgctactacaacagaggttgacaaagtaccagacggtgtgcgcggactgttcacgcacgaaatcgagatgagcgcgcccgatgagagtgagcgtgaaggtattttacggtctattgtcgatggccgtggtgtagccttggctccaggagtccaattaagcggcgttgccatcaagacggctgctctcgttgccggtgacctcgtcgatgtggtagagagagcaatggttgcccgggactcacgtcttgaatccctgtcgttgaaggcctccacagccgactccaatatatcgattcgtgatattcaagtagcgggtggctcatcggcaagatgtttgacaaaatcagattttgatatcgccgtcgacgcagcccgcaagaatttcgcggatgcaattggcgcacctaagatacccaatgttacctgggacgatgttggtggtctaaataatgtcaaggaagccgtcatggagactatacaactgcctctagagcggccggaacttttcgcgaagggtatgaagaaacgctctggtatcctgttctatgggcctcccggaactggtaagacattgctcgccaaagctatcgccacagagtacagtttgaatttcttcagtgttaagggacctgaattactaaacatgtacattggtgaatccgaagccaacgttcgtagggttttccaacgcgcacgagatgcgcgaccttgtgttgtcttctttgatgagcttgactctgtagctcccaagagaggcaaccaaggtgacagcggcggtgtcatggaccgtattgtgtcgcaactcttggctgaactagatggcatgtctggcggtgatgatggaggaggtggtgtgttcgtcatcggtgccaccaatcgaccagatcttctggatcaggcactgttacgtccaggtcgatttgacaagatgttgtacttgggcgtttccgatacccatgccaaacagctcacgatcatggaagccctcaccaggaaattcacgctccacccctccgtatctctggcgtctgtggctgaacatctgccctttacttatacaggcgccgatttttacgccctgtgcagcgacgccatgcttaaagctgtgacacggcaagcagccgccgtcgacgcaaaaatcaaggcacttaatgcgaaccgaccggagtcattgcatcatatctcgactgctaacttcttcgaccatcatgcaacgcctgacgacatcgcagtcatggtcacagagaaagacttcctggacgccaatcgcgagctaattcccagcgtcagtgccggtgaactcgcacactacgatcgtgtgcgtcaaacatttgagggtggtaaggataaagcacaagtctctaacaccgtcgctacgcccatctctgctactttcgaccggccatcttcgaaaggcaagggtaagggcaaggcggtgaataaaggaaaaggaaaggccattgctacagctagcgatgatgaggacgacgatgatgtggataatgattatgctggttatggcagcgttaatggacgctccaaggggaagggaaaagccgttgctaggtttcaggactctacgggtagtgatgatgatgggttgtattaaattaaccagcaggtgcaaacgttacctcgttggaactcgcgataaaagtgtatttgtgtatgaatgtagcagatgagatgacacggttacgtgaaaaggatagatcagcatatgtcaccatatattctgagcggctagatgcatgatcgaccctattagatatggcgctgtcgatgaaatgctaggagtgattatggaccttgcgcattggctacatccccattcctatgaaataatgtggtatctaatacgacctgctcatacttaagactagtcgatcattactctcgctcctcgcgtgagcacttttcgcaaagaggctcagaagaaatctatcacaacagacaatttccagcttcagtgcaatgtccaactagggatttcaacctgagtgtcttcatttcttcgctttggcagtttctttcgccttatcctgctcctcttcactatcctcttcatcactatcgtcctcatcgtcctcgtcgtcgtcatcatcatcatcatcctcctcctcctcctcttcttcttcttcctcgtcatcgtcctcgctatcttcctcttcactactacttacctcagcaatggcgctcttcttctcaatcttagcaatctcctccggcggcgcagccgcaacgacagagccgcggtgctcggagacgccacttatgctagctgtggacttccaagttccgctcgtagggctctggagcgtgggctgagcaccgccatcagtcggttggccgccacgccatgttcccgtggtaggggattgcagagctgcagcaccgctgatggagagtccgcttagtccctctgtgacgtccacggaggcagacttctccttctgtggtgtggcgggtgcggctgcgccgtcgagctgggagttttctttgtttttcccgtctgtagaggatggggggtctttctcctttttgccgtggactttctcccgcagtctctcgagctgtacctttttggccttctgggcggcttcctcggcgatgctcttgatgggtgctgctgctgtattgacagcttttgcagtgatgccagtcccggcagtgctcgtgcctgcgcttggggcggagagcgggagcttggtcttgtctttgtcggtgggcagcggcgggggtgccggaggtgctgccggcgtgctgcttggtgtcgcggcggatgtggacggtgtagaagacgcggcgactccggactttggaaagggctgattcagtggtcgcatggccacaggcggaggggccgcattcttgggtggtatggtgaagtcgtcgtagtagatctggacatgctgcttcagctcaccgtactcgttccattcttcgatctcgaccaggtcctgatatgatcgttaataggtgaagagacagtagatatctacatgtagtcaatagtgtctacgtacgccgaggacgagacccatctgcacgaggcccggcagcttgcgcatgcggccgccttcatctttcccagcgcgtcggccccatagcatgcgagccttgtcgtcggtggcgatgtcgagggccttgaagggcacgcgattggcgcgcaagatggtctccagacgcgaggttgcggtgacgctg

SEQ ID NO: 8859 - DNA, 516 bp, Muscodor strobelii
  misc_feature: SGI cDNA ID NO. 562745
  misc_feature: Encodes the peptide sequence at SEQ ID NO 8860
atgcttaaagctgtgacacggcaagcagccgccgtcgacgcaaaaatcaaggcacttaatgcgaaccgaccggagtcattgcatcatatctcgactgctaacttcttcgaccatcatgcaacgcctgacgacatcgcagtcatggtcacagagaaagacttcctggacgccaatcgcgagctaattcccagcgtcagtgccggtgaactcgcacactacgatcgtgtgcgtcaaacatttgagggtggtaaggataaagcacaagtctctaacaccgtcgctacgcccatctctgctactttcgaccggccatcttcgaaaggcaagggtaagggcaaggcggtgaataaaggaaaaggaaaggccattgctacagctagcgatgatgaggacgacgatgatgtggataatgattatgctggttatggcagcgttaatggacgctccaaggggaagggaaaagccgttgctaggtttcaggactctacgggtagtgatgatgatgggttgtattaa

SEQ ID NO: 8860 - protein, 171 aa, Muscodor strobelii
  misc_feature: SGI Peptide ID NO. 562745
  misc_feature (1)..(171): NCBI GI: 46122437 Blast Desc: FG05596.1 [Gibberella zeae PH-1]
  misc_feature (1)..(171): NCBI GI: 261357415 Blast Desc: peroxisomal biogenesis factor 6 [Verticillium albo-atrum VaMs.102]
  misc_feature (1)..(171): NCBI GI: 51701840 Blast Desc: PEX6_GLOLA RecName: Full=Peroxisomal biogenesis factor 6; AltName: Full=Peroxin-6; AltName: Full=ClaPEX6 gi|13249305|gb|AAK16738.1|AF343063_1 Pex6 protein [Colletotrichum
  misc_feature (1)..(171): NCBI GI: 116182002 Blast Desc: CHGG_01629 [Chaetomium globosum CBS 148.51] gi|88185926|gb|EAQ93394.1| CHGG_01629 [Chaetomium globosum CBS 148.51]
  misc_feature (1)..(171): NCBI GI: 39974649 Blast Desc: MGG_00529 [Magnaporthe grisea 70-15] gi|110628929|gb|ABG79929.1| PEX6 protein [Magnaporthe grisea] gi|145018571|gb|EDK02850.1| MGG_00529 [Magnaporthe grisea 70-15]
  misc_feature (1)..(171): NCBI GI: 171687307 Blast Desc: protein product [Podospora anserina] gi|170943615|emb|CAP69267.1| protein product [Podospora anserina]
  misc_feature (1)..(86): NCBI GI: 85117512 Blast Desc: peroxisomal biogenesis factor 6 [Neurospora crassa OR74A] gi|51701798|sp|Q7SGP2.1|PEX6_NEUCR RecName: Full=Peroxisomal biogenesis factor 6; AltName: Full=Peroxin-6 6
  misc_feature (1)..(167): NCBI GI: 189203625 Blast Desc: peroxisomal biogenesis factor 6 [Pyrenophora tritici-repentis Pt-1C-BFP] gi|187985247|gb|EDU50735.1| peroxisomal biogenesis factor 6 [Pyrenophora tritici-repentis
  misc_feature (1)..(81): NCBI GI: 258575415 Blast Desc: peroxisomal biogenesis factor 6 [Uncinocarpus reesii 1704] gi|237902155|gb|EEP76556.1| peroxisomal biogenesis factor 6 [Uncinocarpus reesii 1704]
  misc_feature (1)..(147): NCBI GI: 145252002 Blast Desc: An16g02010 [Aspergillus niger] gi|134083057|emb|CAL00425.1| protein product [Aspergillus niger]
MLKAVTRQAAAVDAKIKALNANRPESLHHISTANFFDHHATPDDIAVMVTEKDFLDANRELIPSVSAGELAHYDRVRQTFEGGKDKAQVSNTVATPISATFDRPSSKGKGKGKAVNKGKGKAIATASDDEDDDDVDNDYAGYGSVNGRSKGKGKAVARFQDSTGSDDDGLY

SEQ ID NO: 8861 - DNA, 6087 bp, Muscodor strobelii; identical to SEQ ID NO: 8858
  misc_feature: SGI EST ID NO. CUFF.21350.0
  misc_feature: Variant of the nucleotide sequence at SEQ ID NO 8859

SEQ ID NO: 8862 - DNA, 1194 bp, Muscodor strobelii
  misc_feature: SGI cDNA ID NO. 562746
  misc_feature: Elevated expression when VOC is produced
  misc_feature: Encodes the peptide sequence at SEQ ID NO 8863
atggccgagaccccggcatcttcgagctcttattccaccgaccccgcgctgtacatctacaccgtcaccgcaacctcgcgtctggagaccatcttgcgcgccaatcgcgtgcccttcaaggccctcgacatcgccaccgacgacaaggctcgcatgctatggggccgacgcgctgggaaagatgaaggcggccgcatgcgcaagctgccgggcctcgtgcagatgggtctcgtcctcggcgacctggtcgagatcgaagaatggaacgagtacggtgagctgaagcagcatgtccagatctactacgacgacttcaccataccacccaagaatgcggcccctccgcctgtggccatgcgaccactgaatcagccctttccaaagtccggagtcgccgcgtcttctacaccgtccacatccgccgcgacaccaagcagcacgccggcagcacctccggcacccccgccgctgcccaccgacaaagacaagaccaagctcccgctctccgccccaagcgcaggcacgagcactgccgggactggcatcactgcaaaagctgtcaatacagcagcagcacccatcaagagcatcgccgaggaagccgcccagaaggccaaaaaggtacagctcgagagactgcgggagaaagtccacggcaaaaaggagaaagaccccccatcctctacagacgggaaaaacaaagaaaactcccagctcgacggcgcagccgcacccgccacaccacagaaggagaagtctgcctccgtggacgtcacagagggactaagcggactctccatcagcggtgctgcagctctgcaatcccctaccacgggaacatggcgtggcggccaaccgactgatggcggtgctcagcccacgctccagagccctacgagcggaacttggaagtccacagctagcataagtggcgtctccgagcaccgcggctctgtcgttgcggctgcgccgccggaggagattgctaagattgagaagaagagcgccattgctgaggtaagtagtagtgaagaggaagatagcgaggacgatgacgaggaagaagaagaagaggaggaggaggaggatgatgatgatgatgacgacgacgaggacgatgaggacgatagtgatgaagaggatagtgaagaggagcaggataaggcgaaagaaactgccaaagcgaagaaatga

SEQ ID NO: 8863 - protein, 397 aa, Muscodor strobelii
  misc_feature: SGI Peptide ID NO. 562746
  misc_feature (1)..(339): NCBI GI: 116181996 Blast Desc: CHGG_01626 [Chaetomium globosum CBS 148.51] gi|88185923|gb|EAQ93391.1| CHGG_01626 [Chaetomium globosum CBS 148.51]
  misc_feature (10)..(333): NCBI GI: 171687309 Blast Desc: protein product [Podospora anserina] gi|170943616|emb|CAP69268.1| protein product [Podospora anserina]
  misc_feature (8)..(337): NCBI GI: 256729850 Blast Desc: NECHADRAFT_105024 [Nectria haematococca mpVI 77-13-4]
  misc_feature (9)..(304): NCBI GI: 46122435 Blast Desc: FG05595.1 [Gibberella zeae PH-1]
  misc_feature (9)..(117): NCBI GI: 39974627 Blast Desc: MGG_00540 [Magnaporthe grisea 70-15] gi|145018559|gb|EDK02838.1| MGG_00540 [Magnaporthe grisea 70-15]
  misc_feature (14)..(100): NCBI GI: 156050373 Blast Desc: SS1G_07773 [Sclerotinia sclerotiorum 1980] gi|154692174|gb|EDN91912.1| SS1G_07773 [Sclerotinia sclerotiorum 1980]
  misc_feature (13)..(100): NCBI GI: 154295097 Blast Desc: BC1G_13677 [Botryotinia fuckeliana B05.10] gi|150844453|gb|EDN19646.1| BC1G_13677 [Botryotinia fuckeliana B05.10]
  misc_feature (13)..(395): NCBI GI: 71002344 Blast Desc: conserved [Aspergillus fumigatus Af293] gi|66853491|gb|EAL93815.1| conserved [Aspergillus fumigatus Af293] gi|159129910|gb|EDP55024.1| conserved [Aspergillus A1163]
  misc_feature (5)..(150): NCBI GI: 119194075 Blast Desc: CIMG_01412 [Coccidioides immitis RS]
  misc_feature (13)..(138): NCBI GI: 145242030 Blast Desc: An09g03440 [Aspergillus niger] gi|134078205|emb|CAK40284.1| protein product [Aspergillus niger]
  misc_feature: Useful for introducing or modulating the production of volatile compounds
MAETPASSSSYSTDPALYIYTVTATSRLETILRANRVPFKALDIATDDKARMLWGRRAGKDEGGRMRKLPGLVQMGLVLGDLVEIEEWNEYGELKQHVQIYYDDFTIPPKNAAPPPVAMRPLNQPFPKSGVAASSTPSTSAATPSSTPAAPPAPPPLPTDKDKTKLPLSAPSAGTSTAGTGITAKAVNTAAAPIKSIAEEAAQKAKKVQLERLREKVHGKKEKDPPSSTDGKNKENSQLDGAAAPATPQKEKSASVDVTEGLSGLSISGAAALQSPTTGTWRGGQPTDGGAQPTLQSPTSGTWKSTASISGVSEHRGSVVAAAPPEEIAKIEKKSAIAEVSSSEEEDSEDDDEEEEEEEEEEDDDDDDDDEDDEDDSDEEDSEEEQDKAKETAKAKK

SEQ ID NO: 8864 - DNA, 6706 bp, Muscodor strobelii
  misc_feature: SGI EST ID NO. CUFF.21351.1
  misc_feature: Variant of the nucleotide sequence at SEQ ID NO 8862
atgataagaacatcgattagaagtgacttcgtaacgcgtgacaaaccccaaagcaatgagagaagcagatcaaccgaaaaggcagtataggaatgatgtggctttcatctggtgtttcatctggtaaatggcatctggcgtggcatttggacccgatgtgaaacttgaaaccccacgtctacgtacatctcaatcaatggtaaggttaggtacctcccatgagggggccgtctttgtctctctcaggccgacatcagtggcatcaagaatctatcaacgtgcccatcaacaactgcaactatacctaatttgacaaaaagctcaacaggagacaagacatcagctcgtagtgcatacagacggctgttgcttcgcgcatcggctgcgtcaacaaggctcatcaacatggccgagaccccggcatcttcgagctcttattccaccgaccccgcgctgtacatctacacgtcgctgaccgcggggtcatcgcatatggtacgtgtagaaagatcccatgcgagttactttttgatcgtactcccaagacgtgatactaactcctttgtacgtcaccgcaacctcgcgtctggagaccatcttgcgcgccaatcgcgtgcccttcaaggccctcgacatcgccaccgacgacaaggctcgcatgctatggggccgacgcgctgggaaagatgaaggcggccgcatgcgcaagctgccgggcctcgtgcagatgggtctcgtcctcggcgacctggtcgagatcgaagaatggaacgagtacggtgagctgaagcagcatgtccagatctactacgacgacttcaccataccacccaagaatgcggcccctccgcctgtggccatgcgaccactgaatcagccctttccaaagtccggagtcgccgcgtcttctacaccgtccacatccgccgcgacaccaagcagcacgccggcagcacctccggcacccccgccgctgcccaccgacaaagacaagaccaagctcccgctctccgccccaagcgcaggcacgagcactgccgggactggcatcactgcaaaagctgtcaatacagcagcagcacccatcaagagcatcgccgaggaagccgcccagaaggccaaaaaggtacagctcgagagactgcgggagaaagtccacggcaaaaaggagaaagaccccccatcctctacagacgggaaaaacaaagaaaactcccagctcgacggcgcagccgcacccgccacaccacagaaggagaagtctgcctccgtggacgtcacagagggactaagcggactctccatcagcggtgctgcagctctgcaatcccctaccacgggaacatggcgtggcggccaaccgactgatggcggtgctcagcccacgctccagagccctacgagcggaacttggaagtccacagctagcataagtggcgtctccgagcaccgcggctctgtcgttgcggctgcgccgccggaggagattgctaagattgagaagaagagcgccattgctgaggtaagtagtagtgaagaggaagatagcgaggacgatgacgaggaagaagaagaagaggaggaggaggaggatgatgatgatgatgacgacgacgaggacgatgaggacgatagtgatgaagaggatagtgaagaggagcaggataaggcgaaagaaactgccaaagcgaagaaatgaagacactcaggttgaaatccctagttggacattgcactgaagctggaaattgtctgttgtgatagatttcttctgagcctctttgcgaaaagtgctcacgcgaggagcgagagtaatgatcgactagtcttaagtatgagcaggtcgtattagataccacattatttcataggaatggggatgtagccaatgcgcaaggtccataatcactcctagcatttcatcgacagcgccatatctaatagggtcgatcatgcatctagccgctcagaatatatggtgacatatgctgatctatccttttcacgtaaccgtgtcatctcatctgctacattcatacacaaatacacttttatcgcgagttccaacgaggtaacgtttgcacctgctggttaatttaatacaacccatcatcatcactacccgtagagtcctgaaacctagcaacggcttttcccttccccttggagcgtccattaacgctgccataaccagcataatcattatccacatcatcgtcgtcctcatcatcgctagctgtagcaatggcctttccttttcctttattcaccgccttgcccttacccttgcctttcgaagatggccggtcgaaagtagcagagatgggcgtagcgacggtgttagagacttgtgctttatccttaccaccctcaaatgtttgacgcacacgatcgtagtgtgcgagttcaccggcactgacgctgggaattagctcgcgattggcgtccaggaagtctttctctgtgaccatgactgcgatgtcgtcaggcgttgcatgatggtcgaagaagttagcagtcgagatatgatgcaatgactccggtcggttcgcattaagtgccttgatttttgcgtcgacggcggctgcttgccgtgtcacagctttaagcatggcgtcgctgcacagggcgtaaaaatcggcgcctgtataagtaaagggcagatgttcagccacagacgccagagatacggaggggtggagcgtgaatctagcacgagttattagtcttgttcgggtttgagagaaagatttaggcatgggtaatgactcacttcctggtgagggcttccatgatcgtgagctgtttggcatgggtatcggaaacgcccaagtacaacatcttgtcaaatcgacctggacgtaacagtgcctgatccagaagatctggtcgattggtggcaccgatgacgaacacaccacctcctccatcatcaccgccagacatgccatctagttcagccaagagttgcgacacaatacggtccatgacaccgccgctgtcaccttggttgcctctcttgggagctacagagtcaagctcatcaaagaagacaacacaaggtcgcgcatctcgtgcgcgttggaaaaccctacgaacgttggcttcggattcaccaatgtacatgtttagtaattcaggtcccttaacactgaagaaattcaaactgtactctgtggcgatagctttggcgagcaatgtcttaccagttccgggaggcccatagaacaggataccagagcgtttcttcatacccttcgcgaaaagttccggccgctctagaggcagttgtatagtctccatgacggcttccttgacattatttagaccaccaacatcgtcccaggtaacattgggtatcttaggtgcgccaattgcatccgcgaaattcttgcgggctgcgtcgacggcgatatcaaaatctgattttgtcaaacatcttgccgatgagccacccgctacttgaatatcacgaatcgatatattggagtcggctgtggaggccttcaacgacagggattcaagacgtgagtcccgggcaaccattgctctctctaccacatcgacgaggtcaccggcaacgagagcagccgtcttgatggcaacgccgcttaattggactcctggagccaaggctacaccacggccatcgacaatagaccgtaaaataccttcacgctcactctcatcgggcgcgctcatctcgatttcgtgcgtgaacagtccgcgcacaccgtctggtactttgtcaacctctgttgtagtagcaatcaagactctcgcctcggctaggatttccttcacggcagttaccatcctatccgctgtaagagcttcaacgtgacgaattaacaatgcgcagcagtcggatccacagctcatggcacgctcagctcgagctttcaggaatccttcagtcttcacgtcactacctccagcaccactctcattgacgatatcatatgcatcgatcgtgaagctatggagaccaatgtccgagctggcgcttatggccatcgttgcctttccaatattccgctgtgttgacacaaggagtatcgctactggcggcatcttcaagtgaatagccctcttactggtcgcagccgccatgagctctctcaacctccgtcgtaagggcgagacgaaattttgggagggctgttggagtgttgtggcaagtgccgttggcgcagattggggcgtttcctcgagaccgagataaaatggccaattgctgtcctttgtgccggggattgagttcgtaacgctgccagattgggcgatctgggtaagagaactgttcacgcatgcgactccgccccagatatcctcatcgtcctcatcatctggcatttctgacttttgcctgacaatatgtccaattctgaaccaggcaatggcatcaggcctggatgagttactgactgctgtgtgaccagcagcggctatagccaagagatcatccactgcgagcccatcgcttgaggttgcggattcttgtagagtcctgcctaagcgtgtgtcaaggggtacggcaatcaaatcgccggttctaacgatacgtaagctgcgggcaaagtgggatttcaaaccacctagaatagcggtttgaagtgccttttcggacgagacggggctccgaatctgctgtatcgtcacatcccgggcatatggtggatgagatgagcttgtaatcttgctctggccaggcctcggggggtatgcgtgccttttgagcggtgacaagcgcacatacggtgtgttttctaggttggcaagcaaaagaggggacacatatgcaccaggacccatgggcttctgtatttgagactcgaaaaaagataaccgtcgaccacctggttcatgtctcgaacttggtattcttgtcattggtcggcgacccatcccatcgggaagaccaaaaactttagcaggtctccaattcgcctcttcttctgaatgcccgaagctgcccagtccgaacagacccattccgttggacggaggttcctccgcagcttccacgcgcacccaatcacccgaaaaacagccaatccgtgtcaatgaattgatgtcgacgaagatgaaagcctcgccatcgtcttcagctgtcggctttgggtgaagtaggccgtgagggattgggttcaccagaccttgcgctttaaagaggcgtcctttagggcgatcaggacgagcggtcgttgcagtgaagctcgaaaatacggagcctggcgtgttgatgccgttggtcttcctgccgcggccgatcgtgccaatagtcatgggcgtccccggctgcattgtagacacaccactcgcagctgtaggaggcaaggcagggatggacagagatatcatctcgtccatagagtcatccgagagttcttcgtcgttctccatctccgacacctccgtctctgtttccgtgacaaagtctgacgtctcgttctgggcatcggtcctgtagcgctcttcggcggcagagtagaattggtcggttgccgtatcttcgtcgtcgtgattgacaccattgagggcctgcgtagaggtgattgcggcacggtcgttcttggattgggagtggccacgcgttacgatgatcttggtcgttggagcgaggatcccctgagatacaggctcgcatagtgttacttttccaggaagggagggcgcatgggttacgggatgtggtggcaagggaagatgaaataagtcgccgtcgtggacgacgtgcagagcgcccagagcaacacgaagagccgtagccagacgatcggcaggtgtctcggccgttgcaggttgcttgcctttgtttgtcgggtgatctctaaagaaggtgccctcgccgttctccagcctcttcaccaggtcgctctcgaggttcacgaatacggtgtcgagagccaacgcagcgacgtcgagcacgtgtatctcgattccactcctgctgtgggcggacagcttggagggggcggtctgttgcagcacgctggcgaagttctggagagctaaggaggacgtggagaactgcaaggtcgagtgggcgagggcggtggacttggtgacggggacaattgtccagcttgtgcgttggggcgtgggatctggagtccaaggggcaatggcaacatgatggactgggggagcgtagctctgctcgggctcgtccgactctacacgacatcatctacgttagactacggctctagacgaaggcgcaagacacttaccgtatggccgcaagtagggaaacagatcagcgaagaggtcgtcagacaggatgcccacgtctcccctcacgtggtcgtcgaggacgagtcgcgcagagattgggggcttgtcctgcctccgtctccttttgcgattgcgccgaggatctaaaccgcggctgcagtctgatggattggccatttcccgacacgtgcgccacctcacacccgtccacctcagctttggagctttgaagctagactacgagctgtgtcgaccgcgacctgcgttcatctggagattacaatgctgcgcaaagcaaagcttaccgatggaacgagagcgtgcgcaaaggacggactaagccggtggtaggctagaagaagatagtaggtagaaatactattttactcaagcttaatagtagaagcacttccgcaaaatataaagtgcggtgtgttgggatctcggcgggttgaaacgatgcaag

SEQ ID NO: 8865 - DNA, 483 bp, Muscodor strobelii
  misc_feature: SGI cDNA ID NO. 562747
  misc_feature: Encodes the peptide sequence at SEQ ID NO 8866
atgcacgcctcgtccctcctcgtactggccgccagcgtcctgtctgccgttgcccagatcacaactacgaccagcaccgcctacatgacggcgactatcactatcactcagtgcaactccaataatccagattgcccgctctacacacccaccaccacctcgacgacttcaacttcgacctcaacttctagctctagctccagctccagctccagctactctgcctcgccttggtccagcacccacgcccccaacactacaacttctgcctggtatcctcactacaactcgacctccaccaagggcccaaccggctactcaacgtcctcgctccccgtcactgtctcaactagcgcgagcggtgttcccaccacctctgcctcaaccactcctagtcctactactgctggcgccggctctctcgcagctcgttcgggactcgccttggctgccgtaggcatggccgctgtgttcctcgcctga

SEQ ID NO: 8866 - protein, 160 aa, Muscodor strobelii
  misc_feature: SGI Peptide ID NO. 562747
MHASSLLVLAASVLSAVAQITTTTSTAYMTATITITQCNSNNPDCPLYTPTTTSTTSTSTSTSSSSSSSSSSYSASPWSSTHAPNTTTSAWYPHYNSTSTKGPTGYSTSSLPVTVSTSASGVPTTSASTTPSPTTAGAGSLAARSGLALAAVGMAAVFLA

SEQ ID NO: 8867 - DNA, 1065 bp, Muscodor strobelii
  misc_feature: SGI cDNA ID NO. 562748
  misc_feature: Encodes the peptide sequence at SEQ ID NO 8868
atgagtcaccggaattcgcgcaagagcagaggcaaaaagtctcgaaaagatcactgtacagagtgcgtgacccgacaggctgcgagagacgaggtcggccatctattggcagcgacgaggaaagatccaatgcgcgtaatgggaccgaaccaaccctggatgatgtctggtttcggagacggccttaatgaatggacagtatggggtgacaactacccagcagtagtgacacagggacaatggagaaatcatacgcagacctccggctcaattctcaaatcatcggaagaaaacgggcgtaagatcgatagcatcaccgcggcgatgatgggagaaatcaaggagacacagaaggctatcaagatgacaaatgacaatgtgcgggctgccgtccaggctgtcgaaggcaacatcaagactgtcattgacagcgcccacgtcagtacgaagaaaacgcacaatgcgatcaaggaggcacaagccgccatcaagagcacacaggacgcaattcaaacaacccatgcgacgcactcaaataagcaaggggcaacagatgcccaaatagccaaggtttggcagttccttgaaagggactctaagaaacgcgaggaagctcagcgtgtgcaagacatgcacgaagcaatccgtacgcaagctaatatctcagcgcagcaacttgagagagatcgcgagatacgtgatcgatcatcacgcggaagcacccggactgcgtcgtcgtcttcgtcaagtcggcattggaagcgcgcagagatggatatggagtggcaacgagagaaggttagagaggaatggaagaagtttgatcgtcatgttcagcaggaggaccagcgattgcgcgaagagaaagagagaaaccgatcgagccaaaggaactcagctccttacttccagagttactatccaccagaggtgttctcacacgatgagtacgagcccgagcctcctttctgggacgagcagcatactgtttacgacagcggtgtacgtgaagaaatgcgcccctatcaaccgggagtaaggcgggagggtctaagatatgcctag

SEQ ID NO: 8868 - protein, 354 aa, Muscodor strobelii
  misc_feature: SGI Peptide ID NO. 562748
MSHRNSRKSRGKKSRKDHCTECVTRQAARDEVGHLLAATRKDPMRVMGPNQPWMMSGFGDGLNEWTVWGDNYPAVVTQGQWRNHTQTSGSILKSSEENGRKIDSITAAMMGEIKETQKAIKMTNDNVRAAVQAVEGNIKTVIDSAHVSTKKTHNAIKEAQAAIKSTQDAIQTTHATHSNKQGATDAQIAKVWQFLERDSKKREEAQRVQDMHEAIRTQANISAQQLERDREIRDRSSRGSTRTASSSSSSRHWKRAEMDMEWQREKVREEWKKFDRHVQQEDQRLREEKERNRSSQRNSAPYFQSYYPPEVFSHDEYEPEPPFWDEQHTVYDSGVREEMRPYQPGVRREGLRYA

SEQ ID NO: 8869 - DNA, 246 bp, Muscodor strobelii
  misc_feature: SGI EST ID NO. CUFF.21237.0
  misc_feature: Variant of the nucleotide sequence at SEQ ID NO 8867
atcaaggaggcacaagccgccatcaagagcacacaggacgcaattcaaacaacccatgcgacgcactcaaataagcaaggggcaacagatgcccaaatagccaaggtttggcagttccttgaaagggactctaagaaacgcgaggaagctcagcgtgtgcaagacatgcacgaagcaatccgtacgcaagctaatatctcagcgcagcaacttgagagagatcgcgagatacgtgatcgatcatca

SEQ ID NO: 8870 - DNA, 981 bp, Muscodor strobelii
  misc_feature: SGI cDNA ID NO. 562749
  misc_feature: Elevated expression when VOC is produced
  misc_feature: Encodes the peptide sequence at SEQ ID NO 8871
atgtctctctctaagaatctacttcgcgctggcggcatgctgtccttggctctcagcgctcaagcacagtcgtacacgattcaggatacgtatgataccaccaacttctttgaaggcttcgaattctacagtggaccagacccgacagttggtttcgttgaatacgttgatgctgccacggcgaacacaacctccctcgctggatatgccaatgggggtatctatctgggggtagattacacaacaccaaacccagcgaatggtcgccgctcggttcgtgtcaacacagtcaaatcgtacacacatggcctattcatcgcagacatagctcatatgcctactcaggcgtgtggcgcttggccggccttctggtcctttggtcccaactggccatcatctggagagattgatataattgagggtgtcaactcggtctccaactcttctattactcttcacacagcatcaggatgttcgttttcacaagattcctacgcgagtggcgattgtggtgcacccggagatggtaccgagggatgtggtcatcctactcagaatacccaaaccttcggtaacgacttcaacactgctggtggtggcgtctatgcgatgcagtggacctccagtgccatcaacattttcttcttcccgaaaagcggaacagttcccactgatattgcggccggcactcctgaccctagcacgtggggagcccctctagcaagcttctcaggaggctcttgcaacattgacgccaacttcgcaaatcaccaaattgtcttcgataccactttctgtggggtatgggctggcaaggtctgggaccaagatgcaacctgcgccccgatggcgaacacttgccaggattacgtggccgcaaacccaagcgcgttccaggatgtgtactggctcatcaactccgtcaaagtctacggcgaaaacacatcagcaaaccgaaccgcgaagcgatttaacgcttaa

SEQ ID NO: 8871 - protein, 326 aa, Muscodor strobelii
  misc_feature: SGI Peptide ID NO. 562749
  misc_feature (10)..(311): NCBI GI: 256732680 Blast Desc: NECHADRAFT_68445 [Nectria haematococca mpVI 77-13-4]
  misc_feature (13)..(322): NCBI GI: 121702739 Blast Desc: endo-1,3(4)-beta-glucanase, [Aspergillus clavatus NRRL 1] gi|119397777|gb|EAW08208.1| endo-1,3(4)-beta-glucanase, [Aspergillus clavatus NRRL 1]
  misc_feature (14)..(313): NCBI GI: 116180340 Blast Desc: CHGG_00798 [Chaetomium globosum CBS 148.51] gi|88185095|gb|EAQ92563.1| CHGG_00798 [Chaetomium globosum CBS 148.51]
  misc_feature (8)..(311): NCBI GI: 119496731 Blast Desc: endo-1,3(4)-beta-glucanase, [Neosartorya fischeri NRRL 181] gi|119413301|gb|EAW23242.1| endo-1,3(4)-beta-glucanase, [Neosartorya fischeri NRRL 181]
  misc_feature (1)..(326): NCBI GI: 159130751 Blast Desc: endo-1,3(4)-beta-glucanase, [Aspergillus fumigatus A1163]
  misc_feature (16)..(326): NCBI GI: 70990858 Blast Desc: endo-1,3(4)-beta-glucanase [Aspergillus fumigatus Af293] gi|66847910|gb|EAL88240.1| endo-1,3(4)-beta-glucanase, [Aspergillus fumigatus Af293]
  misc_feature (9)..(313): NCBI GI: 171687901 Blast Desc: protein product [Podospora anserina] gi|170943912|emb|CAP69564.1| protein product [Podospora anserina]
  misc_feature (5)..(311): NCBI GI: 261356267 Blast Desc: mixed-linked glucanase [Verticillium albo-atrum VaMs.102]
  misc_feature (1)..(311): NCBI GI: 154308834 Blast Desc: BC1G_07945 [Botryotinia fuckeliana B05.10] gi|150852571|gb|EDN27763.1| BC1G_07945 [Botryotinia fuckeliana B05.10]
  misc_feature (14)..(311): NCBI GI: 169770979 Blast Desc: [Aspergillus oryzae RIB40] gi|83767818|dbj|BAE57957.1| protein product [Aspergillus oryzae]
  misc_feature: Useful for introducing or modulating the production of volatile compounds
MSLSKNLLRAGGMLSLALSAQAQSYTIQDTYDTTNFFEGFEFYSGPDPTVGFVEYVDAATANTTSLAGYANGGIYLGVDYTTPNPANGRRSVRVNTVKSYTHGLFIADIAHMPTQACGAWPAFWSFGPNWPSSGEIDIIEGVNSVSNSSITLHTASGCSFSQDSYASGDCGAPGDGTEGCGHPTQNTQTFGNDFNTAGGGVYAMQWTSSAINIFFFPKSGTVPTDIAAGTPDPSTWGAPLASFSGGSCNIDANFANHQIVFDTTFCGVWAGKVWDQDATCAPMANTCQDYVAANPSAFQDVYWLINSVKVYGENTSANRTAKRFNA

SEQ ID NO: 8872 - DNA, 2657 bp, Muscodor strobelii
  misc_feature: SGI EST ID NO. CUFF.21244.0
  misc_feature: Variant of the nucleotide sequence at SEQ ID NO 8870
cgcgatactacaacagccaaaccatttttccgccattcgaaaccccatgttatctgctcgtgtcacttatagactaaattacgcctacaaggtcgtttacgacgatggagacgtttccaggcgtgtggtattcactggatgaaataatctctgacactcgtagatcttggaactccacctccaaaaatgcttcaaccccggatttgcagttctattcgtcgagcttgtcctcacacaataacatggcttacggtctagaagaacttgaacaagccaaaattgtctacttcgtatgattagcgcacataggtatgccatgggggcggattaatgagatggaatcgaaacaagtcataggaaatgtttcagcagaaaggtcattcagattggaatggtacttggtgcctcttttcgggccgtatcaaatgtatggtggtaccactatagataccaccacacccctcgatgatgtcggttacatgaacaggtcttaatactcttattccaaatgcactcttagctctttctacattcatgttggtggcatccgttaggcggaccttctattttccaaccttcacttgacatttggcatatatataatcgcagtttctctgtctcacacagtctccgtgccacacccttccacgcgagccgcttcatagccagtcattccttccagcctctgcacatattgcgccaaccacacattcattcgcgatatttccattgttcataagcctcgaagctccatagtcttttgtgaacggcttacatctttgtctaatcaccaagtctgataaagagaaaaaacaaaaggtcgcggtctggctctcgaatcaaggaagaacaataaccacacaactttagccctgtgccctttcacacataataaagccacgcgctgacgttcatttaaagcgatccggaagttactaccctcgttgcaaactgtttgccgatctgagtgtcacacctacctttccttcttgcggatcatctttgccaggtgcaactgattttcaatacacacatatcatctctcaatcgtccatcttcacttcctttcatatttatacatacatccgacccggacgttgggaacatacaacaagatctcagtataaagcgcgcagacctcgatacccacatcccaaaacatgtctctctctaagaatctacttcgcgctggcggcatgctgtccttggctctcagcgctcaagcacagtcgtacacgattcaggatacgtatgataccaccaacttctttgaaggcttcgaattctacagtggaccagacccgacagttggtttcgttgaatacgttgatgctgccacggcgaacacaacctccctcgctggatatgccaatgggggtatctatctgggggtagattacacaacaccaaacccagcgaatggtcgccgctcggttcgtgtcaacacagtcaaatcgtacacacatggcctattcatcgcagacatagctcatatgcctactcaggcgtgtggcgcttggccggccttctggtcctttggtcccaactggccatcatctggagagattgatataattgagggtgtcaactcggtctccaactcttctattactcttcacacagcatcaggatgttcgttttcacaagattcctacgcgagtggcgattgtggtgcacccggagatggtaccgagggatgtggtcatcctactcagaatacccaaaccttcggtaacgacttcaacactgctggtggtggcgtctatgcgatgcagtggacctccagtgccatcaacattttcttcttcccgaaaagcggaacagttcccactgatattgcggccggcactcctgaccctagcacgtggggagcccctctagcaagcttctcaggaggctcttgcaacattgacgccaacttcgcaaatcaccaaattgtcttcgataccactttctgtggggtatgggctggcaaggtctgggaccaagatgcaacctgcgccccgatggcgaacacttgccaggattacgtggccgcaaacccaagcgcgttccaggatgtgtactggctcatcaactccgtcaaagtctacggcgaaaacacatcagcaaaccgaaccgcgaagcgatttaacgcttaaaagatcgtgctggactcagatcaattattagacaaagacagaagatctgcagatcgcatatggtacttatgaagttgtgagtgggtgctgaagaagctggaggatttatgccgttacgactaaaaattgcattggttatctatcatacccgggcgtacccagaaaaggataaatggagtttatggctggtctttgctatttatcgcctttgcttacgaggcacaaacatatacagttcggtggctttggaaagcgccttgtgccgcaacttttttcgattggaagaattgttggtcaacggaaatgcttcgacgttaacgcttctacatattcgctgtacatatttcagctctggatcatatatatctcattcgatcggtcgagttgatctttacgactccccaattgtccagctgcctaaaatgctagttatactatgagctatgtgccggacgatgagcatgtttgcactagtttcgtagtctatgtgatactacctgtctcagtaaatccgga

SEQ ID NO: 8873 - DNA, 684 bp, Muscodor strobelii
  misc_feature: SGI cDNA ID NO. 562750
  misc_feature: Encodes the peptide sequence at SEQ ID NO 8874
atgggtgtctggggtcgcggcctccttcagaacgacgacgatgcggacatcgcagctgatctaggtacaactttcgggttccctctctgcgcaccgttctcatcgtccgctcctaccttgcccgaaccattcgatcgcgcagccacagcagcaaaactgaaccatgatgacctgctgagccgcaaatttgccaaggtccttcaaccttccttcactcccttgacatcgtatcacaaacgtgagagaattgccatcatcttaggcatgctcgcaatgcaggcaggcgcaattcttgaggagcaccatcttcaggcattgcgagctctgcgccgcactttgcccaacattgagcaacaggtccagctcgtcgctgcccttgatgggtatgcaaatgatggggttacagtatggatcagcggtagcaagactcagatggagacaacggaaatgcagtcggtcgacaacaacaaagaaaataagagcgaggaggatgaattctggttctctggccttggctgtctgtataccacgcgaagcgtccgctctcattctgtgccagccgacgtcatagccgcatacgcagcacttcgagtggatgaagagagaagcaactcggattatgagaatggcgaagatggcgaagactctatgcagaccaaatcgggaggaggtgaagaccattga

SEQ ID NO: 8874 - protein, 227 aa, Muscodor strobelii
  misc_feature: SGI Peptide ID NO. 562750
MGVWGRGLLQNDDDADIAADLGTTFGFPLCAPFSSSAPTLPEPFDRAATAAKLNHDDLLSRKFAKVLQPSFTPLTSYHKRERIAIILGMLAMQAGAILEEHHLQALRALRRTLPNIEQQVQLVAALDGYANDGVTVWISGSKTQMETTEMQSVDNNKENKSEEDEFWFSGLGCLYTTRSVRSHSVPADVIAAYAALRVDEERSNSDYENGEDGEDSMQTKSGGGEDH

SEQ ID NO: 8875 - DNA, 1410 bp, Muscodor strobelii
  misc_feature: SGI cDNA ID NO. 562751
  misc_feature: Encodes the peptide sequence at SEQ ID NO 8876
atgcttgccgccacaggaacgcccaacgatcccatggctctgagccggagcccttctccgatcccaggcgggggctggtcctctcccggcctggacatcagcgggagcgggcggtccagtcccgccaaaaataccttttccggtccgagtcttgggggcgtgacgtgggaatcggcgcggtccaagtcccagggtgtcgccgggtacccgtccttctcaacccagaaccaaggcttcttcacacgtcacatgcgccgaatttcgagcagtctaccgacctttaacgtgaacgggaatgagaggtacgaagagaaggaaaaacacaaacgcagccaatggaagatccctctcgctgggcgccttcatgctttgacaacacggataagcagaaagtggaaaattcgcctgttcctcgtcgcaattctcctcgcttgttacagcctattttatattacacctcttcactactattggcggagaacaagctggttaggcggtggacagaaatatgttatggtccttggggccaacattggtggcggcgtaatggaatggaagggtgcgcgagaatgggctatcgaaagagacagcatcaagaacaaacgaaaatatgtctccagatggggttacgacctggagatcgttgacatgagcaccaaaaagcgctacgctcacgaatggcgcgagagctgggaaaaggtggacagcatcagaaacacgtttaaacgatatcccaaggccgagtggatctggtggttagatctgaacaccttcgtcatggagccgtcttattctctccagaaacatattttcaataacctggaacaaaatatctatcgcgatatcaacgtattcaatccgctcaacctcacgcatcctctgaaaggtaaccacctggatcctgaagctctcaatgccaacggagacggagacattaactcggtaaacttgattttgccccaagattgtgacggcttcaatctcggttcctttttcatcagaagaagtgaatggacagatcgactcttggacgtctggtgggatccagtatcgtatgaacaaaagcatatgcagtgggagcacaaggaacagagtgcactgcaacagctttatactactcaaccctggatacgaagccatactggtttcatcccacagcgaatgatcaacagttttccagatggtgcctgcagcgacaatggtgttgacacccgagttcactacgacgagaatgacagagatttcatcatcaatatggcaggctgcgaattcggacgggactgctggggagagatgtacaacttccgcgagttgagttactatctcaaccgcaatccctgggagcgtttcaaagaagacctagttgcggttctctggtacaaactcacaggtcaaaaagtgaagttatag

SEQ ID NO: 8876 - protein, 469 aa, Muscodor strobelii
  misc_feature: SGI Peptide ID NO. 562751
  misc_feature (166)..(432): Pfam Id: PF05637 Pfam Desc: galactosyl transferase GMA12/MNN10 family
  misc_feature (12)..(469): NCBI GI: 171687899 Blast Desc: protein product [Podospora anserina] gi|170943911|emb|CAP69563.1| protein product [Podospora anserina]
  misc_feature (12)..(469): NCBI GI: 256732679 Blast Desc: NECHADRAFT_38877 [Nectria haematococca mpVI 77-13-4]
  misc_feature (12)..(465): NCBI GI: 154308848 Blast Desc: BC1G_07952 [Botryotinia fuckeliana B05.10] gi|150852578|gb|EDN27770.1| BC1G_07952 [Botryotinia fuckeliana B05.10]
  misc_feature (12)..(463): NCBI GI: 156062626 Blast Desc: SS1G_01429 [Sclerotinia sclerotiorum 1980] gi|154696765|gb|EDN96503.1| SS1G_01429 [Sclerotinia sclerotiorum 1980]
  misc_feature (12)..(469): NCBI GI: 39975379 Blast Desc: MGG_00164 [Magnaporthe grisea 70-15] gi|145018986|gb|EDK03265.1| MGG_00164 [Magnaporthe grisea 70-15]
  misc_feature (12)..(469): NCBI GI: 85110923 Blast Desc: NCU03055 [Neurospora crassa OR74A] gi|28925405|gb|EAA34459.1| NCU03055 [Neurospora crassa OR74A]
  misc_feature (12)..(443): NCBI GI: 116180338 Blast Desc: CHGG_00797 [Chaetomium globosum CBS 148.51] gi|88185094|gb|EAQ92562.1| CHGG_00797 [Chaetomium globosum CBS 148.51]
  misc_feature (12)..(468): NCBI GI: 238844949 Blast Desc: golgi mannosyltransferase complex subunit [Microsporum canis CBS 113480]
  misc_feature (12)..(468): NCBI GI: 225554436 Blast Desc: galactosyltransferase [Ajellomyces capsulatus G186AR] gi|240273473|gb|EER36993.1| galactosyltransferase [Ajellomyces capsulatus H143]
  misc_feature (12)..(468): NCBI GI: 261203139 Blast Desc: alpha-1,6-mannosyltransferase subunit [Ajellomyces dermatitidis SLH14081] gi|239586568|gb|EEQ69211.1| alpha-1,6-mannosyltransferase subunit [Ajellomyces dermatitidis
MLAATGTPNDPMALSRSPSPIPGGGWSSPGLDISGSGRSSPAKNTFSGPSLGGVTWESARSKSQGVAGYPSFSTQNQGFFTRHMRRISSSLPTFNVNGNERYEEKEKHKRSQWKIPLAGRLHALTTRISRKWKIRLFLVAILLACYSLFYITPLHYYWRRTSWLGGGQKYVMVLGANIGGGVMEWKGAREWAIERDSIKNKRKYVSRWGYDLEIVDMSTKKRYAHEWRESWEKVDSIRNTFKRYPKAEWIWWLDLNTFVMEPSYSLQKHIFNNLEQNIYRDINVFNPLNLTHPLKGNHLDPEALNANGDGDINSVNLILPQDCDGFNLGSFFIRRSEWTDRLLDVWWDPVSYEQKHMQWEHKEQSALQQLYTTQPWIRSHTGFIPQRMINSFPDGACSDNGVDTRVHYDENDRDFIINMAGCEFGRDCWGEMYNFRELSYYLNRNPWERFKEDLVAVLWYKLTGQKVKL

SEQ ID NO: 8877 - DNA, 2854 bp, Muscodor strobelii
  misc_feature: SGI EST ID NO. CUFF.21266.1
  misc_feature: Variant of the nucleotide sequence at SEQ ID NO 8875
gaacgaattatgtgtacataattgcatgaacacccatgagatttgtgattgctcacggcactcactcattacaccgtaattgatcacatcaggtagcagctcatgatctgcctaaaataaatgtagccaggcagttgattgcgggtgcagtccgggcttggtctcgatggccgatcggcgagtcggacattgtggtggaagtgtatcgcacttcatctttccaggtaagtatgagaaggataagtgcgggttacaagacacaaggaaagcttgcgctgaagacgggaagaaaagacaggttgaaccaggacatacccatgtcccaccagctactcggcgatcttccatctgtcgtacacacaatctgtcgagtctgttatcacaggttatctcaggggcatccgtggaaccaggttcgccagggctctgtcagagctctgtgttgctcgcagaatcaccgtaactcagggactccgtagagtaatgtgacaatctccaaggtgcaggtgggtggaccaagacaattagacaaaccttcgtgtcaaccatcgtttcgctttaagatttaatcaccaaatcaatcccagcaatctgcctccttgcgcgcggttcgggtccctccattgtctgcatgcgctcgcgcttctgcagcagtacagctctctattgtaacatacgtcctcgtcgtttgtctttgtctaccattcaacacaactgccgcccttccacttaacgatccagcccttaacttcgctcctcgtgtcgcaattcctgcggtcgctatcccaggtcgcaaccgtcgataccaacccgatccttgtcaatctggcagaccctcaagtcgtctcgtcaggcgtgagcaacagcccgaagtcccatcagcgaaggcgatcgtccgcgtccaacgactatcgtggagttcctttgcgaccaggccagcaggcccgggcgctgcagcctcgcttgagccccatcccaggaacgcccaacgatcccatggctctgagccggagcccttctccgatcccaggcgggggctggtcctctcccggcctggacatcagcgggagcgggcggtccagtcccgccaaaaataccttttccggtccgagtcttgggggcgtgacgtgggaatcggcgcggtccaagtcccagggtgtcgccgggtacccgtccttctcaacccagaaccaaggcttcttcacacgtcacatgcgccgaatttcgagcagtctaccgacctttaacgtgaacgggaatgagaggtacgaagagaaggaaaaacacaaacgcagccaatggaagatccctctcgctgggcgccttcatgctttgacaacacggataagcagaaagtggaaaattcgcctgttcctcgtcgcaattctcctcgcttgttacagcctattttatattacacctcttcactactattggcggagaacaagctggttaggcggtggacagaaatatgttatggtccttggggccaacattggtggcggcgtaatggaatggaagggtgcgcgagaatgggctatcgaaagagacagcatcaagaacaaacgaaaatatgtctccagatggggttacgacctggagatcgttgacatgagcaccaaaaagcgctacgctcacgaatggcgcgagagctgggaaaaggtggacagcatcagaaacacgtttaaacgatatcccaaggccgagtggatctggtggttagatctgaacaccttcgtcatggagccgtcttattctctccagaaacatattttcaataacctggaacaaaatatctatcgcgatatcaacgtattcaatccgctcaacctcacgcatcctctgaaaggtaaccacctggatcctgaagctctcaatgccaacggagacggagacattaactcggtaaacttgattttgccccaagattgtgacggcttcaatctcggttcctttttcatcagaagaagtgaatggacagatcgactcttggacgtctggtgggatccagtatcgtatgaacaaaagcatatgcagtgggagcacaaggaacagagtgcactgcaacagctttatactactcaaccctggatacgaagccatactggtttcatcccacagcgaatgatcaacagttttccagatggtgcctgcagcgacaatggtgttgacacccgagttcactacgacgagaatgacagagatttcatcatcaatatggcaggctgcgaattcggacgggactgctggggagagatgtacaacttccgcgagttgagttactatctcaaccgcaatccctgggagcgtttcaaagaagacctagttgcggttctctggtacaaactcacaggtcaaaaagtgaagttatagaactacctaagcttagcagcagctgtttcggttgttacttctctactgctttgaaggtagtggtctcgtatatgcttctgcttcttacgagggtttgcttcgtattgctaatataggaaggcgcgagagattcctgtttcgaagcgtgtttgttggcacacacatgcctgtttgcataggatagctgatgattcagcttgggcgttaaagtcaaacagccggttcccaggtggcattttatgataaatttacggaaaggttagacaaattcatcacggagacgcaatgtactcatactgttacaaacattaggtcaggaaggtcttcggtaacactctacaggagtgaaatctaggctgtcaacataggaatggttatgggtagatctagcaggcatagaagtccaatgcattgtacatcaacatggttcttcttcgattgcatcgatgagcccatctatgtctcaatatcgctttgcaac

SEQ ID NO: 8878 - DNA, 3489 bp, Muscodor strobelii
  misc_feature: SGI cDNA ID NO. 562752
  misc_feature: Encodes the peptide sequence at SEQ ID NO 8879
atgccataccaacagttttaccagcaaccctatcagcagccgtaccaacaggcatacccacaacccgaaccatcgctcgcgcgggagcgtggcttttccagctcctcctcttcttcctccacctcctcatcgctattgaacatctcccagccggctaggaaattcgggttcgggacgtttttctctggaaacgagcggaggcaccgtcgtcgcgtcaagaaaaagcgcagtcgcaaggcctttctgcgatttggcaattcgtcttcttcgtcagtaggctcggatctggcctatggtaggggttatatcgatcgtcgcagaagtcgcgagttcagccctccgagcagaagaaaaagcagcgacgcagagcggccaccgcccccaaagcgtgcgcagacggatgaagagataattgaactgggacgtaagttcgccgaaatcgcaagactacaaaacgcagaggatctcagagcatcagggagaacccgaccatcgacactcgcgggggcggctgctgcaatcagtcagtttcaccgaaccaacagcgggagcttgagcaagggaattggaagctcaaaaccacgccgtgattcttcaccagatgactcagaatgggagtctgcttcttcggatgatgagtcaggagatgaggatgtcgattccggtcttgcatacggctcatctcttcatctaccgagcaatgcagagaaaccacgcccctccgaacccttggctccagtgaagcatggttctcgaccggacacgctcttggaacggaatccatctttggtagatccgaaattattcggacctgtcaactctcttcgaggattcgtgcagactccttgtggctttgagcgggtggatcgtaccagcagtggtgatgtccggcagagttatggctctccaactgttcccaataaaacgggatcggatggccgacaaatgcgagatgtctaccccatcccgacgtcagatccgtcgcggttcgatgcaggtcgatcctcagtcattgcggcacaaaaggaaatgactactccatcccgacctgagccggttcctattcaacacccgaaaccaatagcccctgtccacaaaaaagtctttgaatcggtggatgctgacccacgatactcgaggaaagtgtcgtccgacaatggcccgtcccgaacagctgaggcagctgtggttggtagcgcaattgctggcgctgcattgagctcagatgccatcgttggtgctattctgagatcgaatcaaagacatgacaatgacaatcacgacgtcccgcgcgatcatcgcacaaaacatcgatctcgaactactaatgacgaattacacagcgcggagtacgatgaacatgatgaacgtgttgaccgtgatgaaaagagacaggtgcggtctagaaaaagccgagagaaagagcaggactcctcacgcgatgaaaaggagaagcgccgccgcgagaagagggaatctggtctggaccgaaaagctgagaaagaaaggcttaaccgtggaaagcgctatgatggcgtggacagcacgacaaaacacgatcatcagagcgatatttggaaagatgatccttatgttccccgcggagacagctatggagaaagacgacatgaagacacgtctgttggtcggttgtcagggcctgatgtgccaaccgcgccaaaggagtttggctacgaagggacaaaaagtgggatcgatccgtttcaatatcaagtcgccgatgatgcattttccacacctaaatacgcaacacccaatcgcccattgactcccatggtcgtaactgtggaacgagaacccgatttctctagctttgatttgcctgaacattctgaacagcctgaacgtctaagtcgtaaagactccttcgagcgcgatctgcaacatgctcagaaagcatacgaaactgccgcagaagctactgtgccattgtctaaagctgctattgcggcagcggcagcggcagatattgttcaccacgaccgcgaatcttcttccaaacgagattcacagtctcgaggccacacccaacattcagcttcgcctacgcgagatcctgttcaagatgatgcggaccgggcatatcgcgaatacaagctcgctcgtaagcttcaagaacaagaggatagatcacgaagcaattctcctgagcgttcggtcgtggataactggaaagatgacgacgcagcaaagcccactgctcgcattgtgactcctccagctatggatcatgtgaaacaaaagagtccctacgatggtcctgatgccgacgttcgtattgacaatgttcttgaacacccaaatgagctttcccgattcgctatctcaagatcaaggaaacgttcgtccacgttacctgcttttagcacaagagatccttcggccgagcgagagcgacccctgcttaacctagtgcgtcctacccctaccccatcaccagctcctgagaagcaacaacgcgacgaatcaccacctccagtggcacgccctgaagcaccgcggtcttctcctccgactacaaatgatcctaatgccgtgccaaacacgtcgcgaggggatcctgttgccgcaccgcccacaccaacatccaaatttgtaagttggggcgaaaaccagaccaaacactatgtagttgaaagtccagagcgagaagatgatccttattctggcgtcaagataatcacgccggccgagacagtgagatctcggtctggaaagaaaagtagcggatggggcataatcactgctgcggcaacaggcggtggcattgctgcagctgtctcttcggcattatctgaccccaaaagtgaggcgaaaggtctacaggagcgacatgattctcagttggaagatgataacaaatcttcacagaggacatctcccccccaagaggcaccatatgatgagccccctcttccgggaccaaaaccagcgaacctgagaggttcaccaatgccaggtgcttttttcgaggaccctacattcacagccaatatagcagcggggctcgagggcagtggctttgatccaaatataatcatggacgatgcaacattccatcgtcgcgactcgccaccaggttccaatgatgacgatcaaatgggtgcccacactagttcagcagtctccggtcgtccatatgtcattacagacgatagagacatacctgcagataagtcggaaacattctccaaactgagtaagaaagacaggcgaagaaaggagaaagagtcaaagcagcaatcagtcgataagcctttgccgagcacagacaatgaccctcggctaagagcgatgcaggaagacctcgaagatgactggacactcagcaagacggagcaaaaacgtctagaaaaagctgcaagagctcaagcctggcaggatagccaagaaccgaatacattaccttccatacgagaacccgatcccgagcctaatcttgatgaatgggaagatacgtcgtactaa

SEQ ID NO: 8879 - protein, 1162 aa, Muscodor strobelii
  misc_feature: SGI Peptide ID NO. 562752
  misc_feature (568)..(1110): NCBI GI: 145613457 Blast Desc: MGG_01625 [Magnaporthe grisea 70-15] gi|145020526|gb|EDK04655.1| MGG_01625 [Magnaporthe grisea 70-15]
  misc_feature (572)..(826): NCBI GI: 116181746 Blast Desc: CHGG_01501 [Chaetomium globosum CBS 148.51] gi|88185798|gb|EAQ93266.1| CHGG_01501 [Chaetomium globosum CBS 148.51]
  misc_feature (45)..(369): NCBI GI: 261355966 Blast Desc: [Verticillium albo-atrum VaMs.102]
  misc_feature (130)..(370): NCBI GI: 116181746 Blast Desc: CHGG_01501 [Chaetomium globosum CBS 148.51] gi|88185798|gb|EAQ93266.1| CHGG_01501 [Chaetomium globosum CBS 148.51]
  misc_feature (572)..(812): NCBI GI: 85111728 Blast Desc: NCU02793 [Neurospora crassa OR74A] gi|28925839|gb|EAA34839.1| [Neurospora crassa OR74A]
  misc_feature (573)..(825): NCBI GI: 154323568 Blast Desc: BC1G_00183 [Botryotinia fuckeliana B05.10] gi|150842412|gb|EDN17605.1| BC1G_00183 [Botryotinia fuckeliana B05.10]
  misc_feature (125)..(370): NCBI GI: 171696104 Blast Desc: protein product [Podospora anserina] gi|170948294|emb|CAP60458.1| protein product [Podospora anserina]
  misc_feature (573)..(825): NCBI GI: 156058053 Blast Desc: SS1G_04758 [Sclerotinia sclerotiorum 1980] gi|154702543|gb|EDO02282.1| SS1G_04758 [Sclerotinia sclerotiorum 1980]
  misc_feature (130)..(444): NCBI GI: 85111728 Blast Desc: NCU02793 [Neurospora crassa OR74A] gi|28925839|gb|EAA34839.1| [Neurospora crassa OR74A]
  misc_feature (960)..(1098): NCBI GI: 156058053 Blast Desc: SS1G_04758 [Sclerotinia sclerotiorum 1980] gi|154702543|gb|EDO02282.1| SS1G_04758 [Sclerotinia sclerotiorum 1980]
MPYQQFYQQPYQQPYQQAYPQPEPSLARERGFSSSSSSSSTSSSLLNISQPARKFGFGTFFSGNERRHRRRVKKKRSRKAFLRFGNSSSSSVGSDLAYGRGYIDRRRSREFSPPSRRKSSDAERPPPPKRAQTDEEIIELGRKFAEIARLQNAEDLRASGRTRPSTLAGAAAAISQFHRTNSGSLSKGIGSSKPRRDSSPDDSEWESASSDDESGDEDVDSGLAYGSSLHLPSNAEKPRPSEPLAPVKHGSRPDTLLERNPSLVDPKLFGPVNSLRGFVQTPCGFERVDRTSSGDVRQSYGSPTVPNKTGSDGRQMRDVYPIPTSDPSRFDAGRSSVIAAQKEMTTPSRPEPVPIQHPKPIAPVHKKVFESVDADPRYSRKVSSDNGPSRTAEAAVVGSAIAGAALSSDAIVGAILRSNQRHDNDNHDVPRDHRTKHRSRTTNDELHSAEYDEHDERVDRDEKRQVRSRKSREKEQDSSRDEKEKRRREKRESGLDRKAEKERLNRGKRYDGVDSTTKHDHQSDIWKDDPYVPRGDSYGERRHEDTSVGRLSGPDVPTAPKEFGYEGTKSGIDPFQYQVADDAFSTPKYATPNRPLTPMVVTVEREPDFSSFDLPEHSEQPERLSRKDSFERDLQHAQKAYETAAEATVPLSKAAIAAAAAADIVHHDRESSSKRDSQSRGHTQHSASPTRDPVQDDADRAYREYKLARKLQEQEDRSRSNSPERSVVDNWKDDDAAKPTARIVTPPAMDHVKQKSPYDGPDADVRIDNVLEHPNELSRFAISRSRKRSSTLPAFSTRDPSAERERPLLNLVRPTPTPSPAPEKQQRDESPPPVARPEAPRSSPPTTNDPNAVPNTSRGDPVAAPPTPTSKFVSWGENQTKHYVVESPEREDDPYSGVKIITPAETVRSRSGKKSSGWGIITAAATGGGIAAAVSSALSDPKSEAKGLQERHDSQLEDDNKSSQRTSPPQEAPYDEPPLPGPKPANLRGSPMPGAFFEDPTFTANIAAGLEGSGFDPNIIMDDATFHRRDSPPGSNDDDQMGAHTSSAVSGRPYVITDDRDIPADKSETFSKLSKKDRRRKEKESKQQSVDKPLPSTDNDPRLRAMQEDLEDDWTLSKTEQKRLEKAARAQAWQDSQEPNTLPSIREPDPEPNLDEWEDTSY

SEQ ID NO: 8880 - DNA, 17044 bp, Muscodor strobelii
  misc_feature: SGI EST ID NO. CUFF.21985.0
  misc_feature: Variant of the nucleotide sequence at SEQ ID NO 8878
cgacacctgacgatagtttcgtcttttagtttcgcatacgcgttctaatggttgttcttcgatcgcatatgcaagctgcctacccgggcatttgttgatcgttaccatttaaattgtcatgcactttaagcggcccgaatgtgaattcccgaatacttgatactacctaatacccaacatgatgccccgggagcatcaccgccggcggagtcccgagagctctcgccgccggcgcaaagaacgccgcgactcgagagagcagctccagaaccaccaaaccacagtccctatacccccccgaatcctacggccaagaatcttaccggcttccagaacagatgccataccaacagttttaccagcaaccctatcagcagccgtaccaacaggcatacccacaacccgaaccatcgctcgcgcgggagcgtggcttttccagctcctcctcttcttcctccacctcctcatcgctattgaacatctcccagccggctaggaaattcgggttcgggacgtttttctctggaaacgagcggaggcaccgtcgtcgcgtcaagaaaaagcgcagtcgcaaggcctttctgcgatttggcaattcgtcttcttcgtcagtaggctcggatctggcctatggtaggggttatatcgatcgtcgcagaagtcgcgagttcagccctccgagcagaagaaaaagcagcgacgcagagcggccaccgcccccaaagcgtgcgcagacggatgaagagataattgaactgggacgtaagttcgccgaaatcgcaagactacaaaacgcagaggatctcagagcatcagggagaacccgaccatcgacactcgcgggggcggctgctgcaatcagtcagtttcaccgaaccaacagcgggagcttgagcaagggaattggaagctcaaaaccacgccgtgattcttcaccagatgactcagaatgggagtctgcttcttcggatgatgagtcaggagatgaggatgtcgattccggtcttgcatacggctcatctcttcatctaccgagcaatgcagagaaaccacgcccctccgaacccttggctccagtgaagcatggttctcgaccggacacgctcttggaacggaatccatctttggtagatccgaaattattcggacctgtcaactctcttcgaggattcgtgcagactccttgtggctttgagcgggtggatcgtaccagcagtggtgatgtccggcagagttatggctctccaactgttcccaataaaacgggatcggatggccgacaaatgcgagatgtctaccccatcccgacgtcagatccgtcgcggttcgatgcaggtcgatcctcagtcattgcggcacaaaaggaaatgactactccatcccgacctgagccggttcctattcaacacccgaaaccaatagcccctgtccacaaaaaagtctttgaatcggtggatgctgacccacgatactcgaggaaagtgtcgtccgacaatggcccgtcccgaacagctgaggcagctgtggttggtagcgcaattgctggcgctgcattgagctcagatgccatcgttggtgctattctgagatcgaatcaaagacatgacaatgacaatcacgacgtcccgcgcgatcatcgcacaaaacatcgatctcgaactactaatgacgaattacacagcgcggagtacgatgaacatgatgaacgtgttgaccgtgatgaaaagagacaggtgcggtctagaaaaagccgagagaaagagcaggactcctcacgcgatgaaaaggagaagcgccgccgcgagaagagggaatctggtctggaccgaaaagctgagaaagaaaggcttaaccgtggaaagcgctatgatggcgtggacagcacgacaaaacacgatcatcagagcgatatttggaaagatgatccttatgttccccgcggagacagctatggagaaagacgacatgaagacacgtctgttggtcggttgtcagggcctgatgtgccaaccgcgccaaaggagtttggctacgaagggacaaaaagtgggatcgatccgtttcaatatcaagtcgccgatgatgcattttccacacctaaatacgcaacacccaatcgcccattgactcccatggtcgtaactgtggaacgagaacccgatttctctagctttgatttgcctgaacattctgaacagcctgaacgtctaagtcgtaaagactccttcgagcgcgatctgcaacatgctcagaaagcatacgaaactgccgcagaagctactgtgccattgtctaaagctgctattgcggcagcggcagcggcagatattgttcaccacgaccgcgaatcttcttccaaacgagattcacagtctcgaggccacacccaacattcagcttcgcctacgcgagatcctgttcaagatgatgcggaccgggcatatcgcgaatacaagctcgctcgtaagcttcaagaacaagaggatagatcacgaagcaattctcctgagcgttcggtcgtggataactggaaagatgacgacgcagcaaagcccactgctcgcattgtgactcctccagctatggatcatgtgaaacaaaagagtccctacgatggtcctgatgccgacgttcgtattgacaatgttcttgaacacccaaatgagctttcccgattcgctatctcaagatcaaggaaacgttcgtccacgttacctgcttttagcacaagagatccttcggccgagcgagagcgacccctgcttaacctagtgcgtcctacccctaccccatcaccagctcctgagaagcaacaacgcgacgaatcaccacctccagtggcacgccctgaagcaccgcggtcttctcctccgactacaaatgatcctaatgccgtgccaaacacgtcgcgaggggatcctgttgccgcaccgcccacaccaacatccaaatttgtaagttggggcgaaaaccagaccaaacactatgtagttgaaagtccagagcgagaagatgatccttattctggcgtcaagataatcacgccggccgagacagtgagatctcggtctggaaagaaaagtagcggatggggcataatcactgctgcggcaacaggcggtggcattgctgcagctgtctcttcggcattatctgaccccaaaagtgaggcgaaaggtctacaggagcgacatgattctcagttggaagatgataacaaatcttcacagaggacatctcccccccaagaggcaccatatgatgagccccctcttccgggaccaaaaccagcgaacctgagaggttcaccaatgccaggtgcttttttcgaggaccctacattcacagccaatatagcagcggggctcgagggcagtggctttgatccaaatataatcatggacgatgcaacattccatcgtcgcgactcgccaccaggttccaatgatgacgatcaaatgggtgcccacactagttcagcagtctccggtcgtccatatgtcattacagacgatagagacatacctgcagataagtcggaaacattctccaaactgagtaagaaagacaggcgaagaaaggagaaagagtcaaagcagcaatcagtcgataagcctttgccgagcacagacaatgaccctcggctaagagcgatgcaggaagacctcgaagatgactggacactcagcaagacggagcaaaaacgtctagaaaaagctgcaagagctcaagcctggcaggatagccaagaaccgaatacattaccttccatacgagaacccgatcccgagcctaatcttgatgaatgggaagatacgtcgtactaaaaagaaaaaagtctaagaaggcaaagaagccgatcgtcgttcaacaagatgctcatcacgaagaatccagtaaagtatttgaagattcgacctcggtacgtacgccccgtggcatcgatcatgccgaccatggtgcaattgatagcgaatggatcacgccatccatgccgagagatgagtcagcggttgtggttgagctcgaggacgaatggggcagcgcaaagcagcatgcgaaggagatgagccgcgacactaccctggatgagtggaaacaatcccctagatctattcctgaggatctacgaacagagcctgcagaaagctcaagcacaacaagcaaaagcaagaagaagaaaaagaagtcgaagcgagactcactcgtggacgacatcacgccctcgtcccctttgctgtctgaactctcgcgcgagagttcctacaaggttgtagagcatgaaaatgggcatgattctactaaaagtcgagacgctgaagagagaggtggaaagagcaagcgacgctcgatcacttctacttctaatgctcaatcaccagatatctccgaatctccaggaacgtcagcacgcaaagacgtaacccctgttgaaaccaatgagtgggattccacaaaagagacgcagcatgaatcaagtagccatccttcgtctccatatgttgaaccgatgagagacagcattgtagaaagcccgaaagatatcgagtcatttggtgatctgccaaacgcaagaacaaccggcactaatgaaacatgggacgagccaaagatttctaagaaaaagaagaaatctaagcgtgattcgaccacgtatgacgactctcctgtccgatctgtgtcgcaatccgcagctccctcggaagtggctactaaaagttcaagcaagaagtctgaagctgaatcacgtgtggacagtactgcctctgacttaggattggacacacctgagcggaaaagaaagaaagagaagcgtgcgagcgcaccaggtggattccccgacgacgaggagctgattaacgaaggtgatcctccggatagaggacgggatcgcttccaatttgacgacaatgaagtgagctccgtagtttctgaccctagccgttacgagaggcatcggtcaagtcatagtcatgcaagaaccgaagactttgacgatgctaagtcgatcgcctccgccccaggcggaccgagccgcaagggttctaaatcaagcaaggacaagaggagtagtggtagttcgagtttcttcgatcgtttcaaatcatccattggcattacagaaaacagagaccaaccacgaaaacgagaagaggagaagaattcttttttagataacgccggcacccttggcgcgagtgccggcttgacgggcgctgcgattgccgtcgcactgcaggagtcccgccataatgccaccgacaaaacatcgatggaggaatctgagtcgcataagatgtcccctgatgatcccgaaggttcctcgactcctatagagaccatcgatcccgaaattatggaaagggagatccgaccagccattgatccccgatacggcgatttgttacccttgccccctagcagatcagcctctcccatcccgaagctcagcgatgacattccaccacttcctgaaagccggccaggaacccccgaggacgagcgtgaacgatttttgctggccaacaagccggtacatgtacgtcgtcgtagcgatacacctttaagggtaaaaacgcctagccaaagtgcgatcccaattcaatttcgcctaggtcagcgaaacggcccgggttctcctagcttgaaatcttccccaattccttctccggtgatggctagctctgaggggggcagtcattcaaaatcacggataagaccaatgtcctgggaaagcacgcgtacattcaaaccacttcttctggctgctagaacctctcgagaacctgttggcgcaccgtctcagcttcatgaagaggtcccagcggatagactttcggacagagcagaacagcatgatgaacagcaagaaacaggcgatgcctcagatgttcccatggaaaatgtggttgccgagcatcctacaacgcctacggactatcacacaggctcacctcaattgccatctttgcattctgccgaggacttccacagtcctgtatcaccgcctgaccctgtcgaccctgtctccaagaatcgcagttcttatttgctttactcaagtccggtgacagtgcagaagtctagagatttggagagtagagactttgagatttctgacaattccccaagcccgagatccgccggtgacaaaatcaagtacgaggataacgagacaatgcctgaaaaagtgtcctccaatgactcgccatcaatactaggagaggttttagctacggatacactgactgccactgctattatcgctagccaaggtagcctccttgatgaagcaagatcaaaagttatccccgatgtgaatagggaacctctgggtgagttagctaattcgggaaagacactaattactggagaccagcctctacaagacagccaggttggtgtcgatttagacaagcagtcggagaaaggtaaggaagaccaggataagggtcgagagattttcgttcgggctgaacatcaaattgatgaagatgttccgattgagcaactcatcgaagacattcaggcttccgaggcgcttctaggtcatgataatactaccggcgatcttgctgctattgggccctcgaagaaaggaaaagacgaagttggtgaatcacaacactcggaacatacggcgggtacggacgatgccatcgacgtatcagcatcctcgactcgggaaatagagggtgactcgccagaagatgaattttttgacgctcaagacgagcagccggttcttcagcctgaccttgaggaacctgatcggggaacttcagatggcaccaccaccgaagtcataggctctacggcagatacccaggtggctgaaatggagaaaatctcgtctaaacaagataagaagaagaaaaagaaggcaaaacgtcagattccggaacccgaaagtgataaagagaaacatgcaacggatctcgacagggtagtcattgactcgcctatagcagacacttacgcgatcatagacgccaacccggtgactgacggagccgaagcccaagaagagataccagtttcagttccatcgccttctccaaattcatttaaggaggagaaggagaagagcaggcaatcagtgtccacagataaccaagactttctcccgtcattcgaccaagccattgcttctgagggcgagcagtttgttacgcgtagcagcccggagccggtgccgtcaccagcaactcagattgaagatatcagtccaccgtctgaggtgttacagtcctctaacaacaaggcattgatcccacaagaacacacggaagaagcacagggaaacatgtctcaagacacatccaatcttgaggaacagccggctgtacaatcatcaaggaagtcgaaaaagaagaagaaagggaagagttctgcgccgtcggagcttgggcctagcaccgtgggcgactggaagaatgacagcaagacagtgcctcaatcaactctggacgacacgaatcattcggatataccacacaaggatgatgctgcgccattggtcatgccaacaggggaagcagtagtgaacctatatccagttgaaaatcttgccaatgcatctgatagtctggtagcggaggatccggagtcagtggctcatactaccaagccggatattcttgaacaagagccgatagccgatgaagctcagatgacaactcgggagcggcaggtaaactcaggacctggagacgctggtatagagacgccgtttgcactaggtgacgtggatgagttgttgtccgatactactccactcggcggtgaagagattgaacagaatcctgaagcaacccatgcagctctagacccactttacgagagcgccggtgaaggcgtgcatgattcttcagcccgactttctgaggcgatggaaatgcctgctacttctccggccgtccccgatgagatccagagctctttaaatgatcaaactgttgctgatgagtttaaggaagttatggagtggccagaaggatcgaaagtgaagaagaacaagaaaaagaacaagaagaaacgccaagaagctcttggaaacactcctgacttattcccatctgcttcacttgtgaccgaagagcatggcgcccaagacgaatcacccggagacgagccatctggtcccataaaagtacttcagactgaaactacaggggacgagcacgcggaaccgactggcgacggttccgagcctgagactgtcgtttccacgaaacggtcgaagaagggcaagaaaggcaagaaaatttcccaagctacgccagtcaccacagaagagaattccgagtctactcacgctgaagagtttgctgcggaaggcgaccggacttttgatgtcgcagatgtcacagatacaaacctccagattcagcccgatctcacggccgatgatcccttaccagtgcctagttctttggaggaagagactatgaaggggaataaaactcaaaatactgaggatgcaatcactaaggaaccggatgaaccgcctgaagaagagaatgacagccctctagctgataacattgccgaaccgtcttcacatgattttggctccgcgccgctggtcactgtcggcaatatttcagtaatggaagatgaagaaattcccaacgctaagtctgaaaccgaatccactcctggcaagaaaaaatcgaagaaagacaagaaaaagaagaagtccgtatctcaagatgatcttcacagtgatgatgttcttgtgacgagggacgagcagagtgccgaagagaattcaactgtcgtatctccggctgtggagtctacagaacaagaaattggtcttgttgacaacaacacagggacactcgagacattggagtcaattggcgccaagcattcattgccgacatcaaaattatctgaggacgagcagccacagccacagaccgacgacacagatgccacttaccaactggatgacagccaaaaggaatcagtcgagcagtctgatcaaggtaattcatctgtggcgacgtctgcgccagccaccaaaaagccgaaaaaggacaagaagaagaaacggcagagtgttcaatttgctgagcccctagaggaattacgggaaattccagcagagcatacgagtgccatctttgcgccagagctaagtaacgagccgggcacactcgttgctgagactacagacaccaagccagtccagcatgaatcggttgaacttatccccacgccatcacaagaatcttcaggtcttgcttcgcagattgcggatgaagagatcactccgtctgttgaattgaagcctgaagacatacctgctacttgggaggtatcagatgaagttcctattcccgccgatggcgaaagtgcttctcaaattgaccctgagtcacatatcgatgcagatacgcaaatgtctcgtcaaaacctcgatgttttaggcccagatcaagtcccgctccctgaaacacccggcgattctctctctgctgatgaatctgttccgatttcttcacctggtaagaagaagaaaaaggacaagaaacgcaaaaataaggacagtagcacacaggatctcagctccgatacgcctgttctacctatcgagaacgctgacaatggcgtgtctggtgtggtgtccacagaagattcggctcaaccaacagcagaaattgcaatggagactgctgaaccaaaggcaccaaccatagaagacatcacggacgcgcccacggaagatgcccgcgaagctctcgaggtcggaaaggagcatcagaggtagaaagggaatccagtgccttcaaagaagagtcactgccagataactcaagccatgaagccaaccagctgcccaatgtcaaaatagacgaagctgccaaaaaggagatcccaccttctgaatcgtcgaacaaagaagactacactgacgttgcaccggccaagacgagcaagaaggataagaaaaagaggaaaaagcaacaggagcagcggctggaggagctagagcaacaagagaggagaatttcggtcgaagaacctgctaccgaagagatttcaccagaaggaaatacacttgacgtcgtattatccaaagaagagctccctgacagcaatgaagagcctactactgcaggagaagatgcctctcttactcggctacatagaggcagcacgagaaagaaaaagcagaagaaaaggcagagtctgtcctcggaaattgatccaacatcgcacatggaaatacagcaacctaaagaggacaaggatagcaaagacgagtcgataattgcgtccgagggtggtcaaatgattgaatctgatgcaccaacaccagctcctatgaccgtcacagaagacgacaagactgatgacttcaaatcaacgaagaatcttgacgttgagcccgagcccgggccagaatctagtgatagtgccaatgtcattccgatcgagaccccagctgaatccgaagcccctctcttcaaggtagccgatgaagcagacgtggttcaagagccaactacagaggtcgatgcaaccatatccaatgataggagttcggttcctcaggatgaggcacaacttgaggactcgtcaagcttgacgccgggaaagaagggaagaaagaacaagaagaagagaaaaagcatcagtgccttggaacctgacacagagcccggtgttcttgtggttcctgacgatgagcaacaaacagagcaacgagtggagtcaaatcaactggaaccagtcgccgagcaaagtgatcccagtactgacatacacaagccaggtgtagatatattgggagatatctccgttagtccacaggaaaacaacgcagatgtcgcaacggtctctcgatcgccggacatgggaaaagtcgctgaatccgacggcgagttagtcaataagagtttgcctgagactacaatcttggttgaggatattacagctgaggacgttccagttaaccctagttctgatgacactacacagcaggtatcatctgaaacagatcaaatcgtgggcctagcgctaggaacggaggtggcggataacagcgaggtgccgcaagcagataaagaagtcggggaatccaaagtaacggtgcccgaggcaaaggatgaaggcggacccgccttcagcaagaagtcgaaaaaggacaagaagaagaagaagcgagccagccaggtcagctgggaaactgaaccacaggctgagattggagagagcgtggagcaagagcagcagtcagagcaggcatggatcgaagaattaagccaggatcccaaaggagaccgtaaggatagtgaacaagcgcagatgacaggagacacagtttccgagttcacttcggacgagggaccaaaggagaagcgccaaagccagatcgactgggagccagaaccaagtagcgaaaagttaactgaggaacctctgccattgccgccgcccgaacaagagcactcaacaggaggattgctcgacaaccagtctcttgctgaggacaacgaaacgagctttcaacaatctgagaatcttgacgacgctagcgctgaggccaatttagacaagaaatcgaagaagaagaaaaaaaagaagaaggcgagccagtttgactgggaagctgaatcttctactccgatccctacgcagtctcctgcggatctaccctttgtcaaacaaactgcggatgaagaagctctaatcactgatgcgacacttgagccctcagtcgaaaggggaacaaatcgagaggttttcgaacaaccaatcgatcaactggccccgcccactaatgaaccagtcaagtctctagtcgaaacacaaacagagcaagaggctacggaaagtagtcccatctctgagggcgtgctgaggaagaagtccaagaaggagaaacgcaagacaaagaaagaaagtggatcccaaactattgacaccggcccaccacttgaaacccccctggagacaccgctgctcgctacggacgaagaagtcaagcccgtagagaatatgccaccgcccgagtctctacctgcagcgtctataacttcaccaagtcgaggcacgcaggatttggagcctccagaaggacagaccaaggaggacgcgctgactgagcagcccgagagcacaccaggcgcagaacttggtccactacccaccatcgagcctagtgaacaaacagccgtgggtgatagtagaggtcgagatagcggagacgcagctgtacaagttcatgatgacgccaaacacatttctcgttcaaatgagccgttccctcttcaaccagagacaccagcagacaccgtggataacgaggaagaagcgacactaagaagtatcgatccttcagaaaaagacgacgaatttgaagtgcccatgaagaaaagcaagaaggcgaaaaaggcagcgaaaaaggctcaaacaatccagactcctgatattgagatgaatatggattcagcaacgaacttgcaatcatgggactggtctaacattgacaatgagcctcaggccgatgtgatatcaccgaatgcgcagcgttccactcccttcgactcaggcgaccgagttgacctagatcaagggccgtcggtagacaatacccagttagcccatgcacctaacgaccagtattcgctcgagccgaacgagtcaagaacggaggggtttgaaatttcttcatctagcaaaagctcgaagaaagacaagaaaaagaagaagaaaggatcagcccaggtcgagacagagttagaaacaggagaaacttcactgtcaaaaactagggagatcgatgatgacactcaagacaaggctccgactggtccaagcgcgcaagaggcagttacggaagatctccaggaagatgagtgggcgtctttcggcaagagaaaatccaagaaagacaaaaagaatcgtcaaagactctcggttaccgatactctactagacacaacggtcatcgaagctgccaaacgaacaatttcagaggacaacgtggattcctccaagcaaagctttcagggcgagcttatttcggacaccacagctcgtccacagacacccttgaatattcatcaagtctccgtccgtacagatctctcgcctgcgcaactcagtagccacatcgaacatgatcgtccctttgatcaatctacgcagccaggcaagaagctccgtacacagcctgccgaagacgaaacaaccattcccgtacaagttcccacttatgttcaggaacgaactcccgagaaggggctggatgtggcctctgagtctttagagtatgtccccacagagcccgacagtacaggtatccgggatctctcaacccctctgaacgagaacttgcaaaatgcgagccacactcatgacgtcaaagaagcatcactgttacaatactctattgatgctccggcggagacgaagaaaaagaagaacggtacagcggcagcagaagaggtgggcaagaacatcgaaagcacgccatttattgacactataggtgtatcatcgacagcagagaagcctacacagggcaaaaagggaaagaataagaagaagtcgaagctgagcgataagaagctgaccagcgaagatgacatatttgatgatcctgcgctgtgggagagctcggagcgcaaaccacttgagggatccaggctagatgtcagctcagaagacttctggaccggaccacaaaatgagatggaaggccagcaagtagagatgccagatgaaattgcgcctacaatcaccagcaagaaggaacaacatgacaataagcccagttccggtgacgatttcatcgacattgagagcccggttgttgggagagaggtcatacatgagatgcctagaaccgaacaaaccgaacgtatcagccatgagccacgggcggccgaagtatccaatatgttggatgagtgggatagtctggacacatgggagcaaagcgaagagcatgataggccccttggcccgacaacacaggaaaatacgtcaatcataccatcccttcccatgccacagactcccagctatgggcggtcctcgcctcggaacttaccgccagtcgaagaagagacaaatgaggaattggaaaaggcgctgcaaccagaacctcaagagaagagtcgggaaaaccgagacagtggattcgtcacggattcgcccaacccgcagcggcacagtcttggactcggtgatgatgcgggccagcgcgacagcggcgttcacttgcgcgactggacagaaaacacacctagtcacaacgagaaggaaatcgatacacagggggcgcggtcttgggatcgcgggcaggcacgaacgcccggagtgagtgagaggcgatcacgacggtcgcttttcgatagccaaacaccaaaactcgagacgcccacgcgtgatagagagggcgtgcgagaggccagccccgagaaacggagaaaagaggagacaactatacaggcgagcacaccagccaagacacagcggacaagcaaatacccagacctgggaccgtccagtgcaagcaacctaagtacccccatagccaagccgaggagcgtttccgacaacacgggggacaccaacaacgagacaattgcggctcgacgctcagcatcgaacacgagcctctcacggctccggacgccagagccgcacaggttccggcctgaaagcccaggcagcatcatcagcctgcggtcgtcaggcaccaacactccaccgctgcgtcgggtgggtcggcaaatcagcggcgatctcaggtcgctgtccagccaccagcagggccccagccactcagccaccgctaaagattcggcacccgcagcagccaaagacaaagacctagccactgctgctggtgctatcgctgccatcgcttccacctccatagcagcagccgccgccgaccgccgtggccagcagcacagcaccacctccagcaccacgcccgttgccaacgaaggccgtgtccgtgccaaggacatgaccgacgtatacgatggctacggcgagggccgaatcggatcgccacggtcgccgacacggccccagagcatgcggcggcgacagagcatgcaggtgctcgagctcgagaacagggtcgagcagctgctcgccgagaaccgcgccctgtccgacgcccgggcgcagtcggagcagtcgctcaaccagcgcaacacgtcggccatcaccgagcgagacgccgagatcgagagcctcaaggcctcgctgcagtggctgcgcaccgaggtcacccgcctgaccgaggtcaacgagggcctgcagagcgccaacagcctgctcgccatgcagcacaacgacaagtacggccgcctcgagtcccagcacgcctccgccgcccgcgagctcgaggagcaccgcggcgcccgcggccagtacacccagaccctgcaggacaaggacgccgagatccaggacctccgcacccagctcgaggccctgaaagagcagatccgcgacatgcagaagcagattctcgccaccaagccgcccgacgccgacttcctccgcctcaaggacgaggaccacttcgacgaccgctgccgccagctctgctcccacgtccagcagtgggtcctgcgcttctccaagttctccgacatgcgcgcctgccgcctcaccagcgagatcaacgacgagaagatcatcgacaggcttgacaacaccgtcctcgacggctccgacgtcgacgactatctcagcgaccgggtccggcgccgcgacatcttcatgtccatgaccatgaacatgatctgggagttcgtcttcacccgctatctcttcggcatggatcgcgaacagcgtcagaagctcaagtccctcgagaagctcctgaccgaagtcggtccaccccaggccgtccgccagtggcgggccgtcaccctcacccttctctccaagcggcctgcctttggaaaccagcgcaaccaagataccgaggctgtcgtgcaggccgtcctccaaaccctatccatgattctcccgcctccttccaacctggaaggccagattcaatcacaactacgccgcgtcatgcgcgaggccgtcgatctctctatcgagatgcgcacgcagcgggccgagtacatgatgctgcccccgcttcagcccgagtacgatgctaatggcgagctcacgcaaaccgtcacattcaacgctgcgctcatgaacgaacggtctggtgacaaaaacaccactaacgaagcctacgaggctcaaggcgctattgttcgttgcgtactattcccgcttgttgttaagaagggagacgacaacggcgtaggcgacgatgagattgtcgtctgtccggctcaagttctggtcgctagagcgcgaccctcgaccatcagaatggtcacaccatcttccgaggccggaggtgttccactatcaagaggagctaccccatcggcctacgggcagtccaccacatcggtgaacatgacagatgctccattgacacccgaatacatttagagtaatcagtggaggcttggcataattacatggggaaagacaggaaacgaaaagataaaatggttgggcactggattcttcgcgtctgaattatgtggttcatcatggcgctggcgtttggcaggttttcttaacgatatacctggatggagttgggggtttcgacttttgctggttcattatttcctttcctatcatcccttacgacttcaactttccaagcttgaagaagagcatattcatgagatacgatttacggcctgtgtggtcagttctttgtaatttagtggaaaatgaatattcacacatggacaattataccgatatatgcttcaacccttttatcagtctacacttgcagcctcttgctgtggggtcgtaatgtgttcatggagtcgtatcttccagtgtacagtgcttgtggttttgatgtatatatattcgctaatcttttcacctgaagagccatctggtacttcgaacttgaaaatgctcctgcagtagatgtatccatcccgctatattgctg

SEQ ID NO: 8881 - DNA, 17532 bp, Muscodor strobelii
  misc_feature: SGI cDNA ID NO. 562753
  misc_feature: Reduced expression when VOC is produced
  misc_feature: Encodes the peptide sequence at SEQ ID NO 8882
atgctcatcacgaagaatccagtaaagtatttgaagattcgacctcgcgaatggatcacgccatccatgccgagagatgagtcagcggttgtggttgagctcgaggacgaatggggcagcgcaaagcagcatgcgaaggagatgagccgcgacactaccctggatgagtggaaacaatcccctagatctattcctgaggatctacgaacagagcctgcagaaagctcaagcacaacaagcaaaagcaagaagaagaaaaagaagtcgaagcgagactcactcgtggacgacatcacgccctcgtcccctttgctgtctgaactctcgcgcgagagttcctacaaggttgtagagcatgaaaatgggcatgattctactaaaagtcgagacgctgaagagagaggtggaaagagcaagcgacgctcgatcacttctacttctaatgctcaatcaccagatatctccgaatctccaggaacgtcagcacgcaaagacgtaacccctgttgaaaccaatgagtgggattccacaaaagagacgcagcatgaatcaagtagccatccttcgtctccatatgttgaaccgatgagagacagcattgtagaaagcccgaaagatatcgagtcatttggtgatctgccaaacgcaagaacaaccggcactaatgaaacatgggacgagccaaagatttctaagaaaaagaagaaatctaagcgtgattcgaccacgtatgacgactctcctgtccgatctgtgtcgcaatccgcagctccctcggaagtggctactaaaagttcaagcaagaagtctgaagctgaatcacgtgtggacagtactgcctctgacttaggattggacacacctgagcggaaaagaaagaaagagaagcgtgcgagcgcaccaggtggattccccgacgacgaggagctgattaacgaaggtgatcctccggatagaggacgggatcgcttccaatttgacgacaatgaagtgagctccgtagtttctgaccctagccgttacgagaggcatcggtcaagtcatagtcatgcaagaaccgaagactttgacgatgctaagtcgatcgcctccgccccaggcggaccgagccgcaagggttctaaatcaagcaaggacaagaggagtagtggtagttcgagtttcttcgatcgtttcaaatcatccattggcattacagaaaacagagaccaaccacgaaaacgagaagaggagaagaattcttttttagataacgccggcacccttggcgcgagtgccggcttgacgggcgctgcgattgccgtcgcactgcaggagtcccgccataatgccaccgacaaaacatcgatggaggaatctgagtcgcataagatgtcccctgatgatcccgaaggttcctcgactcctatagagaccatcgatcccgaaattatggaaagggagatccgaccagccattgatccccgatacggcgatttgttacccttgccccctagcagatcagcctctcccatcccgaagctcagcgatgacattccaccacttcctgaaagccggccaggaacccccgaggacgagcgtgaacgatttttgctggccaacaagccggtacatcttcatgaagaggtcccagcggatagactttcggacagagcagaacagcatgatgaacagcaagaaacaggcgatgcctcagatgttcccatggaaaatgtggttgccgagcatcctacaacgcctacggactatcacacaggctcacctcaattgccatctttgcattctgccgaggacttccacagtcctgtatcaccgcctgaccctgtcgaccctgtctccaagaatcgcagttcttatttgctttactcaagtccggtgacagtgcagaagtctagagatttggagagtagagactttgagatttctgacaattccccaagcccgagatccgccggtgacaaaatcaagtacgaggataacgagacaatgcctgaaaaagtgtcctccaatgactcgccatcaatactaggagaggttttagctacggatacactgactgccactgctattatcgctagccaaggtagcctccttgatgaagcaagatcaaaagttatccccgatgtgaatagggaacctctgggtgagttagctaattcgggaaagacactaattactggagaccagcctctacaagacagccaggttggtgtcgatttagacaagcagtcggagaaaggtaaggaagaccaggataagggtcgagagattttcgttcgggctgaacatcaaattgatgaagatgttccgattgagcaactcatcgaagacattcaggcttccgaggcgcttctaggtcatgataatactaccggcgatcttgctgctattgggccctcgaagaaaggaaaagacgaagttggtgaatcacaacactcggaacatacggcgggtacggacgatgccatcgacgtatcagcatcctcgactcgggaaatagagggtgactcgccagaagatgaattttttgacgctcaagacgagcagccggttcttcagcctgaccttgaggaacctgatcggggaacttcagatggcaccaccaccgaagtcataggctctacggcagatacccaggtggctgaaatggagaaaatctcgtctaaacaagataagaagaagaaaaagaaggcaaaacgtcagattccggaacccgaaagtgataaagagaaacatgcaacggatctcgacagggtagtcattgactcgcctatagcagacacttacgcgatcatagacgccaacccggtgactgacggagccgaagcccaagaagagataccagtttcagttccatcgccttctccaaattcatttaaggaggagaaggagaagagcaggcaatcagtgtccacagataaccaagactttctcccgtcattcgaccaagccattgcttctgagggcgagcagtttgttacgcgtagcagcccggagccggtgccgtcaccagcaactcagattgaagatatcagtccaccgtctgaggtgttacagtcctctaacaacaaggcattgatcccacaagaacacacggaagaagcacagggaaacatgtctcaagacacatccaatcttgaggaacagccggctgtacaatcatcaaggaagtcgaaaaagaagaagaaagggaagagttctgcgccgtcggagcttgggcctagcaccgtgggcgactggaagaatgacagcaagacagtgcctcaatcaactctggacgacacgaatcattcggatataccacacaaggatgatgctgcgccattggtcatgccaacaggggaagcagtagtgaacctatatccagttgaaaatcttgccaatgcatctgatagtctggtagcggaggatccggagtcagtggctcatactaccaagccggatattcttgaacaagagccgatagccgatgaagctcagatgacaactcgggagcggcaggtaaactcaggacctggagacgctggtatagagacgccgtttgcactaggtgacgtggatgagttgttgtccgatactactccactcggcggtgaagagattgaacagaatcctgaagcaacccatgcagctctagacccactttacgagagcgccggtgaaggcgtgcatgattcttcagcccgactttctgaggcgatggaaatgcctgctacttctccggccgtccccgatgagatccagagctctttaaatgatcaaactgttgctgatgagtttaaggaagttatggagtggccagaaggatcgaaagtgaagaagaacaagaaaaagaacaagaagaaacgccaagaagctcttggaaacactcctgacttattcccatctgcttcacttgtgaccgaagagcatggcgcccaagacgaatcacccggagacgagccatctggtcccataaaagtacttcagactgaaactacaggggacgagcacgcggaaccgactggcgacggttccgagcctgagactgtcgtttccacgaaacggtcgaagaagggcaagaaaggcaagaaaatttcccaagctacgccagtcaccacagaagagaattccgagtctactcacgctgaagagtttgctgcggaaggcgaccggacttttgatgtcgcagatgtcacagatacaaacctccagattcagcccgatctcacggccgatgatcccttaccagtgcctagttctttggaggaagagactatgaaggggaataaaactcaaaatactgaggatgcaatcactaaggaaccggatgaaccgcctgaagaagagaatgacagccctctagctgataacattgccgaaccgtcttcacatgattttggctccgcgccgctggtcactgtcggcaatatttcagtaatggaagatgaagaaattcccaacgctaagtctgaaaccgaatccactcctggcaagaaaaaatcgaagaaagacaagaaaaagaagaagtccgtatctcaagatgatcttcacagtgatgatgttcttgtgacgagggacgagcagagtgccgaagagaattcaactgtcgtatctccggctgtggagtctacagaacaagaaattggtcttgttgacaacaacacagggacactcgagacattggagtcaattggcgccaagcattcattgccgacatcaaaattatctgaggacgagcagccacagccacagaccgacgacacagatgccacttaccaactggatgacagccaaaaggaatcagtcgagcagtctgatcaaggtaattcatctgtggcgacgtctgcgccagccaccaaaaagccgaaaaaggacaagaagaagaaacggcagagtgttcaatttgctgagcccctagaggaattacgggaaattccagcagagcatacgagtgccatctttgcgccagagctaagtaacgagccgggcacactcgttgctgagactacagacaccaagccagtccagcatgaatcggttgaacttatccccacgccatcacaagaatcttcaggtcttgcttcgcagattgcggatgaagagatcactccgtctgttgaattgaagcctgaagacatacctgctacttgggaggtatcagatgaagttcctattcccgccgatggcgaaagtgcttctcaaattgaccctgagtcacatatcgatgcagatacgcaaatgtctcgtcaaaacctcgatgttttaggcccagatcaagtcccgctccctgaaacacccggcgattctctctctgctgatgaatctgttccgatttcttcacctggtaagaagaagaaaaaggacaagaaacgcaaaaataaggacagtagcacacaggatctcagctccgatacgcctgttctacctatcgagaacgctgacaatggcgtgtctggtgtggtgtccacagaagattcggctcaaccaacagcagaaattgcaatggagactgctgaaccaaaggcaccaaccatagaagacatcacggacgcgcccacggaagatgcccgcgaagctctcgaggtcggaaaggagcatcaggttgaggaagacgtcgctaaagtaatagaaacagaagctatggaaacgaatcaattgccagagacatctgttccgggaggccatttctctaacgctccggattctaccgatgcacctgaacctggggatgcccttgtgaccaagaaaagcaagaaacaaaagaagaacaagaaagggagcaagggcatcgacactgcaccccctactgagcctgctgaagaagcgagtgacgacgtccttctaactcaggatgccgctccggaccaggaactctcaacaacggttttgccaggcgactacattcgggctcatcaaggtgcacagcgtgaatcatcagttgtgacatcggatcagagggaggaagactctccaacagatctgccccaagacattagtgaacccagcgaagtagccgaccagaagtccgaggacatatcaatacgtaacacggactttgacgtcgctaccacaaccatggctgatgagatcaacgctgaagaggaagagcttgctactttgaaggcaaagaagaaattgaacaagaaggacaaaaagcgtctcgccgagctcaatgaaaaagccagtattcgagaagaagaagctgccaaagtgcgaactacccgtgatgagttgggcacagaagtcgcaatgacctctgattctagcccaatcaaccttatagcgatgcaagaggagcttgattccgtgacgcagtcaagtcaggggcagacctcattggcacaaagcgagttatcacccgatgttgaagctatgccaagtgagcctcgaccagcaacccgaacaagtgcaagcgaatcgcaatattttgttgaacaagaaccagcacaaccaccgccctccgcagaagcagaagcaaaccaatcgcagcccttaactgaagaagcatctagcaaaccacaacctctcgaagcgggattgaccgaacagcagctccctgaagctgctgaagaagacgaagagcttgctgctctaaagtctaagagcaaattgagtaagaaggacaaaaggcgtctgaaggaactcacggagaagatcaacgcacgcacggaagaagccgtatcaaaacaaatcgccgatgatggagtagttgactctgtactgccacaagatgcagcgctcatgcaagcaccagtagctgacgggccatccgatgaagtagaacgaaatctagcggaaccacttgaggcagcatcactaggggcgcagattgagccagaggcacctgagacccagccctctgaaccagccgtagtagagacgcagctctctcagccggagcctctagagacacagctcacagagccagagatatttgagtcacaagtcaccgacccggagccactcaagacacagccctctgaactggaagtgtcagagacgcaaccatccgagacggaggtattcgagacgcaactcactgagccggagtcacttaagacgcaaagctctgagctagagccgctcgagacacagccctctgagcccatagtagaagaaaaacattcctccgagctagagccactagagatgcaagcttctgggacggcgatacttgacaaacagtcctctgagccggagactcctctcggaacacaaacgtctgaagcagcggcaccacctcaaactcagctttccgtcgaagaagaagaagaacttgctactctgagatctaaagggaaactcagcaaaaaggagaaacgccgtcttaaggaactcacgaataagatcaacacgcaagtggaagagagtgtccctgcacaaactcatgaatctattgagtcttcggcaccacatgaggccccgtccatagaaaagcgaccggtggaagagaagctccctgaagaaaagctcctggaggaaaagctccctgaagagacccttgcagagacacaaatttctgggtccaatctacctggagatcctataaaatcggagccctctgaagtaacacaggaagaagaagtcgcctctagccgcaagtccaaaaaggataaaaagaaaaagaaacgagatagcgcgctaagtgctgaagatctcggagctttggaggatgtatccaaaccggctttggcagttgaacctgccgttacggtaccttcagaacctgaggatcttgtaagcgaacaggcatctgcaaatgctgagaatcctgagactgtaggtaaaggagaagacagcaaggatcagagtacttcgcaacagaccgagctcgagacatcgacaatggcattaccagaagaaagggtcgttgatgcgcctcttgagacgacaagcacacctgaattggagttgaatcagtctaccacctcggaaacagcttctacggtcgaccctagttctggtggcgctgcaaagatgagtaagaaagacaagaagaaaaggaagaagaaacaagagcaagagcaagagcagcaagagacaattgcacctgcagacgagatgatcaaggagcccgcttcagaattcaccgagaaggctgttgaggcacaaacagagccctcaccagaaactgaaaagccaacacctgaagagtcagtcgtcggaacgctcgttgaagcagcagtggaggcgcaaccggaaatccaagacgagtcctctccatcgttgcctttgacagaaaaagtccaaaaaagcgaagaccaggtgacaaaagaactcaatcccacctctaccactggcgataccgaaaatgctattccacaaactaccaaggattctcagaactacgatgatcctaccgacttcactcctgcctcaaagtctaagaagagcaaaaagaagaaaaagaagacgtctcttctagaggatgaagtcccgggagcaccagagacaactatggaacctgaccctcaatccgagattatccagcctgagcctgagcttcaagtcacggaaacaatagaacaaatcagggatcttgattcccagccagagacaatccagccgccacaactcgcgcaggagcttgcgcaggagcttgagcaagagacagagaccggatcagaaactaagatcacacgcgaagtcgagccagaagcacgacaagaagaagagtcgctagattccacccccacttcgaagtctgaacaagacaaggaaaagaagaaattcgaatcactggacaacacgatgtctatgacggagccattacaacattcagagccagtgcaggatctgcggtcctcattagatcaagaaccgatccaggccccagagccttccgagccgttacaggatacacaattagcgccggaacaagaacctgtgcaagcatccgaatcacccagcagtacccccaccacgaagtccaaaaaggccaggaagaacaagaagaaatctgactcggtggatgaagggcttgcttcagagacggttcaagatttagagccagcgccagagccggcgcaaggggatgatgcagaggctgtgcgggagccaaagtcagagccagagccacagtcaatccaggagctggactcaatacaagggccagcacatgaggcagttcaggaatcggaacaatcagttgccaatgaagctgtgttacctgcaacgagcgagtcatcagaggaagctatcactgttctacctgtggcatcagctatcgatgagactgacgaaatctcttctaagtcgaagaaagacaagaagaaaaagaagaaaagacaagtagagcttggggaagaagctgcagccacagagtcgcagacacaacccgcgcaagactccattgatgaaatggctcagagggatataaatcctctgataacttcggaaagccgaccgaccgaggaagttgctgcagaggacgcttcaatcggagatgaacttgtcacatcagagaccgctttctacccaactgaaaagagcgaaaaagacaaagagcctgagcaagcatccgaacgccgagttgacgacgcagtcccagagtcccagctaaacattgaccatcaacttgctcatgagacagaaaaagtggatgacaaaagagatggtctacatagcccaaagccagaggaaatcatggctgctatgaatcagccaaacgacgaggtagtttccaaagtcgacgacgcagattttagcgggcctgccaagaagagcaagaaagacaagaaaaagaagaaaaagcaagctgctcttcaggaaaccattcaagctgatgaccaaccggagctagccgaagtagtcgctgcggacgttccacagcccgaacctgatactagttttgtcgctgagcccatccaagacaacgatgatacggttataagtacaaccacaaacgaacctactcaattgggtgatgctacttcggaagcccgcgcagttgataaactcacttccgacaataaagacaatcaacaagaccttctcaaagaagatgaagtgttggccaacgccgaactgaacactgactctgcagatcagagcgtagaagaagccaaacagctcgaacctggaacaccaatcgctgccactgctattcaagatgataatattgtgagcagtgatcttcctcaggccgaagacttcccctcagacgaggttgttgctgagaccgatgctcccgccgactttaccacgcccaagaagactaagaaagacaagaaaaagaaaaagcagacgacgtctctggatgatgacaaaacttttgaacgagagagtcatgctcagtccagtcctccggaacctgatcacgctcaagcacctactgaaccacttgaaccactttcaggtgaaaagacgacatcgatacagacagctaccccatctgagagctttgctgattctataccaacgaaaaagagcaagaaagacaagaaaaagaagaagcagcagccaatgtcatgggatgaggagtcgcctcagattgaatccgtcgaggattccacccgcatcatcaccggcgacgcaactgaatcttatctttcgcccgctcaggagagtctcttaccccagcccacggagtctaatgactactccgaagtcaatcggatggagaaaagtagcgaagacgcgggcatggaaatttctggacttgacaaagaaataatacccgcatattcacctgttgaggagtctgcagttcatttcgccatggaaccaactgtctctgttgaaccaatcgagaaacaaccagcagttcttcctgttgccaacgaagaccctactgattctgtagcttcagaggtagaaagggaatccagtgccttcaaagaagagtcactgccagataactcaagccatgaagccaaccagctgcccaatgtcaaaatagacgaagctgccaaaaaggagatcccaccttctgaatcgtcgaacaaagaagactacactgacgttgcaccggccaagacgagcaagaaggataagaaaaagaggaaaaagcaacaggagcagcggctggaggagctagagcaacaagagaggagaatttcggtcgaagaacctgctaccgaagagatttcaccagaaggaaatacacttgacgtcgtattatccaaagaagagctccctgacagcaatgaagagcctactactgcaggagaagatgcctctcttactcggctacatagaggcagcacgagaaagaaaaagcagaagaaaaggcagagtctgtcctcggaaattgatccaacatcgcacatggaaatacagcaacctaaagaggacaaggatagcaaagacgagtcgataattgcgtccgagggtggtcaaatgattgaatctgatgcaccaacaccagctcctatgaccgtcacagaagacgacaagactgatgacttcaaatcaacgaagaatcttgacgttgagcccgagcccgggccagaatctagtgatagtgccaatgtcattccgatcgagaccccagctgaatccgaagcccctctcttcaaggtagccgatgaagcagacgtggttcaagagccaactacagaggtcgatgcaaccatatccaatgataggagttcggttcctcaggatgaggcacaacttgaggactcgtcaagcttgacgccgggaaagaagggaagaaagaacaagaagaagagaaaaagcatcagtgccttggaacctgacacagagcccggtgttcttgtggttcctgacgatgagcaacaaacagagcaacgagtggagtcaaatcaactggaaccagtcgccgagcaaagtgatcccagtactgacatacacaagccaggtgtagatatattgggagatatctccgttagtccacaggaaaacaacgcagatgtcgcaacggtctctcgatcgccggacatgggaaaagtcgctgaatccgacggcgagttagtcaataagagtttgcctgagactacaatcttggttgaggatattacagctgaggacgttccagttaaccctagttctgatgacactacacagcaggtatcatctgaaacagatcaaatcgtgggcctagcgctaggaacggaggtggcggataacagcgaggtgccgcaagcagataaagaagtcggggaatccaaagtaacggtgcccgaggcaaaggatgaaggcggacccgccttcagcaagaagtcgaaaaaggacaagaagaagaagaagcgagccagccaggtcagctgggaaactgaaccacaggctgagattggagagagcgtggagcaagagcagcagtcagagcaggcatggatcgaagaattaagccaggatcccaaaggagaccgtaaggatagtgaacaagcgcagatgacaggagacacagtttccgagttcacttcggacgagggaccaaaggagaagcgccaaagccagatcgactgggagccagaaccaagtagcgaaaagttaactgaggaacctctgccattgccgccgcccgaacaagagcactcaacaggaggattgctcgacaaccagtctcttgctgaggacaacgaaacgagctttcaacaatctgagaatcttgacgacgctagcgctgaggccaatttagacaagaaatcgaagaagaagaaaaaaaagaagaaggcgagccagtttgactgggaagctgaatcttctactccgatccctacgcagtctcctgcggatctaccctttgtcaaacaaactgcggatgaagaagctctaatcactgatgcgacacttgagccctcagtcgaaaggggaacaaatcgagaggttttcgaacaaccaatcgatcaactggccccgcccactaatgaaccagtcaagtctctagtcgaaacacaaacagagcaagaggctacggaaagtagtcccatctctgagggcgtgctgaggaagaagtccaagaaggagaaacgcaagacaaagaaagaaagtggatcccaaactattgacaccggcccaccacttgaaacccccctggagacaccgctgctcgctacggacgaagaagtcaagcccgtagagaatatgccaccgcccgagtctctacctgcagcgtctataacttcaccaagtcgaggcacgcaggatttggagcctccagaaggacagaccaaggaggacgcgctgactgagcagcccgagagcacaccaggcgcagaacttggtccactacccaccatcgagcctagtgaacaaacagccgtgggtgatagtagaggtcgagatagcggagacgcagctgtacaagttcatgatgacgccaaacacatttctcgttcaaatgagccgttccctcttcaaccagagacaccagcagacaccgtggataacgaggaagaagcgacactaagaagtatcgatccttcagaaaaagacgacgaatttgaagtgcccatgaagaaaagcaagaaggcgaaaaaggcagcgaaaaaggctcaaacaatccagactcctgatattgagatgaatatggattcagcaacgaacttgcaatcatgggactggtctaacattgacaatgagcctcaggccgatgtgatatcaccgaatgcgcagcgttccactcccttcgactcaggcgaccgagttgacctagatcaagggccgtcggtagacaatacccagttagcccatgcacctaacgaccagtattcgctcgagccgaacgagtcaagaacggaggggtttgaaatttcttcatctagcaaaagctcgaagaaagacaagaaaaagaagaagaaaggatcagcccaggtcgagacagagttagaaacaggagaaacttcactgtcaaaaactagggagatcgatgatgacactcaagacaaggctccgactggtccaagcgcgcaagaggcagttacggaagatctccaggaagatgagtgggcgtctttcggcaagagaaaatccaagaaagacaaaaagaatcgtcaaagactctcggttaccgatactctactagacacaacggtcatcgaagctgccaaacgaacaatttcagaggacaacgtggattcctccaagcaaagctttcagggcgagcttatttcggacaccacagctcgtccacagacacccttgaatattcatcaagtctccgtccgtacagatctctcgcctgcgcaactcagtagccacatcgaacatgatcgtccctttgatcaatctacgcagccaggcaagaagctccgtacacagcctgccgaagacgaaacaaccattcccgtacaagttcccacttatgttcaggaacgaactcccgagaaggggctggatgtggcctctgagtctttagagtatgtccccacagagcccgacagtacaggtatccgggatctctcaacccctctgaacgagaacttgcaaaatgcgagccacactcatgacgtcaaagaagcatcactgttacaatactctattgatgctccggcggagacgaagaaaaagaagaacggtacagcggcagcagaagaggtgggcaagaacatcgaaagcacgccatttattgacactataggtgtatcatcgacagcagagaagcctacacagggcaaaaagggaaagaataagaagaagtcgaagctgagcgataagaagctgaccagcgaagatgacatatttgatgatcctgcgctgtgggagagctcggagcgcaaaccacttgagggatccaggctagatgtcagctcagaagacttctggaccggaccacaaaatgagatggaaggccagcaagtagagatgccagatgaaattgcgcctacaatcaccagcaagaaggaacaacatgacaataagcccagttccggtgacgatttcatcgacattgagagcccggttgttgggagagaggtcatacatgagatgcctagaaccgaacaaaccgaacgtatcagccatgagccacgggcggccgaagtatccaatatgttggatgagtgggatagtctggacacatgggagcaaagcgaagagcatgataggccccttggcccgacaacacaggaaaatacgtcaatcataccatcccttcccatgccacagactcccagctatgggcggtcctcgcctcggaacttaccgccagtcgaagaagagacaaatgaggaattggaaaaggcgctgcaaccagaacctcaagagaagagtcgggaaaaccgagacagtggattcgtcacggattcgcccaacccgcagcggcacagtcttggactcggtgatgatgcgggccagcgcgacagcggcgttcacttgcgcgactggacagaaaacacacctagtcacaacgagaaggaaatcgatacacagggggcgcggtcttgggatcgcgggcaggcacgaacgcccggagtgagtgagaggcgatcacgacggtcgcttttcgatagccaaacaccaaaactcgagacgcccacgcgtgatagagagggcgtgcgagaggccagccccgagaaacggagaaaagaggagacaactatacaggcgagcacaccagccaagacacagcggacaagcaaatacccagacctgggaccgtccagtgcaagcaacctaagtacccccatagccaagccgaggagcgtttccgacaacacgggggacaccaacaacgagacaattgcggctcgacgctcagcatcgaacacgagcctctcacggctccggacgccagagccgcacaggttccggcctgaaagcccaggcagcatcatcagcctgcggtcgtcaggcaccaacactccaccgctgcgtcgggtgggtcggcaaatcagcggcgatctcaggtcgctgtccagccaccagcagggccccagccactcagccaccgctaaagattcggcacccgcagcagccaaagacaaagacctagccactgctgctggtgctatcgctgccatcgcttccacctccatagcagcagccgccgccgaccgccgtggccagcagcacagcaccacctccagcaccacgcccgttgccaacgaaggccgtgtccgtgccaaggacatgaccgacgtatacgatggctacggcgagggccgaatcggatcgccacggtcgccgacacggccccagagcatgcggcggcgacagagcatgcaggtgctcgagctcgagaacagggtcgagcagctgctcgccgagaaccgcgccctgtccgacgcccgggcgcagtcggagcagtcgctcaaccagcgcaacacgtcggccatcaccgagcgagacgccgagatcgagagcctcaaggcctcgctgcagtggctgcgcaccgaggtcacccgcctgaccgaggtcaacgagggcctgcagagcgccaacagcctgctcgccatgcagcacaacgacaagtacggccgcctcgagtcccagcacgcctccgccgcccgcgagctcgaggagcaccgcggcgcccgcggccagtacacccagaccctgcaggacaaggacgccgagatccaggacctccgcacccagctcgaggccctgaaagagcagatccgcgacatgcagaagcagattctcgccaccaagccgcccgacgccgacttcctccgcctcaaggacgaggaccacttcgacgaccgctgccgccagctctgctcccacgtccagcagtgggtcctgcgcttctccaagttctccgacatgcgcgcctgccgcctcaccagcgagatcaacgacgagaagatcatcgacaggcttgacaacaccgtcctcgacggctccgacgtcgacgactatctcagcgaccgggtccggcgccgcgacatcttcatgtccatgaccatgaacatgatctgggagttcgtcttcacccgctatctcttcggcatggatcgcgaacagcgtcagaagctcaagtccctcgagaagctcctgaccgaagtcggtccaccccaggccgtccgccagtggcgggccgtcaccctcacccttctctccaagcggcctgcctttggaaaccagcgcaaccaagataccgaggctgtcgtgcaggccgtcctccaaaccctatccatgattctcccgcctccttccaacctggaaggccagattcaatcacaactacgccgcgtcatgcgcgaggccgtcgatctctctatcgagatgcgcacgcagcgggccgagtacatgatgctgcccccgcttcagcccgagtacgatgctaatggcgagctcacgcaaaccgtcacattcaacgctgcgctcatgaacgaacggtctggtgacaaaaacaccactaacgaagcctacgaggctcaaggcgctattgttcgttgcgtactattcccgcttgttgttaagaagggagacgacaacggcgtaggcgacgatgagattgtcgtctgtccggctcaagttctggtcgctagagcgcgaccctcgaccatcagaatggtcacaccatcttccgaggccggaggtgttccactatcaagaggagctaccccatcggcctacgggcagtccaccacatcggtgaacatgacagatgctccattgacacccgaatacatttag

SEQ ID NO: 8882 - protein, 5843 aa, Muscodor strobelii
  misc_feature: SGI Peptide ID NO. 562753
  misc_feature (5023)..(5819): NCBI GI: 145613457 Blast Desc: MGG_01625 [Magnaporthe grisea 70-15] gi|145020526|gb|EDK04655.1| MGG_01625 [Magnaporthe grisea 70-15]
  misc_feature (4928)..(5812): NCBI GI: 46108334 Blast Desc: FG01049.1 [Gibberella zeae PH-1]
  misc_feature (5029)..(5834): NCBI GI: 116181746 Blast Desc: CHGG_01501 [Chaetomium globosum CBS 148.51] gi|88185798|gb|EAQ93266.1| CHGG_01501 [Chaetomium globosum CBS 148.51]
  misc_feature (5212)..(5797): NCBI GI: 154323568 Blast Desc: BC1G_00183 [Botryotinia fuckeliana B05.10] gi|150842412|gb|EDN17605.1| BC1G_00183 [Botryotinia fuckeliana B05.10]
  misc_feature (5067)..(5812): NCBI GI: 156058053 Blast Desc: SS1G_04758 [Sclerotinia sclerotiorum 1980] gi|154702543|gb|EDO02282.1| SS1G_04758 [Sclerotinia sclerotiorum 1980]
  misc_feature (5213)..(5812): NCBI GI: 171696104 Blast Desc: protein product [Podospora anserina] gi|170948294|emb|CAP60458.1| protein product [Podospora anserina]
  misc_feature (5322)..(5797): NCBI GI: 85111728 Blast Desc: NCU02793 [Neurospora crassa OR74A] gi|28925839|gb|EAA34839.1| [Neurospora crassa OR74A]
  misc_feature (5232)..(5796): NCBI GI: 238493833 Blast Desc: involucrin repeat protein [Aspergillus flavus NRRL3357] gi|220696647|gb|EED52989.1| involucrin repeat protein [Aspergillus flavus NRRL3357]
  misc_feature (5232)..(5796): NCBI GI: 169784000 Blast Desc: [Aspergillus oryzae RIB40] gi|83775206|dbj|BAE65329.1| protein product [Aspergillus oryzae]
  misc_feature (5322)..(5795): NCBI GI: 225559460 Blast Desc: conserved [Ajellomyces capsulatus G186AR]
  misc_feature: Useful for introducing or modulating the production of volatile compounds
MLITKNPVKYLKIRPREWITPSMPRDESAVVVELEDEWGSAKQHAKEMSRDTTLDEWKQSPRSIPEDLRTEPAESSSTTSKSKKKKKKSKRDSLVDDITPSSPLLSELSRESSYKVVEHENGHDSTKSRDAEERGGKSKRRSITSTSNAQSPDISESPGTSARKDVTPVETNEWDSTKETQHESSSHPSSPYVEPMRDSIVESPKDIESFGDLPNARTTGTNETWDEPKISKKKKKSKRDSTTYDDSPVRSVSQSAAPSEVATKSSSKKSEAESRVDSTASDLGLDTPERKRKKEKRASAPGGFPDDEELINEGDPPDRGRDRFQFDDNEVSSVVSDPSRYERHRSSHSHARTEDFDDAKSIASAPGGPSRKGSKSSKDKRSSGSSSFFDRFKSSIGITENRDQPRKREEEKNSFLDNAGTLGASAGLTGAAIAVALQESRHNATDKTSMEESESHKMSPDDPEGSSTPIETIDPEIMEREIRPAIDPRYGDLLPLPPSRSASPIPKLSDDIPPLPESRPGTPEDERERFLLANKPVHLHEEVPADRLSDRAEQHDEQQETGDASDVPMENVVAEHPTTPTDYHTGSPQLPSLHSAEDFHSPVSPPDPVDPVSKNRSSYLLYSSPVTVQKSRDLESRDFEISDNSPSPRSAGDKIKYEDNETMPEKVSSNDSPSILGEVLATDTLTATAIIASQGSLLDEARSKVIPDVNREPLGELANSGKTLITGDQPLQDSQVGVDLDKQSEKGKEDQDKGREIFVRAEHQIDEDVPIEQLIEDIQASEALLGHDNTTGDLAAIGPSKKGKDEVGESQHSEHTAGTDDAIDVSASSTREIEGDSPEDEFFDAQDEQPVLQPDLEEPDRGTSDGTTTEVIGSTADTQVAEMEKISSKQDKKKKKKAKRQIPEPESDKEKHATDLDRVVIDSPIADTYAIIDANPVTDGAEAQEEIPVSVPSPSPNSFKEEKEKSRQSVSTDNQDFLPSFDQAIASEGEQFVTRSSPEPVPSPATQIEDISPPSEVLQSSNNKALIPQEHTEEAQGNMSQDTSNLEEQPAVQSSRKSKKKKKGKSSAPSELGPSTVGDWKNDSKTVPQSTLDDTNHSDIPHKDDAAPLVMPTGEAVVNLYPVENLANASDSLVAEDPESVAHTTKPDILEQEPIADEAQMTTRERQVNSGPGDAGIETPFALGDVDELLSDTTPLGGEEIEQNPEATHAALDPLYESAGEGVHDSSARLSEAMEMPATSPAVPDEIQSSLNDQTVADEFKEVMEWPEGSKVKKNKKKNKKKRQEALGNTPDLFPSASLVTEEHGAQDESPGDEPSGPIKVLQTETTGDEHAEPTGDGSEPETVVSTKRSKKGKKGKKISQATPVTTEENSESTHAEEFAAEGDRTFDVADVTDTNLQIQPDLTADDPLPVPSSLEEETMKGNKTQNTEDAITKEPDEPPEEENDSPLADNIAEPSSHDFGSAPLVTVGNISVMEDEEIPNAKSETESTPGKKKSKKDKKKKKSVSQDDLHSDDVLVTRDEQSAEENSTVVSPAVESTEQEIGLVDNNTGTLETLESIGAKHSLPTSKLSEDEQPQPQTDDTDATYQLDDSQKESVEQSDQGNSSVATSAPATKKPKKDKKKKRQSVQFAEPLEELREIPAEHTSAIFAPELSNEPGTLVAETTDTKPVQHESVELIPTPSQESSGLASQIADEEITPSVELKPEDIPATWEVSDEVPIPADGESASQIDPESHIDADTQMSRQNLDVLGPDQVPLPETPGDSLSADESVPISSPGKKKKKDKKRKNKDSSTQDLSSDTPVLPIENADNGVSGVVSTEDSAQPTAEIAMETAEPKAPTIEDITDAPTEDAREALEVGKEHQVEEDVAKVIETEAMETNQLPETSVPGGHFSNAPDSTDAPEPGDALVTKKSKKQKKNKKGSKGIDTAPPTEPAEEASDDVLLTQDAAPDQELSTTVLPGDYIRAHQGAQRESSVVTSDQREEDSPTDLPQDISEPSEVADQKSEDISIRNTDFDVATTTMADEINAEEEELATLKAKKKLNKKDKKRLAELNEKASIREEEAAKVRTTRDELGTEVAMTSDSSPINLIAMQEELDSVTQSSQGQTSLAQSELSPDVEAMPSEPRPATRTSASESQYFVEQEPAQPPPSAEAEANQSQPLTEEASSKPQPLEAGLTEQQLPEAAEEDEELAALKSKSKLSKKDKRRLKELTEKINARTEEAVSKQIADDGVVDSVLPQDAALMQAPVADGPSDEVERNLAEPLEAASLGAQIEPEAPETQPSEPAVVETQLSQPEPLETQLTEPEIFESQVTDPEPLKTQPSELEVSETQPSETEVFETQLTEPESLKTQSSELEPLETQPSEPIVEEKHSSELEPLEMQASGTAILDKQSSEPETPLGTQTSEAAAPPQTQLSVEEEEELATLRSKGKLSKKEKRRLKELTNKINTQVEESVPAQTHESIESSAPHEAPSIEKRPVEEKLPEEKLLEEKLPEETLAETQISGSNLPGDPIKSEPSEVTQEEEVASSRKSKKDKKKKKRDSALSAEDLGALEDVSKPALAVEPAVTVPSEPEDLVSEQASANAENPETVGKGEDSKDQSTSQQTELETSTMALPEERVVDAPLETTSTPELELNQSTTSETASTVDPSSGGAAKMSKKDKKKRKKKQEQEQEQQETIAPADEMIKEPASEFTEKAVEAQTEPSPETEKPTPEESVVGTLVEAAVEAQPEIQDESSPSLPLTEKVQKSEDQVTKELNPTSTTGDTENAIPQTTKDSQNYDDPTDFTPASKSKKSKKKKKKTSLLEDEVPGAPETTMEPDPQSEIIQPEPELQVTETIEQIRDLDSQPETIQPPQLAQELAQELEQETETGSETKITREVEPEARQEEESLDSTPTSKSEQDKEKKKFESLDNTMSMTEPLQHSEPVQDLRSSLDQEPIQAPEPSEPLQDTQLAPEQEPVQASESPSSTPTTKSKKARKNKKKSDSVDEGLASETVQDLEPAPEPAQGDDAEAVREPKSEPEPQSIQELDSIQGPAHEAVQESEQSVANEAVLPATSESSEEAITVLPVASAIDETDEISSKSKKDKKKKKKRQVELGEEAAATESQTQPAQDSIDEMAQRDINPLITSESRPTEEVAAEDASIGDELVTSETAFYPTEKSEKDKEPEQASERRVDDAVPESQLNIDHQLAHETEKVDDKRDGLHSPKPEEIMAAMNQPNDEVVSKVDDADFSGPAKKSKKDKKKKKKQAALQETIQADDQPELAEVVAADVPQPEPDTSFVAEPIQDNDDTVISTTTNEPTQLGDATSEARAVDKLTSDNKDNQQDLLKEDEVLANAELNTDSADQSVEEAKQLEPGTPIAATAIQDDNIVSSDLPQAEDFPSDEVVAETDAPADFTTPKKTKKDKKKKKQTTSLDDDKTFERESHAQSSPPEPDHAQAPTEPLEPLSGEKTTSIQTATPSESFADSIPTKKSKKDKKKKKQQPMSWDEESPQIESVEDSTRIITGDATESYLSPAQESLLPQPTESNDYSEVNRMEKSSEDAGMEISGLDKEIIPAYSPVEESAVHFAMEPTVSVEPIEKQPAVLPVANEDPTDSVASEVERESSAFKEESLPDNSSHEANQLPNVKIDEAAKKEIPPSESSNKEDYTDVAPAKTSKKDKKKRKKQQEQRLEELEQQERRISVEEPATEEISPEGNTLDVVLSKEELPDSNEEPTTAGEDASLTRLHRGSTRKKKQKKRQSLSSEIDPTSHMEIQQPKEDKDSKDESIIASEGGQMIESDAPTPAPMTVTEDDKTDDFKSTKNLDVEPEPGPESSDSANVIPIETPAESEAPLFKVADEADVVQEPTTEVDATISNDRSSVPQDEAQLEDSSSLTPGKKGRKNKKKRKSISALEPDTEPGVLVVPDDEQQTEQRVESNQLEPVAEQSDPSTDIHKPGVDILGDISVSPQENNADVATVSRSPDMGKVAESDGELVNKSLPETTILVEDITAEDVPVNPSSDDTTQQVSSETDQIVGLALGTEVADNSEVPQADKEVGESKVTVPEAKDEGGPAFSKKSKKDKKKKKRASQVSWETEPQAEIGESVEQEQQSEQAWIEELSQDPKGDRKDSEQAQMTGDTVSEFTSDEGPKEKRQSQIDWEPEPSSEKLTEEPLPLPPPEQEHSTGGLLDNQSLAEDNETSFQQSENLDDASAEANLDKKSKKKKKKKKASQFDWEAESSTPIPTQSPADLPFVKQTADEEALITDATLEPSVERGTNREVFEQPIDQLAPPTNEPVKSLVETQTEQEATESSPISEGVLRKKSKKEKRKTKKESGSQTIDTGPPLETPLETPLLATDEEVKPVENMPPPESLPAASITSPSRGTQDLEPPEGQTKEDALTEQPESTPGAELGPLPTIEPSEQTAVGDSRGRDSGDAAVQVHDDAKHISRSNEPFPLQPETPADTVDNEEEATLRSIDPSEKDDEFEVPMKKSKKAKKAAKKAQTIQTPDIEMNMDSATNLQSWDWSNIDNEPQADVISPNAQRSTPFDSGDRVDLDQGPSVDNTQLAHAPNDQYSLEPNESRTEGFEISSSSKSSKKDKKKKKKGSAQVETELETGETSLSKTREIDDDTQDKAPTGPSAQEAVTEDLQEDEWASFGKRKSKKDKKNRQRLSVTDTLLDTTVIEAAKRTISEDNVDSSKQSFQGELISDTTARPQTPLNIHQVSVRTDLSPAQLSSHIEHDRPFDQSTQPGKKLRTQPAEDETTIPVQVPTYVQERTPEKGLDVASESLEYVPTEPDSTGIRDLSTPLNENLQNASHTHDVKEASLLQYSIDAPAETKKKKNGTAAAEEVGKNIESTPFIDTIGVSSTAEKPTQGKKGKNKKKSKLSDKKLTSEDDIFDDPALWESSERKPLEGSRLDVSSEDFWTGPQNEMEGQQVEMPDEIAPTITSKKEQHDNKPSSGDDFIDIESPVVGREVIHEMPRTEQTERISHEPRAAEVSNMLDEWDSLDTWEQSEEHDRPLGPTTQENTSIIPSLPMPQTPSYGRSSPRNLPPVEEETNEELEKALQPEPQEKSRENRDSGFVTDSPNPQRHSLGLGDDAGQRDSGVHLRDWTENTPSHNEKEIDTQGARSWDRGQARTPGVSERRSRRSLFDSQTPKLETPTRDREGVREASPEKRRKEETTIQASTPAKTQRTSKYPDLGPSSASNLSTPIAKPRSVSDNTGDTNNETIAARRSASNTSLSRLRTPEPHRFRPESPGSIISLRSSGTNTPPLRRVGRQISGDLRSLSSHQQGPSHSATAKDSAPAAAKDKDLATAAGAIAAIASTSIAAAAADRRGQQHSTTSSTTPVANEGRVRAKDMTDVYDGYGEGRIGSPRSPTRPQSMRRRQSMQVLELENRVEQLLAENRALSDARAQSEQSLNQRNTSAITERDAEIESLKASLQWLRTEVTRLTEVNEGLQSANSLLAMQHNDKYGRLESQHASAARELEEHRGARGQYTQTLQDKDAEIQDLRTQLEALKEQIRDMQKQILATKPPDADFLRLKDEDHFDDRCRQLCSHVQQWVLRFSKFSDMRACRLTSEINDEKIIDRLDNTVLDGSDVDDYLSDRVRRRDIFMSMTMNMIWEFVFTRYLFGMDREQRQKLKSLEKLLTEVGPPQAVRQWRAVTLTLLSKRPAFGNQRNQDTEAVVQAVLQTLSMILPPPSNLEGQIQSQLRRVMREAVDLSIEMRTQRAEYMMLPPLQPEYDANGELTQTVTFNAALMNERSGDKNTTNEAYEAQGAIVRCVLFPLVVKKGDDNGVGDDEIVVCPAQVLVARARPSTIRMVTPSSEAGGVPLSRGATPSAYGQSTTSVNMTDAPLTPEYI

SEQ ID NO: 8883 - DNA, 17044 bp, Muscodor strobelii; identical to SEQ ID NO: 8880
  misc_feature: SGI EST ID NO. CUFF.21985.0
  misc_feature: Variant of the nucleotide sequence at SEQ ID NO 8881

SEQ ID NO: 8884 - DNA, 1353 bp, Muscodor strobelii
  misc_feature: SGI cDNA ID NO. 562754
  misc_feature: Encodes the peptide sequence at SEQ ID NO 8885
atgacgtatcggcactcgcctctgagggaaggctggattcggctgctcaaaccccatcaatctcaggacgaagatatactcacgttcacgatccaagaatatccgcgatgcgatgcaccgtcttataccgcgctctcttatgcctggggtagcgaagagccgacagagagtatatctctgaacagcctttgttttcgcattacagctaacctgggatcctgtcttaatgcattgattagcgcatcacctattcgtcgatgggatcacatctgggtcgacgccgtctgtatcgatcagaacaattacgaggaacgaaatgagcaagttagggatatggacaagacgtacgcagaagctgcatgtgtgtccatatggctgggcaacccatcgcctgaatatctagatcgtggggctttcaagtgggaagatgtggctgagcagctcctgcaagcagactactggtcccggcgctggattatccaggagctactgcttgcaagggctgtagatattcattacgggaaacaacgtattagttgggataaatttgatgcgatcatacgccatgtggtgtcgtacagagttgcgctttacctaggagccctgtacgaggatggaggatcgctatcacagagaatcctaggatacactatgcagattgtttccgataggtattggagagttgaagtacctcctggagaaaaaggagactatgccgacacggacagcaggtacactgcgatgcctcttatctacatgcgcgggcagcaacagttccttacaaaagctcggaagggaccatctttacgcacacttctcatggcattttgtcgatacgaatgtcaagatccccgagaccgtgtcttcgccctccttggccttctcccgaaacaagaaagagatcgcctgtccgagtacttcccggattattcactcaccaccgaccaagtcataataattatcttggcccatctgcgacactggtccggctacgtggatcctgtcaggatcgagaacgacaagctattccacgggttaggcatcgggtctcagagccatacgacatatctagagcttgcggacgcgtttcactactttaagctgctaccgcgatctcccgtgaccatagggcgctggattaaaaggattgtggtcgtcttcatcgtcagctatatgattactgtcgcgtactggacgctccacgagtttcctttgttgtggcaacagtgcattctggggaaaataagttgcaacggtaccgaaacttctatggtaaagaatgagaccataagcccagaagttgtcgcccatgttcgaaatcaccctgtggttgagagaagggtccgtcgatga

SEQ ID NO: 8885 - protein, 450 aa, Muscodor strobelii
  misc_feature: SGI Peptide ID NO. 562754
  misc_feature (42)..(162): Pfam Id: PF06985 Pfam Desc: Heterokaryon incompatibility protein (HET)
  misc_feature (90)..(162): Pfam Id: PF06985 Pfam Desc: Heterokaryon incompatibility protein (HET)
  misc_feature (2)..(325): NCBI GI: 238504460 Blast Desc: conserved [Aspergillus flavus NRRL3357] gi|220690932|gb|EED47281.1| conserved [Aspergillus flavus NRRL3357]
  misc_feature (2)..(325): NCBI GI: 169764315 Blast Desc: [Aspergillus oryzae RIB40] gi|83764483|dbj|BAE54627.1| protein product [Aspergillus oryzae]
  misc_feature (4)..(325): NCBI GI: 168042194 Blast Desc: [Physcomitrella patens subsp. patens] gi|162675113|gb|EDQ61612.1| [Physcomitrella patens subsp. patens]
  misc_feature (2)..(325): NCBI GI: 256723655 Blast Desc: NECHADRAFT_52103 [Nectria haematococca mpVI 77-13-4]
  misc_feature (42)..(339): NCBI GI: 46139107 Blast Desc: FG11068.1 [Gibberella zeae PH-1]
  misc_feature (3)..(330): NCBI GI: 256727241 Blast Desc: NECHADRAFT_75911 [Nectria haematococca mpVI 77-13-4]
  misc_feature (8)..(317): NCBI GI: 256726476 Blast Desc: NECHADRAFT_79724 [Nectria haematococca mpVI 77-13-4]
  misc_feature (2)..(183): NCBI GI: 169604370 Blast Desc: SNOG_05197 [Phaeosphaeria nodorum SN15] gi|111066468|gb|EAT87588.1| SNOG_05197 [Phaeosphaeria nodorum SN15]
  misc_feature (3)..(311): NCBI GI: 145246240 Blast Desc: An12g02900 [Aspergillus niger] gi|134080083|emb|CAK41129.1| protein product [Aspergillus niger]
  misc_feature (13)..(299): NCBI GI: 154317033 Blast Desc: BC1G_03934 [Botryotinia fuckeliana B05.10] gi|150845546|gb|EDN20739.1| BC1G_03934 [Botryotinia fuckeliana B05.10]
MTYRHSPLREGWIRLLKPHQSQDEDILTFTIQEYPRCDAPSYTALSYAWGSEEPTESISLNSLCFRITANLGSCLNALISASPIRRWDHIWVDAVCIDQNNYEERNEQVRDMDKTYAEAACVSIWLGNPSPEYLDRGAFKWEDVAEQLLQADYWSRRWIIQELLLARAVDIHYGKQRISWDKFDAIIRHVVSYRVALYLGALYEDGGSLSQRILGYTMQIVSDRYWRVEVPPGEKGDYADTDSRYTAMPLIYMRGQQQFLTKARKGPSLRTLLMAFCRYECQDPRDRVFALLGLLPKQERDRLSEYFPDYSLTTDQVIIIILAHLRHWSGYVDPVRIENDKLFHGLGIGSQSHTTYLELADAFHYFKLLPRSPVTIGRWIKRIVVVFIVSYMITVAYWTLHEFPLLWQQCILGKISCNGTETSMVKNETISPEVVAHVRNHPVVERRVRR

SEQ ID NO: 8886 - DNA, 281 bp, Muscodor strobelii
  misc_feature: SGI EST ID NO. CUFF.21268.0
  misc_feature: Variant of the nucleotide sequence at SEQ ID NO 8884
attgatgatagtcgaaatctgtggataatcgatgtgctttccagtgctctatccgcgcgtatgacgtatcggcactcgcctctgagggaaggctggattcggctgctcaaaccccatcaatctcaggacgaagatatactcacgttcacgatccaagaatatccgcgatgcgatgcaccgtcttataccgcgctctcttatgcctggggtagcgaagagccgacagagagtatatctctgaacagcctttgttttcgcattacagctaacctgggatcctg

SEQ ID NO: 8887 - DNA, 2556 bp, Muscodor strobelii
  misc_feature: SGI cDNA ID NO. 562755
  misc_feature: Encodes the peptide sequence at SEQ ID NO 8888
atgcaggtgaacatggattccacagccccagtagcggccaatgccgccggtggcagagaagccggggtagcttcacggccgagtttgcaggccaccaaaccaatccgcaggcgcaaccgcatgatcaattcctgtttggagtgtagaaaacgcaaactcaagtgcagcaagacatcgccaacatgtaccaattgcgacaaggcgacgcgggaatgcctgtacattgggccacgcctggatgaggctagccaaatgcgtctcgctgagattaaagagaaacaggggacgttggagcgccaactggagcgcgatgtggccaaatcgacaacgtccaaaagtacattgcaacagcgcatcctcgccgatgaggtagaggatgactatgatgatggacgcgacttggaagctacgccccttgttgcattagatctcacctatgaggatgatgcagacggtggtgccgacgacatgattgatctcggcattcagattgggaagatgcgaatcacggagagaataggcggtctttcgaggccacgcatagccgaagagatatcagcgggtattgggcaacgctcgggagcccagccgcccccgccgtttgaggcagctgacattccagatggcatgtcagatgcctccttgccagagtttttgaagccatcaaaccagtacatcgtaccgacgagtgggttcttctttggtcaagttggcgatgtaccagatatggtgcaaatgctacctacccccttcgttgccgaccgactcatgatgcagtatttcaatgcggtccatccaatcgctccctgttcgcatcgaccgtcactagagagagcatatgctacattctgggaacaaatttccgcaggctacgaaccgcgcccttcggtgatggccatcatttttgcagctatgttcagtgccgttaccagcatgcatgaagatacggtgtaccacgaattagcacatcccaaagcgaactatatgcacagtctcaaaatgggcaccgagacagcgcttagcaaagctagtttccttcggactacgagcatcgagacgatgcaggctttcatcatatacatgattcccctctgcaaggctgaagtatcgcgtgctcactcagttcttgtaggagcagccgtgcgaatggcagaatgcatggggttgcatcgtgacggcgaggcctacggactgacaccgatagagactcatggacccaaacccgttattcgacgggatgattatgacacaaaactaccattgaactgcacggaagaggatttagcgagggctgcttcaggagcaacgctagagccatctgatgcctggacaactaatactttgcccctaattcggtttgagattaacgaaatgatgcgtatcatatgggtagacaggcgccgtttagaactgcggcgcacgacgctgacacttgtgctaacaaagatcgagaactttcgccgtcgaatgtcagagaagtacgatcacttactggatgtgtctattccagtgcaacgatatgccaaatgtgtcatgtatttattgacatatcgcctgcacatcatggtgttacacccctattatgccaacgcggcaaatccgatgcccccgcgactaagccatttactgataacatcaagtataatggtctgcgagctcgcgatccagctcgagacgaacccgctatttcaggactgggcgtggtatctaggtgcttttttccagtaccagagtgccttactactggcaacggaagtttactttcgccctcagagccgagaggcagaccgcatctggtcctgtcttgactacgtatttggttttgatcgcaagctacctccagaaaccaaatgcgtgcagcttctgagcgagatctcggcacgtaccgccgtgtatatgaagatgcggaagacgcgtggcccgagtgcacaagcacgagcgccagtctcgtctaacgccgtggcggggacgagtcctccgacaccagttacccagactgctcgaaacctgcaacaaccacaggcagtccctcgtcaacaccagcaatcccattcagctcatatttcccacctgcagcaaacgatgcctccacccatggcgccgagtcagataccatcaggaaaccgagcgccaaatgtgaacggcatcaagccaccggaccagaactacgtccatcagcagcacccagggccacctagcgggccttctggtataataccacaacctcagatggtatttgccggtgtggcagatggtcacgcactctggggtttaccaccagcagtcgccggaagccctcatggaagcgattcttcgagtatcgcgccccatatgcacggcagcataccagacgcaggtggcggaggtggacacagtagtgcagttccgggaacggcgggaaatcctggcgctccggttatgtcccagagtaacattatggataacattgattgggacacaatcaacacgctcttcccgcaagacactcagacaggtgagctcataatacagggatatcacgatccaaacttcggagtcatgaactggaacaactag

SEQ ID NO: 8888 - protein, 851 aa, Muscodor strobelii
  misc_feature: SGI Peptide ID NO. 562755
  misc_feature (43)..(82): Pfam Id: PF00172 Pfam Desc: Fungal Zn(2)-Cys(6) binuclear cluster domain
  misc_feature (347)..(402): Pfam Id: PF04082 Pfam Desc: Fungal specific transcription factor domain
  misc_feature (33)..(824): NCBI GI: 171696106 Blast Desc: protein product [Podospora anserina] gi|170948295|emb|CAP60459.1| protein product [Podospora anserina]
  misc_feature (33)..(851): NCBI GI: 145613459 Blast Desc: MGG_01624 [Magnaporthe grisea 70-15] gi|145020527|gb|EDK04656.1| MGG_01624 [Magnaporthe grisea 70-15]
  misc_feature (33)..(654): NCBI GI: 116181726 Blast Desc: CHGG_01491 [Chaetomium globosum CBS 148.51] gi|88185788|gb|EAQ93256.1| CHGG_01491 [Chaetomium globosum CBS 148.51]
  misc_feature (133)..(654): NCBI GI: 85112084 Blast Desc: NCU02768 [Neurospora crassa OR74A] gi|28926038|gb|EAA35027.1| [Neurospora crassa OR74A]
  misc_feature (129)..(668): NCBI GI: 154297628 Blast Desc: BC1G_12659 [Botryotinia fuckeliana B05.10] gi|150858482|gb|EDN33674.1| BC1G_12659 [Botryotinia fuckeliana B05.10]
  misc_feature (35)..(844): NCBI GI: 119193384 Blast Desc: CIMG_01069 [Coccidioides immitis RS]
  misc_feature (35)..(700): NCBI GI: 240275778 Blast Desc: fungal specific transcription factor [Ajellomyces capsulatus H143]
  misc_feature (35)..(829): NCBI GI: 240105729 Blast Desc: Fungal specific transcription factor, [Coccidioides posadasii C735 delta SOWgp]
  misc_feature (35)..(700): NCBI GI: 225563198 Blast Desc: fungal specific transcription factor domain-containing protein [Ajellomyces capsulatus G186AR]
  misc_feature (35)..(700): NCBI GI: 154281649 Blast Desc: [Ajellomyces capsulatus NAm1] gi|150411816|gb|EDN07204.1| [Ajellomyces capsulatus NAm1]
MQVNMDSTAPVAANAAGGREAGVASRPSLQATKPIRRRNRMINSCLECRKRKLKCSKTSPTCTNCDKATRECLYIGPRLDEASQMRLAEIKEKQGTLERQLERDVAKSTTSKSTLQQRILADEVEDDYDDGRDLEATPLVALDLTYEDDADGGADDMIDLGIQIGKMRITERIGGLSRPRIAEEISAGIGQRSGAQPPPPFEAADIPDGMSDASLPEFLKPSNQYIVPTSGFFFGQVGDVPDMVQMLPTPFVADRLMMQYFNAVHPIAPCSHRPSLERAYATFWEQISAGYEPRPSVMAIIFAAMFSAVTSMHEDTVYHELAHPKANYMHSLKMGTETALSKASFLRTTSIETMQAFIIYMIPLCKAEVSRAHSVLVGAAVRMAECMGLHRDGEAYGLTPIETHGPKPVIRRDDYDTKLPLNCTEEDLARAASGATLEPSDAWTTNTLPLIRFEINEMMRIIWVDRRRLELRRTTLTLVLTKIENFRRRMSEKYDHLLDVSIPVQRYAKCVMYLLTYRLHIMVLHPYYANAANPMPPRLSHLLITSSIMVCELAIQLETNPLFQDWAWYLGAFFQYQSALLLATEVYFRPQSREADRIWSCLDYVFGFDRKLPPETKCVQLLSEISARTAVYMKMRKTRGPSAQARAPVSSNAVAGTSPPTPVTQTARNLQQPQAVPRQHQQSHSAHISHLQQTMPPPMAPSQIPSGNRAPNVNGIKPPDQNYVHQQHPGPPSGPSGIIPQPQMVFAGVADGHALWGLPPAVAGSPHGSDSSSIAPHMHGSIPDAGGGGGHSSAVPGTAGNPGAPVMSQSNIMDNIDWDTINTLFPQDTQTGELIIQGYHDPNFGVMNWNN

SEQ ID NO: 8889 - DNA, 4918 bp, Muscodor strobelii
  misc_feature: SGI EST ID NO. CUFF.21272.0
  misc_feature: Variant of the nucleotide sequence at SEQ ID NO 8887
ggataggatagccctggcaagaagcaagcaagggaatcgatggtatcacctctcggcgtacctcatcgacgagtaacagtaaccatccagggtattgatgcacgtatttggcagcaagcttacttggtaggcgctccttaatccattggccgtccgcatcgctggtatttatcatattttaagatctatataattggaatcgcacagcgccttgcatgcctccctcttcctgccgcgctcatcctgtacacgtttacgcccgtattgaaccagcccaggccaccctctcaacagtattcaacatattcattggttaggctgcgagctagggtcctgcgactctcattcttgtcggtaccggtgccttgggtcggcggactcagatctgggcggtagcgagatctgtatttccctacagcgtagcatggtcgatgaggggcggccaagggaggaaggaacctatgggaaccagtagcgataaacatctatctcccaacccaaaccccatcgctcggtgagccaggcacctcggtacgcagatcaacggcacgggcgcaacagcaagccggtgaagaaatagcggaacacggaattgaggcgtgcatcacttgatcgccgcccccgaatagcagcgatgcaggtgaacatggattccacagccccagtagcggccaatgccgccggtggcagagaagccggggtagcttcacggccgagtttgcaggccaccaaaccaatccgcaggcgcaaccgcatgatcaattcctgtttggagtgtagaaaacgcaaactcaagtgcagcaagacatcgccaacatgtaccaattgcgacaaggcgacgcgggaatgcctgtacattgggccacgcctggatgaggctagccaaatgcgtctcgctgagattaaagagaaacaggggacgttggagcgccaactggagcgcgatgtggccaaatcgacaacgtccaaaagtacattgcaacagcgcatcctcgccgatgaggtagaggatgactatgatgatggacgcgacttggaagctacgccccttgttgcattagatctcacctatgaggatgatgcagacggtggtgccgacgacatgattgatctcggcattcagattgggaagatgcgaatcacggagagaataggcggtctttcgaggccacgcatagccgaagaggtcagctaacttcaaaatgcgcgtgtattgtgtaagaaatgatcgtgatttgactgagatctgtagatatcagcgggtattgggcaacgctcgggagcccagccgcccccgccgtttgaggcagctgacattccagatggcatgtcagatgcctccttgccagagtttttgaagccatcaaaccagtacatcgtaccgacgagtgggttcttctttggtcaagttggcgatgtaccagatatggtgcaaatgctacctacccccttcgttgccgaccgactcatgatgcagtatttcaatgcggtccatccaatcgctccctgttcgcatcgaccgtcactagagagagcatatgctacattctgggaacaaatttccgcaggctacgaaccgcgcccttcggtgatggccatcatttttgcagctatgttcagtgccgttaccagcatgcatgaagatacggtgtaccacgaattagcacatcccaaagcgaactatatgcacagtctcaaaatgggcaccgagacagcgcttagcaaagctagtttccttcggactacgagcatcgagacgatgcaggctttcatcatatacatgattcccctctgcaaggctgaagtatcgcgtgctcactcagttcttgtaggagcagccgtgcgaatggcagaatgcatggggttgcatcgtgacggcgaggcctacggactgacaccgatagagactcatgtgcggcgtcttgtatggcaccaattatgcttccttgatatccggacatgcgaagcacagggacccaaacccgttattcgacgggatgattatgacacaaaactaccattgaactgcacggaagaggatttagcgagggctgcttcaggagcaacgctagagccatctgatgcctggacaactaatactttgcccctaattcggtttgagattaacgaaatgatgcgtatcatatgggtagacaggcgccgtttagaactgcggcgcacgacgctgacacttgtgctaacaaagatcgagaactttcgccgtcgaatgtcagagaagtacgatcacttactggatgtgtctattccagtgcaacgatatgccaaatgtgtcatgtatttattgacatatcgcctgcacatcatggtgttacacccctattatgccaacgcggcaaatccgatgcccccgcgactaagccatttactgataacatcaagtataatggtctgcgagctcgcgatccagctcgagacgaacccgctatttcaggactgggcgtggtatctaggtgcttttttccagtaccagagtgccttactactggcaacggaagtttactttcgccctcagagccgagaggcagaccgcatctggtcctgtcttgactacgtatttggttttgatcgcaagctacctccagaaaccaaatgcgtgcagcttctgagcgagatctcggcacgtaccgccgtgtatatgaagatgcggaagacgcgtggcccgagtgcacaagcacgagcgccagtctcgtctaacgccgtggcggggacgagtcctccgacaccagttacccagactgctcgaaacctgcaacaaccacaggcagtccctcgtcaacaccagcaatcccattcagctcatatttcccacctgcagcaaacgatgcctccacccatggcgccgagtcagataccatcaggaaaccgagcgccaaatgtgaacggcatcaagccaccggaccagaactacgtccatcagcagcacccagggccacctagcgggccttctggtataataccacaacctcagatggtatttgccggtgtggcagatggtcacgcactctggggtttaccaccagcagtcgccggaagccctcatggaagcgattcttcgagtatcgcgccccatatgcacggcagcataccagacgcaggtggcggaggtggacacagtagtgcagttccgggaacggcgggaaatcctggcgctccggttatgtcccagagtaacattatggataacattgattgggacacaatcaacacgctcttcccgcaagacactcagacaggtgagctcataatacagggatatcacgatccaaacttcggagtcatgaactggaacaactagagcatgcttaatggtacttgctctcgccccttgctacaaccttcgcttctacggttgacgtatcgtccgcggactttatcttcgcttctttctatcctcgcgctattaagctagcgaacttgctgtttctctttcacgattcggtgtcgtccggcgatctataaccggcttattttcgagctatggcgactggctatgtttcatccatcttcttcaccgcagtacgatgcacagcgagatgttgcgagctcattttcatttgctttcctgtgcgggggatgagctgaacagacttgctttgatggacaggctatgggtttgtaataggcttgatcggactttctacgtattgtggggttttcgtcagagtaggttatgtgtgttagaatggggtttgggggtttgggtgctccggggatgatagacgtgtctttcacctcctaatcagttgaaataatgactaggagctcttacgacgtaatgatcttgccctgctttgcatgcttatgcctccatcgccgcccttgtcatcgacggacccttctctcaaccacagggtgatttcgaacatgggcgacaacttctgggcttatggtctcattctttaccatagaagtttcggtaccgttgcaacttattttccccagaatgcactgttgccacaacaaaggaaactcgtggagcgtccagtacgcgacagtaatcatatagctgacgatgaagacgaccacaatccttttaatccagcgccctatggtcacgggagatcgcggtagcagcttaaagtagtgaaacgcgtccgcaagctctagatatgtcgtatggctctgagacccgatgcctaacccgtggaatagcttgtcgttctcgatcctgacaggatccacgtagccggaccagtgtcgcagatgggccaagataattattatgacttggtcggtggtgagtgaataatccgggaagtactcggacaggcgatctctttcttgtttcgggagaaggccaaggagggcgaagacacggtctcggggatcttgacattcgtatcgacaaaatgccatgagaagtgtgcgtaaagatggtcccttccgagcttttgtaaggaactgttgctgcccgcgcatgtagataagaggcatcgcagtgtacctgctgtccgtgtcggcatagtctcctttttctccaggaggtacttcaactctccaatacctatcggaaacaatctgcatagtgtatcctaggattctctgtgatagcgatcctccatcctcgtacagggctcctaggtaaagcgcaactctgtacgacaccacatggcgtatgatcgcatcaaatttatcccaactaatacgttgtttcccgtaatgaatatctacagcccttgcaagcagtagctcctggataatccagcgccgggaccagtagtctgcttgcaggagctgctcagccacatcttcccacttgaaagccccacgatctagatattcaggcgatgggttgcccagccatatggacacacatgcagcttctgcgtacgtcttgtccatatccctaacttgctcatttcgttcctcgtaattgttctgatcgatacagacggcg

SEQ ID NO: 8890 - DNA, 2253 bp, Muscodor strobelii
  misc_feature: SGI cDNA ID NO. 562756
  misc_feature: Encodes the peptide sequence at SEQ ID NO 8891
atgtccctatcgccaacctcgcaatgctgccgcgcagctcgtcgtcgcgtgcggccggcatcccacccccgatcccgccatgacgccgtctggatcaccgatagcctgctctatgtggccatcgaccgctatctggccgtctccccagccgccgcccgctgccatgtccgccacggctctcacgtccccggtcccatggagcagcggaagcgcatggccaagaggcacatgggcgagcttcacttcggccattctcacgcctctccgcctatctgggagcttgctaatctggtcgatctcactcaatggaaatggaagccaccggcatcctcccccctgagaacgccatctgcgccgccgtcgctcagacgatcgctcgcagccttcgtcttacacgccctcaacgccatgttcccgtccatcttctcggctttggaatcgccctcgccctcgggtcctcctcacgcaaacagcacccgcatcctcgacactatacgcacccattccggttctgccaccatcgatcaggctcccacctcgcgacctgtcgactcggatctactgcccctgggagttgcgctagagggtgtggctgaaatacctcataccttgggcaataccggatctgcagcgctcggtatggtcgacgcgggcttggccctcttatggactgatatttttgcctccaagcccaccgagccactgttgttcttctcccacgctccagcatcagggcatgtgtccaaggctcagatgcatctgttcaccgaattctgcgctagctggaagagtgcgctagccgagggccgtttccgtggccatgtcgtctgtcagatcctcaacgggctcatccccggtatgagaggctatggccgtgcccaacacctctttgctgaggccaccatcaagggtctcgcgcagcggcaggcttcgggatcggcatcctttgaccatgtggcgtggaacggctttctgcataatgtcgcagcagtggaggtagatgctcttagcctctgcacgcacgtattgaaccacatccctgttcagcatcttgccgctctttcctccggcatcctgacctgcttggaggattccttcgtcgccctttcacaatctacctctgccaggcatgtagatgtagctgctcaacaggacgccaagatattcgtgtgggggccccaaacccatcgcatcttgcctgacattacacgcagggtgcataagtttgcaacgctcaaatttgcaacggcctgggctggcgaccaccatggcaaagactaccgacggcttcgattcagttggttacagtgtatggctcgtctacccgacgtcgatgatgcctatctggcacagacatgcctcattttggaagctccatatgctgctatccctccccttacgcagaaagacatttgccatctattcctgacttgggcgaatagccagagtcctcttgcccaaagtagatccctcttttcctactgtcgcaagggtaaagagggcgggactttccaacgcgctagtaagcttctttggaagacagagcagttctaccgggtcaaggcgtttgctcgctttttgaatcttgttcatagacagcaacatgtatacaagtttctaagattcgtctgtgacatggaccaggaaaaagaacgatcctttcgtcacttggcgcatctggcattagacatggaccgaccacagacagctatcgacattctttgcctagaggaagctaaaaagcagtccgaaaagtctgcggctgcaaatatctggaccactgcatacggcatcgaggcactcgaacgtttgatctggactccgcgcttcgctcaccatcgcatctggcatgctttcaacatcttcccacgggatcgacgtcggagacgtcgacggaacctgacgccagaggaaatctcgcgaacagcagcaatagcagtcgttatgggttcgtcgccacacgtcagcaagcgccaagccttcgaattgatggtttactgctatagatattacgtgtcctatggcacccgtctgcccaaatatttcttgcggaatttcttcaacgttgccgccaggcatatggtagacgccgagccgggcattacccagcgactcaattatgccctccgtatcgtcaataatcatgcaggcactgaaaaagcctctcggattgcggcacttattgcacgacacagagataacatgaagctggccgagtctcgtcatccatcgataccgaagcactcgtattaa

SEQ ID NO: 8891 - protein, 750 aa, Muscodor strobelii
  misc_feature: SGI Peptide ID NO. 562756
  misc_feature (5)..(114): NCBI GI: 116181728 Blast Desc: CHGG_01492 [Chaetomium globosum CBS 148.51] gi|88185789|gb|EAQ93257.1| CHGG_01492 [Chaetomium globosum CBS 148.51]
  misc_feature (1)..(136): NCBI GI: 261355958 Blast Desc: conserved [Verticillium albo-atrum VaMs.102]
  misc_feature (300)..(728): NCBI GI: 261355958 Blast Desc: conserved [Verticillium albo-atrum VaMs.102]
  misc_feature (41)..(118): NCBI GI: 39951961 Blast Desc: MGG_01623 [Magnaporthe grisea 70-15] gi|145020528|gb|EDK04657.1| MGG_01623 [Magnaporthe grisea 70-15]
  misc_feature (28)..(109): NCBI GI: 46108336 Blast Desc: FG01050.1 [Gibberella zeae PH-1]
  misc_feature (417)..(721): NCBI GI: 116181728 Blast Desc: CHGG_01492 [Chaetomium globosum CBS 148.51] gi|88185789|gb|EAQ93257.1| CHGG_01492 [Chaetomium globosum CBS 148.51]
  misc_feature (62)..(111): NCBI GI: 85112088 Blast Desc: NCU02770 [Neurospora crassa OR74A] gi|28926040|gb|EAA35029.1| [Neurospora crassa OR74A]
  misc_feature (7)..(129): NCBI GI: 240105725 Blast Desc: CPC735_052880 [Coccidioides posadasii C735 delta SOWgp]
  misc_feature (21)..(110): NCBI GI: 171696108 Blast Desc: protein product [Podospora anserina] gi|170948296|emb|CAP60460.1| protein product [Podospora anserina]
MSLSPTSQCCRAARRRVRPASHPRSRHDAVWITDSLLYVAIDRYLAVSPAAARCHVRHGSHVPGPMEQRKRMAKRHMGELHFGHSHASPPIWELANLVDLTQWKWKPPASSPLRTPSAPPSLRRSLAAFVLHALNAMFPSIFSALESPSPSGPPHANSTRILDTIRTHSGSATIDQAPTSRPVDSDLLPLGVALEGVAEIPHTLGNTGSAALGMVDAGLALLWTDIFASKPTEPLLFFSHAPASGHVSKAQMHLFTEFCASWKSALAEGRFRGHVVCQILNGLIPGMRGYGRAQHLFAEATIKGLAQRQASGSASFDHVAWNGFLHNVAAVEVDALSLCTHVLNHIPVQHLAALSSGILTCLEDSFVALSQSTSARHVDVAAQQDAKIFVWGPQTHRILPDITRRVHKFATLKFATAWAGDHHGKDYRRLRFSWLQCMARLPDVDDAYLAQTCLILEAPYAAIPPLTQKDICHLFLTWANSQSPLAQSRSLFSYCRKGKEGGTFQRASKLLWKTEQFYRVKAFARFLNLVHRQQHVYKFLRFVCDMDQEKERSFRHLAHLALDMDRPQTAIDILCLEEAKKQSEKSAAANIWTTAYGIEALERLIWTPRFAHHRIWHAFNIFPRDRRRRRRRNLTPEEISRTAAIAVVMGSSPHVSKRQAFELMVYCYRYYVSYGTRLPKYFLRNFFNVAARHMVDAEPGITQRLNYALRIVNNHAGTEKASRIAALIARHRDNMKLAESRHPSIPKHSY

SEQ ID NO: 8892 - DNA, 6472 bp, Muscodor strobelii
  misc_feature: SGI EST ID NO. CUFF.21377.2
  misc_feature: Variant of the nucleotide sequence at SEQ ID NO 8890
gcaaggtattccccaaggctcaattttgtcctcgactttgtgcaattatttctatgcagaccttgagacacaggtcctgccctttctcaactctgacgattgcctcttactccggctcatcgacgactttctcctcataactacggataaggacaaggctgcacagtttgtcaacgttctacaccatggcatcccagaatacggtgtgacggtcaaccctaagaagactcttgtcagtttcaatctagctgtcgaagaccaatcgataagtgaaataaagggcgaaaagcagttcccttactgcggtctgttgatagatattaagacacttgatatatcaagacctgcgcatcaagacggtgataaggcgatatacaactcacttactgtcgagttcaatcgaacaccaggcaagacgtttcaacgcaaagtcctcaatgcgttcaagatacaaagccacctcatgttctacgacacaggtctcaactcatcaaccaccatgctccagaacgttttcaaggcattcactacaaccgctaccaagatgtgggcgtatgcacgatgtttaccggcaccgaagcaaccacccgctcagcttataatccggaccatctccagactagtcgacacagcatacctactactcataagcaagacgcgcagattgcgctaccctggctacgtgtgcgatgtccagaaatgcgagatagcctggctggcctacaacgcgttctacaaaacgctcgctcgtagacagtccaagtatagcgagaccctctcctggctgaaactagaaatagataaattagccgcaacgaagggtgtatggtgtggccgcgtacgaaaggtcgtgtaagttgcacctgcaccgagcgggtgtatgctttgttcaactagggtcatatagttgcgaatcggaggatgattcgtcgctcatgcactcgcggcatgttgtaaatctgtattgtgagataggttttgcaaaatggatggatatgtgactcatttttgtcgtccgtttgcgcttctatcacttcgaagtttgggattctataaatttccctttcaggcatgtcgtatacaccaacttcgtggtccatagatccacttcacttactcgatcgatcgcgcccaaatctgccccggctcgtgccgtagtgtcacctacttccctccctcacattaagccgtccctatatcgaaaatgacaaaagtccatatctttgcctcaccgcccgaggcgcttatagcccgtctacgatctcatattccctactctctacctctgattcggcgactgcggttcgcggggtttcccggtggtatcacggagcacacgaagatcctgtgggtttctgatttggcacttgaagatacggagggagatgtagaagatgaaccctttgcggcgggttatttggatttttcccgcggtcccgagacggagctttggatttactcctcgcttgagcgtcgcgtggggacgaatttaaataccgacagcactaatgaagttgggggcgatgaagaatatgacaaggaaatcgcttgcgcagtagccttgcttagagaggtgaagaggcagcaagatgtatacttcgcccccggatctgtacaggcggcagagcgcccgtacccgacgatgctgatcgggaatatgggcgagaacttgcgtaggaggcttgcggggaaggtagtgtttacttacacgggtgtatatgataagtggatgtttgatacggaggctctgcctgatgcgagattatatgaggaaggggagaagaacggctgggtttgggacaaagtacgggagaaggatctaccgttcatgttgagcaggacggagattcaaaggactccacgaacgatgagactcttaccaagcacagcgttgtatgcttctgatggcacacccatagcatgggcattcctaggcccagattcgtcgcttagcagcctacattgcgaggagccttatcggggacagggaatagctaaagcagtggctgtgaagatattgcgagatcacctcaaggactatggtgttgaaggctctaacatgggctgggccgacgtggacccattgaacatccagagtcaggcagtatgcagaggtctcagagctgaagtcaaatggcagatttcatggagtcggctcgacttaaacctgagttttcccgattaggattttgaaggaggttttgaggacaacatagacgtgatacagaaggaaatccgaaatgcagtcatggttcttacaaagaggaccactatactctccttttgtctaaccatgattgcttcagagaaaataccctacatctaacctaaggcacgtcttgttgccctcgtctttagtactctactggctagacaagcgctgtatctcctcaagatagaatttcagatcatctggtttcacgaaaggcgtgacaccatgaccgagattagcaatccatcctcccttgccgccaccaaagcccttgaccatatgactcacggtgtctgctattgactctcttgagccgtacaaaacaccggggtctgcgttaccctggaagacgactttccgatctcccctgaccttgacggcctctgcaggatctaccagccaatctagtcccaccacattgtaccccagattgcacacggaatcgagagactggttggcacctttggggaagacaatcatggggatcacgtccagccccatctccttcaggcggccgggtaggtgcttcgcgatataagccaggtagggttcgctgaagatcttgaaggtggcaggcgagagctcacccgcccacgagtcgaatacttggatcatctacgatatgccaattagttcaagtgacgcttaagtacagcgaagggaaggcgaattgtacctgggctcccgcctgaacctggagggcgagatactcgacacagacctcggtgatcttctgcaggagggcacgtgtctcatcggggtacttgtatatccactttttactctcgacaaacatcttggtgccgccgccttcgaccatgtagcagaacagggtccagggggcaccgcagaagccgatgagggggacgcggccggcgagcttgttgcgggtgagggtgatggccttgtagacgtagtcgagctcggccttgacgtcgacgtgcttgcgcatgacggtggcatactgaccgtcgtcggggctctttagcgggtcggggaaatggggccccttcttgtcaaccatctcgacgaccatgcccatggcctggggcacgacgaggatgtcggagaagatgatggaggcatcgaggagcccgtcgtagcggtcgatgggctgcagggtgatggtcgaggcgaccttggggtcgcggcagcactcgaagaagtcgcggtcgcccttggcctcgtggtactcggggaggtatcggcccgctgctcgccacggcgcgacatgtcagaatatctatcgtagagcaatgtgttgatgctgtgatatataaataccttgcctcatgatccagatgggggctcgttcgacattctgacctacggccgcggctcagctttgccagtggggagtggtgcaattcggggcgacgcaccccaagctgtcctcaggaccaggtcgttcttcatcggcgggaagtcgtgggcagccatggtcagcgagggacgatgctcaaaaatgaaggtgaaaaagctcaagaccgacgagatcgacgatgcctacatgtacatgatctttccggctgccccgcgctctgtcggccgagctgtgacttgcagcccacttgttgcacgcgagaacttctgaagtgggatatgcccctgtcgttactccgttcatgttacccgctacctttgaggtacatctccacatactggtactaccgggtaacatacctcagttggagctcttcgtagctttgggtctaggccataaatttcaagacgtcttcaagtcgagcttcatcccagctgcgatagcactttgtatggcagacgacgtcgaattgagcatagccattgatacccattgtcacccttttccacggtcccaacacctgcattttgttctttcatctccgctgtttcgcatacaatcattttaacattatgatattgtaaataatgacactcgaatccccatgacgcgcgcgcatgtccctatcgccaacctcgcaatgctgccgcgcagctcgtcgtcgcgtgcggccggcatcccacccccgatcccgccatgacgccgtctggatcaccgatagcctgctctatgtggccatcgaccgctatctggccgtctccccagccgccgcccgctgccatgtccgccacggctctcacgtccccggtcccatggagcagcggaagcgcatggccaagaggcacatgggcgagcttcacttcggccattctcacgcctctccgcctatctgggagcttgctaatctggtcgatctcactcaatggaaatggaagccaccggcatcctcccccctgagaacgccatctgcgccgccgtcgctcagacgatcgctcgcagccttcgtcttacacgccctcaacgccatgttcccgtccatcttctcggctttggaatcgccctcgccctcgggtcctcctcacgcaaacagcacccgcatcctcgacactatacgcacccattccggttctgccaccatcgatcaggctcccacctcgcgacctgtcgactcggatctactgcccctgggagttgcgctagagggtgtggctgaaatacctcataccttgggcaataccggatctgcagcgctcggtatggtcgacgcgggcttggccctcttatggactgatatttttgcctccaagcccaccgagccactgttgttcttctcccacgctccagcatcagggcatgtgtccaaggctcagatgcatctgttcaccgaattctgcgctagctggaagagtgcgctagccgagggccgtttccgtggccatgtcgtctgtcagatcctcaacgggctcatccccggtatgagaggctatggccgtgcccaacacctctttgctgaggccaccatcaagggtctcgcgcagcggcaggcttcgggatcggcatcctttgaccatgtggcgtggaacggctttctgcataatgtcgcagcagtggaggtagatgctcttagcctctgcacgcacgtattgaaccacatccctgttcagcatcttgccgctctttcctccggcatcctgacctgcttggaggattccttcgtcgccctttcacaatctacctctgccaggcatgtagatgtagctgctcaacaggacgccaagatattcgtgtgggggccccaaacccatcgcatcttgcctgacattacacgcagggtgcataagtttgcaacgctcaaatttgcaacggcctgggctggcgaccaccatggcaaagactaccgacggcttcgattcagttggttacagtgtatggctcgtctacccgacgtcgatgatgcctatctggcacagacatgcctcattttggaagctccatatgctgctatccctccccttacgcagaaagacatttgccatctattcctgacttgggcgaatagccagagtcctcttgcccaaagtagatccctcttttcctactgtcgcaagggtaaagagggcgggactttccaacgcgctagtaagcttctttggaagacagagcagttctaccgggtcaaggcgtttgctcgctttttgaatcttgttcatagacagcaacatgtatacaagtttctaagattcgtctgtgacatggaccaggaaaaagaacgatcctttcgtcacttggcgcatctggcattagacatggaccgaccacagacagctatcgacattctttgcctagaggaagctaaaaagcagtccgaaaagtctgcggctgcaaatatctggaccactgcatacggcatcgaggcactcgaacgtttgatctggactccgcgcttcgctcaccatcgcatctggcatgctttcaacatcttcccacgggatcgacgtcggagacgtcgacggaacctgacgccagaggaaatctcgcgaacagcagcaatagcagtcgttatgggttcgtcgccacacgtcagcaagcgccaagccttcgaattgatggtttactgctatagatattacgtgtcctatggcacccgtctgcccaaatatttcttgcggaatttcttcaacgttgccgccaggcatatggtagacgccgagccgggcattacccagcgactcaattatgccctccgtatcgtcaataatcatgcaggcactgaaaaagcctctcggattgcggcacttattgcacgacacagagataacatgaagctggccgagtctcgtcatccatcgataccgaagcactcgtattaagtgccatgaaatgtatatatatatgtattgatctaagtagaaaataacacatggctatgtccgaca

SEQ ID NO: 8893 - DNA, 942 bp, Muscodor strobelii
  misc_feature: SGI cDNA ID NO. 562757
  misc_feature: Encodes the peptide sequence at SEQ ID NO 8894
atggctcgtctacccgacgtcgatgatgcctatctggcacagacatgcctcattttggaagctccatatgctgctatccctccccttacgcagaaagacatttgccatctattcctgacttgggcgaatagccagagtcctcttgcccaaagtagatccctcttttcctactgtcgcaagggtaaagagggcgggactttccaacgcgctagtaagcttctttggaagacagagcagttctaccgggtcaaggcgtttgctcgctttttgaatcttgttcatagacagcaacatgtatacaagtttctaagattcgtctgtgacatggaccaggaaaaagaacgatcctttcgtcacttggcgcatctggcattagacatggaccgaccacagacagctatcgacattctttgcctagaggaagctaaaaagcagtccgaaaagtctgcggctgcaaatatctggaccactgcatacggcatcgaggcactcgaacgtttgatctggactccgcgcttcgctcaccatcgcatctggcatgctttcaacatcttcccacgggatcgacgtcggagacgtcgacggaacctgacgccagaggaaatctcgcgaacagcagcaatagcagtcgttatgggttcgtcgccacacgtcagcaagcgccaagccttcgaattgatggtttactgctatagatattacgtgtcctatggcacccgtctgcccaaatatttcttgcggaatttcttcaacgttgccgccaggcatatggtagacgccgagccgggcattacccagcgactcaattatgccctccgtatcgtcaataatcatgcaggcactgaaaaagcctctcggattgcggcacttattgcacgacacagagataacatgaagctggccgagtctcgtcatccatcgataccgaagcactcgtattaa

SEQ ID NO: 8894 - protein, 313 aa, Muscodor strobelii
  misc_feature: SGI Peptide ID NO. 562757
  misc_feature (205)..(291): NCBI GI: 261355958 Blast Desc: conserved [Verticillium albo-atrum VaMs.102]
MARLPDVDDAYLAQTCLILEAPYAAIPPLTQKDICHLFLTWANSQSPLAQSRSLFSYCRKGKEGGTFQRASKLLWKTEQFYRVKAFARFLNLVHRQQHVYKFLRFVCDMDQEKERSFRHLAHLALDMDRPQTAIDILCLEEAKKQSEKSAAANIWTTAYGIEALERLIWTPRFAHHRIWHAFNIFPRDRRRRRRRNLTPEEISRTAAIAVVMGSSPHVSKRQAFELMVYCYRYYVSYGTRLPKYFLRNFFNVAARHMVDAEPGITQRLNYALRIVNNHAGTEKASRIAALIARHRDNMKLAESRHPSIPKHSY

SEQ ID NO: 8895 - DNA, 6472 bp, Muscodor strobelii; identical to SEQ ID NO: 8892
  misc_feature: SGI EST ID NO. CUFF.21377.2
  misc_feature: Variant of the nucleotide sequence at SEQ ID NO 8893

SEQ ID NO: 8896 - DNA, 1101 bp, Muscodor strobelii
  misc_feature: SGI cDNA ID NO. 562758
  misc_feature: Encodes the peptide sequence at SEQ ID NO 8897
atggctgcccacgacttcccgccgatgaagaacgacctggtcctgaggacagcttggggtcagaatgtcgaacgagcccccatctggatcatgaggcaagcgggccgatacctccccgagtaccacgaggccaagggcgaccgcgacttcttcgagtgctgccgcgaccccaaggtcgcctcgaccatcaccctgcagcccatcgaccgctacgacgggctcctcgatgcctccatcatcttctccgacatcctcgtcgtgccccaggccatgggcatggtcgtcgagatggttgacaagaaggggccccatttccccgacccgctaaagagccccgacgacggtcagtatgccaccgtcatgcgcaagcacgtcgacgtcaaggccgagctcgactacgtctacaaggccatcaccctcacccgcaacaagctcgccggccgcgtccccctcatcggcttctgcggtgccccctggaccctgttctgctacatggtcgaaggcggcggcaccaagatgtttgtcgagagtaaaaagtggatatacaagtaccccgatgagacacgtgccctcctgcagaagatcaccgaggtctgtgtcgagtatctcgccctccaggttcaggcgggagcccagatgatccaagtattcgactcgtgggcgggtgagctctcgcctgccaccttcaagatcttcagcgaaccctacctggcttatatcgcgaagcacctacccggccgcctgaaggagatggggctggacgtgatccccatgattgtcttccccaaaggtgccaaccagtctctcgattccgtgtgcaatctggggtacaatgtggtgggactagattggctggtagatcctgcagaggccgtcaaggtcaggggagatcggaaagtcgtcttccagggtaacgcagaccccggtgttttgtacggctcaagagagtcaatagcagacaccgtgagtcatatggtcaagggctttggtggcggcaagggaggatggattgctaatctcggtcatggtgtcacgcctttcgtgaaaccagatgatctgaaattctatcttgaggagatacagcgcttgtctagccagtag

SEQ ID NO: 8897 - protein, 366 aa, Muscodor strobelii
  misc_feature: SGI Peptide ID NO. 562758
  misc_feature (9)..(363): Pfam Id: PF01208 Pfam Desc: Uroporphyrinogen decarboxylase (URO-D)
  misc_feature (4)..(365): NCBI GI: 116181730 Blast Desc: conserved [Chaetomium globosum CBS 148.51] gi|88185790|gb|EAQ93258.1| conserved [Chaetomium globosum CBS 148.51]
  misc_feature (1)..(365): NCBI GI: 171696110 Blast Desc: protein product [Podospora anserina] gi|170948297|emb|CAP60461.1| protein product [Podospora anserina]
  misc_feature (3)..(365): NCBI GI: 164427732 Blast Desc: uroporphyrinogen decarboxylase [Neurospora crassa OR74A] gi|157071862|gb|EAA35030.2| uroporphyrinogen decarboxylase [Neurospora crassa OR74A]
  misc_feature (6)..(365): NCBI GI: 259486354 Blast Desc: TPA: uroporphyrinogen decarboxylase (AFU_orthologue; AFUA_1G05060) [Aspergillus nidulans FGSC A4]
  misc_feature (4)..(364): NCBI GI: 145229089 Blast Desc: An01g04250 [Aspergillus niger] gi|134054952|emb|CAK36961.1| protein product [Aspergillus niger]
  misc_feature (6)..(364): NCBI GI: 121702781 Blast Desc: uroporphyrinogen decarboxylase [Aspergillus clavatus NRRL 1] gi|119397798|gb|EAW08229.1| uroporphyrinogen decarboxylase [Aspergillus clavatus NRRL 1]
  misc_feature (4)..(365): NCBI GI: 115388489 Blast Desc: uroporphyrinogen decarboxylase [Aspergillus terreus NIH2624] gi|114195834|gb|EAU37534.1| uroporphyrinogen decarboxylase [Aspergillus terreus NIH2624]
  misc_feature (6)..(365): NCBI GI: 70990812 Blast Desc: uroporphyrinogen decarboxylase [Aspergillus fumigatus Af293] gi|66847887|gb|EAL88217.1| uroporphyrinogen decarboxylase [Aspergillus fumigatus Af293] gi|159130730|gb|EDP55843.1| A1163]
  misc_feature (6)..(365): NCBI GI: 119496773 Blast Desc: uroporphyrinogen decarboxylase [Neosartorya fischeri NRRL 181] gi|119413322|gb|EAW23263.1| uroporphyrinogen decarboxylase [Neosartorya fischeri NRRL 181]
  misc_feature (4)..(365): NCBI GI: 238486576 Blast Desc: uroporphyrinogen decarboxylase [Aspergillus flavus NRRL3357] gi|220699405|gb|EED55744.1| uroporphyrinogen decarboxylase [Aspergillus flavus NRRL3357]
  misc_feature (5)..(366): SWISSPROT Homolog: EC 4.1.1.37 Uroporphyrinogen decarboxylase
MAAHDFPPMKNDLVLRTAWGQNVERAPIWIMRQAGRYLPEYHEAKGDRDFFECCRDPKVASTITLQPIDRYDGLLDASIIFSDILVVPQAMGMVVEMVDKKGPHFPDPLKSPDDGQYATVMRKHVDVKAELDYVYKAITLTRNKLAGRVPLIGFCGAPWTLFCYMVEGGGTKMFVESKKWIYKYPDETRALLQKITEVCVEYLALQVQAGAQMIQVFDSWAGELSPATFKIFSEPYLAYIAKHLPGRLKEMGLDVIPMIVFPKGANQSLDSVCNLGYNVVGLDWLVDPAEAVKVRGDRKVVFQGNADPGVLYGSRESIADTVSHMVKGFGGGKGGWIANLGHGVTPFVKPDDLKFYLEEIQRLSSQ

SEQ ID NO: 8898 - DNA, 4152 bp, Muscodor strobelii
  misc_feature: SGI EST ID NO. CUFF.21376.1
  misc_feature: Variant of the nucleotide sequence at SEQ ID NO 8896
tgtcggacatagccatgtgttattttctacttagatcaatacatatatatatacatttcatggcacttaatacgagtgcttcggtatcgatggatgacgagactcggccagcttcatgttatctctgtgtcgtgcaataagtgccgcaatccgagaggctttttcagtgcctgcatgattattgacgatacggagggcataattgagtcgctgggtaatgcccggctcggcgtctaccatatgcctggcggcaacgttgaagaaattccgcaagaaatatttgggcagacgggtgccataggacacgtaatatctatagcagtaaaccatcaattcgaaggcttggcgcttgctgacgtgtggcgacgaacccataacgactgctattgctgctgttcgcgagatttcctctggcgtcaggttccgtcgacgtctccgacgtcgatcccgtgggaagatgttgaaagcatgccagatgcgatggtgagcgaagcgcggagtccagatcaaacgttcgagtgcctcgatgccgtatgcagtggtccagatatttgcagccgcagacttttcggactgctttttagcttcctctaggcaaagaatgtcgatagctgtctgtggtcggtccatgtctaatgccagatgcgccaagtgacgaaaggatcgttctttttcctggtccatgtcacagacgaatcttagaaacttgtatacatgttgctgtctatgaacaagattcaaaaagcgagcaaacgccttgacccggtagaactgctctgtcttccaaagaagcttactagcgcgttggaaagtcccgccctctttacccttgcgacagtaggaaaagagggatctactttgggcaagaggactctggctattcgcccaagtcaggaatagatggcaaatgtctttctgcgtaaggggagggatagcagcatatggagcttccaaaatgaggcatgtctgtgccagataggcatcatcgacgtcgggtagacgagccatacactgtaaccaactgaatcgaagccgtcggtagtctttgccatggtggtcgccagcccaggccgttgcaaatttgagcgttgcaaacttatgcaccctgcgtgtaatgtcaggcaagatgcgatgggtttggggcccccacacgaatatcttggcgtcctgttgagcagctacatctacatgcctggcagaggtagattgtgaaagggcgacgaaggaatcctccaagcaggtcaggatgccggaggaaagagcggcaagatgctgaacagggatgtggttcaatacgtgcgtgcagaggctaagagcatctacctccactgctgcgacattatgcagaaagccgttccacgccacatggtcaaaggatgccgatcccgaagcctgccgctgcgcgagacccttgatggtggcctcagcaaagaggtgttgggcacggccatagcctctcataccggggatgagcccgttgaggatctgacagacgacatggccacggaaacggccctcggctagcgcactcttccagctagcgcagaattcggtgaacagatgcatctgagccttggacacatgccctgatgctggagcgtgggagaagaacaacagtggctcggtgggcttggaggcaaaaatatcagtccataagagggccaagcccgcgtcgaccataccgagcgctgcagatccggtattgcccaaggtatgaggtatttcagccacaccctctagcgcaactcccaggggcagtagatccgagtcgacaggtcgcgaggtgggagcctgatcgatggtggcagaaccggaatgggtgcgtatagtgtcgaggatgcgggtgctgtttgcgtgaggaggacccgagggcgagggcgattccaaagccgagaagatggacgggaacatggcgttgagggcgtgtaagacgaaggctgcgagcgatcgtctgagcgacggcggcgcagatggcgttctcaggggggaggatgccggtggcttccatttccattgagtgagatcgaccagattagcaagctcccagataggcggagaggcgtgagaatggccgaagtgaagctcgcccatgtgcctcttggccatgcgcttccgctgctccatgggaccggggacgtgagagccgtggcggacatggcagcgggcggcggctggggagacggccagatagcggtcgatggccacatagagcaggctatcggtgatccagacggcgtcatggcgggatcgggggtgggatgccggccgcacgcgacgacgagctgcgcggcagcattgcgaggttggcgatagggacatgcgcgcgcgtcatggggattcgagtgtcattatttacaatatcataatgttaaaatgattgtatgcgaaacagcggagatgaaagaacaaaatgcaggtgttgggaccgtggaaaagggtgacaatgggtatcaatggctatgctcaattcgacgtcgtctgccatacaaagtgctatcgcagctgggatgaagctcgacttgaagacgtcttgaaatttatggcctagacccaaagctacgaagagctccaactgaggtatgttacccggtagtaccagtatgtggagatgtacctcaaaggtagcgggtaacatgaacggagtaacgacaggggcatatcccacttcagaagttctcgcgtgcaacaagtgggctgcaagtcacagctcggccgacagagcgcggggcagccggaaagatcatgtacatgtaggcatcgtcgatctcgtcggtcttgagctttttcaccttcatttttgagcatcgtccctcgctgaccatggctgcccacgacttcccgccgatgaagaacgacctggtcctgaggacagcttggggtcagaatgtcgaacgagcccccatctggatcatgaggcaagcgggccgatacctccccgagtaccacgaggccaagggcgaccgcgacttcttcgagtgctgccgcgaccccaaggtcgcctcgaccatcaccctgcagcccatcgaccgctacgacgggctcctcgatgcctccatcatcttctccgacatcctcgtcgtgccccaggccatgggcatggtcgtcgagatggttgacaagaaggggccccatttccccgacccgctaaagagccccgacgacggtcagtatgccaccgtcatgcgcaagcacgtcgacgtcaaggccgagctcgactacgtctacaaggccatcaccctcacccgcaacaagctcgccggccgcgtccccctcatcggcttctgcggtgccccctggaccctgttctgctacatggtcgaaggcggcggcaccaagatgtttgtcgagagtaaaaagtggatatacaagtaccccgatgagacacgtgccctcctgcagaagatcaccgaggtctgtgtcgagtatctcgccctccaggttcaggcgggagcccagatgatccaagtattcgactcgtgggcgggtgagctctcgcctgccaccttcaagatcttcagcgaaccctacctggcttatatcgcgaagcacctacccggccgcctgaaggagatggggctggacgtgatccccatgattgtcttccccaaaggtgccaaccagtctctcgattccgtgtgcaatctggggtacaatgtggtgggactagattggctggtagatcctgcagaggccgtcaaggtcaggggagatcggaaagtcgtcttccagggtaacgcagaccccggtgttttgtacggctcaagagagtcaatagcagacaccgtgagtcatatggtcaagggctttggtggcggcaagggaggatggattgctaatctcggtcatggtgtcacgcctttcgtgaaaccagatgatctgaaattctatcttgaggagatacagcgcttgtctagccagtagagtactaaagacgagggcaacaagacgtgccttaggttagatgtagggtattttctctgaagcaatcatggttagacaaaaggagagtatagtggtcctctttgtaagaaccatgactgcatttcggatttccttctgtatcacgtctatgttgtcctcaaaacctccttcaaaatcctaatcgggaaaactcaggtttaagtcgagccgactccttgaccccaaagtcag

SEQ ID NO: 8899 - DNA, 1104 bp, Muscodor strobelii
  misc_feature: SGI cDNA ID NO. 562759
  misc_feature: Encodes the peptide sequence at SEQ ID NO 8900
atggctgcccacgacttcccgccgatgaagaacgacctggtcctgaggacagcttggggtcagaatgtcgaacgagcccccatctggatcatgaggcaagcagcgggccgatacctccccgagtaccacgaggccaagggcgaccgcgacttcttcgagtgctgccgcgaccccaaggtcgcctcgaccatcaccctgcagcccatcgaccgctacgacgggctcctcgatgcctccatcatcttctccgacatcctcgtcgtgccccaggccatgggcatggtcgtcgagatggttgacaagaaggggccccatttccccgacccgctaaagagccccgacgacggtcagtatgccaccgtcatgcgcaagcacgtcgacgtcaaggccgagctcgactacgtctacaaggccatcaccctcacccgcaacaagctcgccggccgcgtccccctcatcggcttctgcggtgccccctggaccctgttctgctacatggtcgaaggcggcggcaccaagatgtttgtcgagagtaaaaagtggatatacaagtaccccgatgagacacgtgccctcctgcagaagatcaccgaggtctgtgtcgagtatctcgccctccaggttcaggcgggagcccagatgatccaagtattcgactcgtgggcgggtgagctctcgcctgccaccttcaagatcttcagcgaaccctacctggcttatatcgcgaagcacctacccggccgcctgaaggagatggggctggacgtgatccccatgattgtcttccccaaaggtgccaaccagtctctcgattccgtgtgcaatctggggtacaatgtggtgggactagattggctggtagatcctgcagaggccgtcaaggtcaggggagatcggaaagtcgtcttccagggtaacgcagaccccggtgttttgtacggctcaagagagtcaatagcagacaccgtgagtcatatggtcaagggctttggtggcggcaagggaggatggattgctaatctcggtcatggtgtcacgcctttcgtgaaaccagatgatctgaaattctatcttgaggagatacagcgcttgtctagccagtag

SEQ ID NO: 8900 - protein, 367 aa, Muscodor strobelii
  misc_feature: SGI Peptide ID NO. 562759
  misc_feature (9)..(364): Pfam Id: PF01208 Pfam Desc: Uroporphyrinogen decarboxylase (URO-D)
  misc_feature (4)..(366): NCBI GI: 116181730 Blast Desc: conserved [Chaetomium globosum CBS 148.51] gi|88185790|gb|EAQ93258.1| conserved [Chaetomium globosum CBS 148.51]
  misc_feature (1)..(366): NCBI GI: 171696110 Blast Desc: protein product [Podospora anserina] gi|170948297|emb|CAP60461.1| protein product [Podospora anserina]
  misc_feature (3)..(366): NCBI GI: 164427732 Blast Desc: uroporphyrinogen decarboxylase [Neurospora crassa OR74A] gi|157071862|gb|EAA35030.2| uroporphyrinogen decarboxylase [Neurospora crassa OR74A]
  misc_feature (6)..(366): NCBI GI: 259486354 Blast Desc: TPA: uroporphyrinogen decarboxylase (AFU_orthologue; AFUA_1G05060) [Aspergillus nidulans FGSC A4]
  misc_feature (4)..(366): NCBI GI: 115388489 Blast Desc: uroporphyrinogen decarboxylase [Aspergillus terreus NIH2624] gi|114195834|gb|EAU37534.1| uroporphyrinogen decarboxylase [Aspergillus terreus NIH2624]
  misc_feature (6)..(365): NCBI GI: 121702781 Blast Desc: uroporphyrinogen decarboxylase [Aspergillus clavatus NRRL 1] gi|119397798|gb|EAW08229.1| uroporphyrinogen decarboxylase [Aspergillus clavatus NRRL 1]
  misc_feature (6)..(366): NCBI GI: 70990812 Blast Desc: uroporphyrinogen decarboxylase [Aspergillus fumigatus Af293] gi|66847887|gb|EAL88217.1| uroporphyrinogen decarboxylase [Aspergillus fumigatus Af293] gi|159130730|gb|EDP55843.1| A1163]
  misc_feature (4)..(365): NCBI GI: 145229089 Blast Desc: An01g04250 [Aspergillus niger] gi|134054952|emb|CAK36961.1| protein product [Aspergillus niger]
  misc_feature (6)..(366): NCBI GI: 119496773 Blast Desc: uroporphyrinogen decarboxylase [Neosartorya fischeri NRRL 181] gi|119413322|gb|EAW23263.1| uroporphyrinogen decarboxylase [Neosartorya fischeri NRRL 181]
  misc_feature (4)..(366): NCBI GI: 238486576 Blast Desc: uroporphyrinogen decarboxylase [Aspergillus flavus NRRL3357] gi|220699405|gb|EED55744.1| uroporphyrinogen decarboxylase [Aspergillus flavus NRRL3357]
  misc_feature (5)..(367): SWISSPROT Homolog: EC 4.1.1.37 Uroporphyrinogen decarboxylase
MAAHDFPPMKNDLVLRTAWGQNVERAPIWIMRQAAGRYLPEYHEAKGDRDFFECCRDPKVASTITLQPIDRYDGLLDASIIFSDILVVPQAMGMVVEMVDKKGPHFPDPLKSPDDGQYATVMRKHVDVKAELDYVYKAITLTRNKLAGRVPLIGFCGAPWTLFCYMVEGGGTKMFVESKKWIYKYPDETRALLQKITEVCVEYLALQVQAGAQMIQVFDSWAGELSPATFKIFSEPYLAYIAKHLPGRLKEMGLDVIPMIVFPKGANQSLDSVCNLGYNVVGLDWLVDPAEAVKVRGDRKVVFQGNADPGVLYGSRESIADTVSHMVKGFGGGKGGWIANLGHGVTPFVKPDDLKFYLEEIQRLSSQ

SEQ ID NO: 8901 - DNA, 4152 bp, Muscodor strobelii; identical to SEQ ID NO: 8898
  misc_feature: SGI EST ID NO. CUFF.21376.1
  misc_feature: Variant of the nucleotide sequence at SEQ ID NO 8899

SEQ ID NO: 8902 - DNA, 948 bp, Muscodor strobelii
  misc_feature: SGI cDNA ID NO. 562760
  misc_feature: Encodes the peptide sequence at SEQ ID NO 8903
atgacaaaagtccatatctttgcctcaccgcccgaggcgcttatagcccgtctacgatctcatattccctactctctacctctgattcggcgactgcggttcgcggggtttcccggtggtatcacggagcacacgaagatcctgtgggtttctgatttggcacttgaagatacggagggagatgtagaagatgaaccctttgcggcgggttatttggatttttcccgcggtcccgagacggagctttggatttactcctcgcttgagcgtcgcgtggggacgaatttaaataccgacagcactaatgaagttgggggcgatgaagaatatgacaaggaaatcgcttgcgcagtagccttgcttagagaggtgaagaggcagcaagatgtatacttcgcccccggatctgtacaggcggcagagcgcccgtacccgacgatgctgatcgggaatatgggcgagaacttgcgtaggaggcttgcggggaaggtagtgtttacttacacgggtgtatatgataagtggatgtttgatacggaggctctgcctgatgcgagattatatgaggaaggggagaagaacggctgggtttgggacaaagtacgggagaaggatctaccgttcatgttgagcaggacggagattcaaaggactccacgaacgatgagactcttaccaagcacagcgttgtatgcttctgatggcacacccatagcatgggcattcctaggcccagattcgtcgcttagcagcctacattgcgaggagccttatcggggacagggaatagctaaagcagtggctgtgaagatattgcgagatcacctcaaggactatggtgttgaaggctctaacatgggctgggccgacgtggacccattgaacatccagagtcaggcagtatgcagaggtctcagagctgaagtcaaatggcagatttcatggtga

SEQ ID NO: 8903 - protein, 315 aa, Muscodor strobelii
  misc_feature: SGI Peptide ID NO. 562760
  misc_feature (4)..(315): NCBI GI: 256724963 Blast Desc: NECHADRAFT_91432 [Nectria haematococca mpVI 77-13-4]
  misc_feature (4)..(315): NCBI GI: 46110196 Blast Desc: FG01980.1 [Gibberella zeae PH-1]
  misc_feature (67)..(315): NCBI GI: 85112092 Blast Desc: NCU02772 [Neurospora crassa OR74A] gi|28926042|gb|EAA35031.1| [Neurospora crassa OR74A]
  misc_feature (4)..(315): NCBI GI: 189203259 Blast Desc: conserved [Pyrenophora tritici-repentis Pt-1C-BFP] gi|187985064|gb|EDU50552.1| conserved [Pyrenophora tritici-repentis Pt-1C-BFP]
  misc_feature (7)..(315): NCBI GI: 261360941 Blast Desc: acetyltransferase [Verticillium albo-atrum VaMs.102]
  misc_feature (4)..(315): NCBI GI: 169623981 Blast Desc: SNOG_15238 [Phaeosphaeria nodorum SN15] gi|111056343|gb|EAT77463.1| SNOG_15238 [Phaeosphaeria nodorum SN15]
  misc_feature (9)..(315): NCBI GI: 242822468 Blast Desc: GNAT family acetyltransferase, [Talaromyces stipitatus ATCC 10500] gi|218712813|gb|EED12238.1| GNAT family acetyltransferase, [Talaromyces stipitatus ATCC 10500]
  misc_feature (1)..(315): NCBI GI: 238842453 Blast Desc: acetyltransferase [Microsporum canis CBS 113480]
  misc_feature (11)..(315): NCBI GI: 119492694 Blast Desc: acetyltransferase, GNAT family family [Neosartorya fischeri NRRL 181] gi|119411826|gb|EAW21769.1| acetyltransferase, GNAT family family [Neosartorya fischeri NRRL 181]
  misc_feature (12)..(315): NCBI GI: 212546745 Blast Desc: acetyltransferase, GNAT family [Penicillium marneffei ATCC 18224] gi|210065046|gb|EEA19141.1| acetyltransferase, GNAT family [Penicillium marneffei ATCC 18224]
MTKVHIFASPPEALIARLRSHIPYSLPLIRRLRFAGFPGGITEHTKILWVSDLALEDTEGDVEDEPFAAGYLDFSRGPETELWIYSSLERRVGTNLNTDSTNEVGGDEEYDKEIACAVALLREVKRQQDVYFAPGSVQAAERPYPTMLIGNMGENLRRRLAGKVVFTYTGVYDKWMFDTEALPDARLYEEGEKNGWVWDKVREKDLPFMLSRTEIQRTPRTMRLLPSTALYASDGTPIAWAFLGPDSSLSSLHCEEPYRGQGIAKAVAVKILRDHLKDYGVEGSNMGWADVDPLNIQSQAVCRGLRAEVKWQISW

SEQ ID NO: 8904 - DNA, 6472 bp, Muscodor strobelii; identical to SEQ ID NO: 8892
  misc_feature: SGI EST ID NO. CUFF.21377.2
  misc_feature: Variant of the nucleotide sequence at SEQ ID NO 8902

SEQ ID NO: 8905 - DNA, 981 bp, Muscodor strobelii
  misc_feature: SGI cDNA ID NO. 562761
  misc_feature: Encodes the peptide sequence at SEQ ID NO 8906
atgacaaaagtccatatctttgcctcaccgcccgaggcgcttatagcccgtctacgatctcatattccctactctctacctctgattcggcgactgcggttcgcggggtttcccggtggtatcacggagcacacgaagatcctgtgggtttctgatttggcacttgaagatacggagggagatgtagaagatgaaccctttgcggcgggttatttggatttttcccgcggtcccgagacggagctttggatttactcctcgcttgagcgtcgcgtggggacgaatttaaataccgacagcactaatgaagttgggggcgatgaagaatatgacaaggaaatcgcttgcgcagtagccttgcttagagaggtgaagaggcagcaagatgtatacttcgcccccggatctgtacaggcggcagagcgcccgtacccgacgatgctgatcgggaatatgggcgagaacttgcgtaggaggcttgcggggaaggtagtgtttacttacacgggtgtatatgataagtggatgtttgatacggaggctctgcctgatgcgagattatatgaggaaggggagaagaacggctgggtttgggacaaagtacgggagaaggatctaccgttcatgttgagcaggacggagattcaaaggactccacgaacgatgagactcttaccaagcacagcgttgtatgcttctgatggcacacccatagcatgggcattcctaggcccagattcgtcgcttagcagcctacattgcgaggagccttatcggggacagggaatagctaaagcagtggctgtgaagatattgcgagatcacctcaaggactatggtgttgaaggctctaacatgggctgggccgacgtggacccattgaacatccagagtcaggcagtatgcagaggtctcagagctgaagtcaaatggcagatttcatggagtcggctcgacttaaacctgagttttcccgattag

SEQ ID NO: 8906 - protein, 326 aa, Muscodor strobelii
  misc_feature: SGI Peptide ID NO. 562761
  misc_feature (4)..(318): NCBI GI: 256724963 Blast Desc: NECHADRAFT_91432 [Nectria haematococca mpVI 77-13-4]
  misc_feature (4)..(325): NCBI GI: 46110196 Blast Desc: FG01980.1 [Gibberella zeae PH-1]
  misc_feature (67)..(320): NCBI GI: 85112092 Blast Desc: NCU02772 [Neurospora crassa OR74A] gi|28926042|gb|EAA35031.1| [Neurospora crassa OR74A]
  misc_feature (4)..(320): NCBI GI: 189203259 Blast Desc: conserved [Pyrenophora tritici-repentis Pt-1C-BFP] gi|187985064|gb|EDU50552.1| conserved [Pyrenophora tritici-repentis Pt-1C-BFP]
  misc_feature (7)..(320): NCBI GI: 261360941 Blast Desc: acetyltransferase [Verticillium albo-atrum VaMs.102]
  misc_feature (4)..(323): NCBI GI: 169623981 Blast Desc: SNOG_15238 [Phaeosphaeria nodorum SN15] gi|111056343|gb|EAT77463.1| SNOG_15238 [Phaeosphaeria nodorum SN15]
  misc_feature (9)..(320): NCBI GI: 242822468 Blast Desc: GNAT family acetyltransferase, [Talaromyces stipitatus ATCC 10500] gi|218712813|gb|EED12238.1| GNAT family acetyltransferase, [Talaromyces stipitatus ATCC 10500]
  misc_feature (11)..(321): NCBI GI: 119492694 Blast Desc: acetyltransferase, GNAT family family [Neosartorya fischeri NRRL 181] gi|119411826|gb|EAW21769.1| acetyltransferase, GNAT family family [Neosartorya fischeri NRRL 181]
  misc_feature (1)..(315): NCBI GI: 238842453 Blast Desc: acetyltransferase [Microsporum canis CBS 113480]
  misc_feature (12)..(320): NCBI GI: 212546745 Blast Desc: acetyltransferase, GNAT family [Penicillium marneffei ATCC 18224] gi|210065046|gb|EEA19141.1| acetyltransferase, GNAT family [Penicillium marneffei ATCC 18224]
MTKVHIFASPPEALIARLRSHIPYSLPLIRRLRFAGFPGGITEHTKILWVSDLALEDTEGDVEDEPFAAGYLDFSRGPETELWIYSSLERRVGTNLNTDSTNEVGGDEEYDKEIACAVALLREVKRQQDVYFAPGSVQAAERPYPTMLIGNMGENLRRRLAGKVVFTYTGVYDKWMFDTEALPDARLYEEGEKNGWVWDKVREKDLPFMLSRTEIQRTPRTMRLLPSTALYASDGTPIAWAFLGPDSSLSSLHCEEPYRGQGIAKAVAVKILRDHLKDYGVEGSNMGWADVDPLNIQSQAVCRGLRAEVKWQISWSRLDLNLSFPD

SEQ ID NO: 8907 - DNA, 6472 bp, Muscodor strobelii; identical to SEQ ID NO: 8892
  misc_feature: SGI EST ID NO. CUFF.21377.2
  misc_feature: Variant of the nucleotide sequence at SEQ ID NO 8905

SEQ ID NO: 8908 - DNA, 5841 bp, Muscodor strobelii
  misc_feature: SGI cDNA ID NO. 562764
  misc_feature: Encodes the peptide sequence at SEQ ID NO 8909
atggacggctatcgtgacgacgaggaccactgcactggtgccaccttgacagcggacacggcagcaggtgcagcaggtgccgcaggagcccacgccttccatccccagcacccccagcacccgccgcagcaccaccgccctccccagcatcaccagcactaccagcaccaccaccacgtcgatcacgagcctctccaccacctcgaccgcaacgaccacctgccgcacccaccacactacggctacaaccacgactacgaccacgactacgccggcgatcgcctctacgacgctgcattgggcccgacggctcacttcccaccgccagatgactcgctgtatgcgtctcatgccgcaaacaacctcgccgccgcccatgccaatgctgcaagcaccgagcccgtgggctttgtagatccggacagcttctatcaccagcagcacgccgacgggctgatggcgtcgaccatacccgtcccgagaccagcccacgatgcctccctgcgatcgaatggagctgcctccggcgctagacacccagtgatgccctcgagtcgatcccatctgaaacctgcttctcgctccgtctcggcccctctggaggagagacagcctactaacacgacgaggtcaagacctgcctggaacagccggcccggacaccagccgagcgtgaaggacctgaagaagaagttcgaccagcatgccgcccagtcccataccacgcctacgcgcaagtcgcctccacgtgcccctacccgcgatgcttcgtgggcagccgcgaccggccagcagcgttacgcgacgtcagcgtcccgtgaccgttctgctacaacgtcgtccaactctcgctcgacaaagagcaaagtgccacacgacgatcgcttgtctaacaacaatccacagtcgtttgccagccgcataggcaaacctcgctcttccgtagggaccaacgcttcagcctccaagtctatgaccaacctttctcctaatcctgcaacaacttcggtcccacctgtcccgcagtcgcgcggcctgctcttcggagagatagcgcctggcgatatcaatggaggatttgctggccacggaatcgacctcgcaccgggcaggcggatctccgagtccaatatccaaggcacacttgggaggcggcagaggagcttctcccataccgacgtcgagccgacctcgccgagcgactggtaccgcgctctaaggcgcgattcgagcgactccagcaacagtgacgccaagaagctgcaatcagctcggaatcatgctcggtctcgcagtgacatgggaagtacgaacgcgatcccattgccatctaccgcctcgacaacgccacgaacgaagcccactatcgacacttcactgtcagcaacttcaaggatcccgatctcagttcgaaaactcaactcgccatctagctcgaccagccccaactctacacgatcaaactcaccatctactcttagaagaccccaagcacagagcaaatctcccgccacaaatcaatttaggaataccaagacttacacgaacaatgccgctccagtggccaagcgtacacatagacctgaggctcttacccctaatggcagtacacgtttgaatgcctacatttcaacaccgccacccaagctatcccccacgctcagaagctctcgaccgcgccaacccgtgtcaacggcaactactacaagttcgaggatgagagcggttgaaagggataagtctccacaaaagcgagacggtcgaactagcgctagaggcaacgaacctcctacccgccggcgcaagatttcgatgggtccaatcgattttgaatcccgccgcgagcagatcaagctttcctataccaaatcgctccgcgagaatgaagcaaaagctgctgcaagaagagctgctcaggagaagaagagacaggaggccgaggaggctcttgccgcgcgagccgctgctgcagaagccctaaagcgccaggaggacgagctccgagcgcagttactggaggaagaagcacgcaccactcaggattccatggacgacattccggaatctcaggctgtggatactattaccgcgactgctgtgacggagagccctgtggatgtggatgatgcttcacgggatcctgtatcttcacagagccctgagagccccgaagtgcataacgatgcaatctatgttgacgatcatcgggtaccagtagattcgccaactctcggtctcgggatccctggaagttttcccgacgtcgcaacccctcaagacgacgacgaggccccactatcggccgtctcgaacacgacagaatttgacgctgagacacaaacagacccgccaactcgggaacagcctggattcgaagagtccggcacgacggctgctcgcatcgaggagcaagtcgaagtgtcacttcctaaatcagagtatcgatcaccgtttgacgaagagtctccagctgacgagaacgtatctatccaaatatcattagatccgttggatcttggtgtgtctgctccggatgcttccgagaccacagaccatgagatttccgtcttgggccacgaagatgaatatgaacctctgcctatacgcacgcactcttacgagacgaaggtgacaatattgggacgggattctggatttgcgcctatgaacaatgagtatgaaacctcggatcatcaagttgtcggcggccgcaacattcaagatcaaatgcaaagccccctaccatctcaattcctgaataatggtgttcccggatacctccatgaaaatggcgacttaagtactggtcttagtgagatcgaagaattttttgtcggcccactagtcaaggagaataaaacatccgagcgaggggattgcgaagaagaaggagtaggcattgaggtccatgaaaccgaatataatgtcgaagaatcccgcttctccctcgaatctaagaagaccttgggtacgcagcagagtctgactgtgcctcggacttcggagtcagcgaacagaatcagtcaaaccaccgtatggaccgattattcgatgaatagccatgattctagttcagggtacgaactgactgatcacgactcccagaggcctacctcgacgtggcgcgacgatttggctgtttccgagatagattcaaggcgcgagtcctataactatgatcgcagccccagaattgtgtcacatagccgcgatgtgtccccttgcgggacttatcgagagccagatctctacgagtctcagcaccagcttccagaactcgacacaggagaaggcttcgcggttaatctactcgatcggaagacaagcatgcgtgtcgcgcctcctcctgtccttccccaccagtcctctgacgaggcagctaaccatgacctggctagttcggccccgccaagcgagtactacgacgagactaggccaagcagctatgctcgcattgaaaaggacgatcaaagcctccactcattggatgcttcgagacgtgtcagtgattattcgtctcgcctggagtcagcttcacagtccattgatcaaagatcacttgaaacatctgatggtattcggtctgggtcatctcatctcaccagccagcagactctcgtaggcagcattaatgtcgaacaggcatccgaccttactgcaaaggagaggaagcggcttttcactcgtcttgaggtcgtcaaagaacttatagataccgaatcgttcttcataagagacatgaacattgtcgaggagatctataaagggacagcagaagcctgcccaaagctggacgataagactatcaagctcattttccgcaataccgatcagatcatcaaatttcattccacctttttggttgagctaaaagaaggcatttcaagtatctacacccctaggagccaccgaaacatgccaaaagaaacatctggtgcaagcagccgggccccttctctttctgaagtctcaacaacctcgactggtcaactcaatgatgggaaagatcgtgagacttcgttgggtcccatttttatccgtaacattgagcaaatgaaagtggttcacgagacgtttctgaagaacagcgatcacgccgcgaaaaagttgattcaaatacaagaagacccgacagttcaagtttggctcaacgaatgtaacgaggttgcaagggagctgactagggcctggaacttggactcactgcttatcaaaccaatgcaaagaatcaccaagtatcccaacctgcttattcaactgcttcatgagacacctcaagatcaccctgatcgtccgtctttagaagccgcgaagacagtgttggaagatgccattgaggagatcaacaaaaccaagaagaatttcgaattggttgggcaaatcgtgggtcgaaagcgcaaggaatcagacgtcaaagctggctttgcaagagcctttggcaaacgagtcgacaaactccaagttggggcgaatagagaacctgaagatccggaatacttgaagttacacgaaaaattcggcgatgactacctccgcttgcaggtcgttttgagagatgccgaattctacacaagacaggtgacagattatgtccacgagttcttgcagtacctttcctccatggagctcatcatgcgcatccagccttctccacatcctgaaattgagagcaggtgggttcagtttaatgtgtccatgagaaacatggagaaagtggcgctggaggaacatctctcgcaagttaggaagcaagtcattgagcccttcgaactcctcacgagaggtggcaagaaaatcgataagcagctctcagacctcgtagagcaatacgaggctctgaatgaagccttgaagaaggaactgccgaaactttcatcgttaaccgaaaaggtgggcaacatctgcctcggaaactttgtgaacattcaagcccagtggtttgccctctggaaagagaagctcaaagtagtcttggacgacgcaagcgtacccgacgtttcgaacattatctcaagcttcttccgagacttcaagttccaagacgaacaaatcaacgccatcggtattatcaacccagtttcgaaaggtcgtccttcacattccactagtgtcgacgaagctgcttctagacttcgtcttagacccgccgaattatctccccgccaccgcggattgtctctgaacagcgacctggccccaagcttgccaacgccggatttcatgaaacgccacagtggtcaatttgctatctcgccttcgatggcctcaatgtcatccctcaatcaatatagtcgcgatggctacactccacctcttgggtatggttcacctagagctccggaattccctgctggatctcgatctctcgctggctcgctggcgcgacctggaactggccagagtcatgattcgaatgctatacctcgaaagagcattgactccggatcgcaatctaggcattatccgaattcagtgcagtcaaatgcgtatcagggatcagaaaatcaacggttctctggcctctttcagtcggcacttcctctatccgatacacaagaacgaccccaacgaccgtcgcaagtctcttcgcgtgcctcttcacgcgaacgtcagccagcgaacgggtataatgtcctatggcttgctgcatctctcttcgaattcaatattgaaaccaccaaacatgaagctggttacccttacctgacatatcacgctggcgagatctttgacgtcatcgctgagaaaggcgagctctggctagccaagaatcaagacgatccaaataatctagttggctggctgtggtcgaaacattttgccaaactagctgatgattag

SEQ ID NO: 8909 - protein, 1946 aa, Muscodor strobelii
  misc_feature: SGI Peptide ID NO. 562764
  misc_feature (1232)..(1450): Pfam Id: PF00621 Pfam Desc: RhoGEF domain
  misc_feature (1341)..(1450): Pfam Id: PF00621 Pfam Desc: RhoGEF domain
  misc_feature (1232)..(1296): Pfam Id: PF00621 Pfam Desc: RhoGEF domain
  misc_feature (65)..(1945): NCBI GI: 116181742 Blast Desc: CHGG_01499 [Chaetomium globosum CBS 148.51] gi|88185796|gb|EAQ93264.1| CHGG_01499 [Chaetomium globosum CBS 148.51]
  misc_feature (35)..(1945): NCBI GI: 145613469 Blast Desc: MGG_11178 [Magnaporthe grisea 70-15] gi|145020535|gb|EDK04664.1| MGG_11178 [Magnaporthe grisea 70-15]
  misc_feature (167)..(1945): NCBI GI: 171696118 Blast Desc: protein product [Podospora anserina] gi|170948301|emb|CAP60465.1| protein product [Podospora anserina]
  misc_feature (740)..(1945): NCBI GI: 256735159 Blast Desc: NECHADRAFT_74712 [Nectria haematococca mpVI 77-13-4]
  misc_feature (183)..(1945): NCBI GI: 164427715 Blast Desc: NCU10282 [Neurospora crassa OR74A] gi|157071856|gb|EDO65312.1| [Neurospora crassa OR74A]
  misc_feature (1243)..(1819): NCBI GI: 261355953 Blast Desc: conserved [Verticillium albo-atrum VaMs.102]
  misc_feature (1222)..(1944): NCBI GI: 159123179 Blast Desc: Rho guanyl nucleotide exchange factor, [Aspergillus fumigatus A1163]
  misc_feature (1222)..(1944): NCBI GI: 70987140 Blast Desc: Rho guanyl nucleotide exchange factor [Aspergillus fumigatus Af293] gi|66846680|gb|EAL87012.1| Rho guanyl nucleotide exchange factor, [Aspergillus fumigatus Af293]
  misc_feature (1222)..(1944): NCBI GI: 212536668 Blast Desc: Rho guanyl nucleotide exchange factor, [Penicillium marneffei ATCC 18224] gi|210070889|gb|EEA24979.1| Rho guanyl nucleotide exchange factor, [Penicillium marneffei ATCC 18224]
  misc_feature (1222)..(1943): NCBI GI: 242796428 Blast Desc: Rho guanyl nucleotide exchange factor, [Talaromyces stipitatus ATCC 10500] gi|218719386|gb|EED18806.1| Rho guanyl nucleotide exchange factor, [Talaromyces stipitatus ATCC 10500]
MDGYRDDEDHCTGATLTADTAAGAAGAAGAHAFHPQHPQHPPQHHRPPQHHQHYQHHHHVDHEPLHHLDRNDHLPHPPHYGYNHDYDHDYAGDRLYDAALGPTAHFPPPDDSLYASHAANNLAAAHANAASTEPVGFVDPDSFYHQQHADGLMASTIPVPRPAHDASLRSNGAASGARHPVMPSSRSHLKPASRSVSAPLEERQPTNTTRSRPAWNSRPGHQPSVKDLKKKFDQHAAQSHTTPTRKSPPRAPTRDASWAAATGQQRYATSASRDRSATTSSNSRSTKSKVPHDDRLSNNNPQSFASRIGKPRSSVGTNASASKSMTNLSPNPATTSVPPVPQSRGLLFGEIAPGDINGGFAGHGIDLAPGRRISESNIQGTLGRRQRSFSHTDVEPTSPSDWYRALRRDSSDSSNSDAKKLQSARNHARSRSDMGSTNAIPLPSTASTTPRTKPTIDTSLSATSRIPISVRKLNSPSSSTSPNSTRSNSPSTLRRPQAQSKSPATNQFRNTKTYTNNAAPVAKRTHRPEALTPNGSTRLNAYISTPPPKLSPTLRSSRPRQPVSTATTTSSRMRAVERDKSPQKRDGRTSARGNEPPTRRRKISMGPIDFESRREQIKLSYTKSLRENEAKAAARRAAQEKKRQEAEEALAARAAAAEALKRQEDELRAQLLEEEARTTQDSMDDIPESQAVDTITATAVTESPVDVDDASRDPVSSQSPESPEVHNDAIYVDDHRVPVDSPTLGLGIPGSFPDVATPQDDDEAPLSAVSNTTEFDAETQTDPPTREQPGFEESGTTAARIEEQVEVSLPKSEYRSPFDEESPADENVSIQISLDPLDLGVSAPDASETTDHEISVLGHEDEYEPLPIRTHSYETKVTILGRDSGFAPMNNEYETSDHQVVGGRNIQDQMQSPLPSQFLNNGVPGYLHENGDLSTGLSEIEEFFVGPLVKENKTSERGDCEEEGVGIEVHETEYNVEESRFSLESKKTLGTQQSLTVPRTSESANRISQTTVWTDYSMNSHDSSSGYELTDHDSQRPTSTWRDDLAVSEIDSRRESYNYDRSPRIVSHSRDVSPCGTYREPDLYESQHQLPELDTGEGFAVNLLDRKTSMRVAPPPVLPHQSSDEAANHDLASSAPPSEYYDETRPSSYARIEKDDQSLHSLDASRRVSDYSSRLESASQSIDQRSLETSDGIRSGSSHLTSQQTLVGSINVEQASDLTAKERKRLFTRLEVVKELIDTESFFIRDMNIVEEIYKGTAEACPKLDDKTIKLIFRNTDQIIKFHSTFLVELKEGISSIYTPRSHRNMPKETSGASSRAPSLSEVSTTSTGQLNDGKDRETSLGPIFIRNIEQMKVVHETFLKNSDHAAKKLIQIQEDPTVQVWLNECNEVARELTRAWNLDSLLIKPMQRITKYPNLLIQLLHETPQDHPDRPSLEAAKTVLEDAIEEINKTKKNFELVGQIVGRKRKESDVKAGFARAFGKRVDKLQVGANREPEDPEYLKLHEKFGDDYLRLQVVLRDAEFYTRQVTDYVHEFLQYLSSMELIMRIQPSPHPEIESRWVQFNVSMRNMEKVALEEHLSQVRKQVIEPFELLTRGGKKIDKQLSDLVEQYEALNEALKKELPKLSSLTEKVGNICLGNFVNIQAQWFALWKEKLKVVLDDASVPDVSNIISSFFRDFKFQDEQINAIGIINPVSKGRPSHSTSVDEAASRLRLRPAELSPRHRGLSLNSDLAPSLPTPDFMKRHSGQFAISPSMASMSSLNQYSRDGYTPPLGYGSPRAPEFPAGSRSLAGSLARPGTGQSHDSNAIPRKSIDSGSQSRHYPNSVQSNAYQGSENQRFSGLFQSALPLSDTQERPQRPSQVSSRASSRERQPANGYNVLWLAASLFEFNIETTKHEAGYPYLTYHAGEIFDVIAEKGELWLAKNQDDPNNLVGWLWSKHFAKLADD

SEQ ID NO: 8910 - DNA, 7533 bp, Muscodor strobelii
  misc_feature: SGI EST ID NO. CUFF.21316.0
  misc_feature: Variant of the nucleotide sequence at SEQ ID NO 8908
ggtcgtattccgtctgacgagttactttcacccacaccatggcaagctgggccaacaagtcgtgaactcttggcacttgccgaaggtggaaccctgggatagaccctcccccttctaattaacatgccatccaccctatgtatctcgtactctggccgtgaaacccgaactgcaattggtgacagggtggtctatgtctaggagatggcatcgaactcgctctccacgtccatgatatgtgattctgtgggcgcaaatggctcgcagggctccccatccctccattcgtccccccacacgtctgcgaacagccacaagttgggtaggtacatgtaggattcttgacttcgtctctattcgccgtgggtcgtcgcttgcactgctacttgccctgcttgcccaggcccgggtggcttcagtgcgcgtcccgagtcgttgacaccctactgcatgccctgcctgacctgagttggtgacctgacctgagctgttggcctctcccgccgatccatcgattggcactcgccctctccccacccccaaaaaagcctccaaccacgaggcaggctcccccaatctctcccctccaccccccggcagcggatgcttattcgacaacgtgtgtgccctccagcgcggtctgtggctccgccgtccacccgtttttgcctgacctgcgctgtctgcgaccgagtacatgccgctacctgcgcgcggcctgcacctcctatgtgaacctgatcgctccaaggcccgttaatggtcgccgtgatatgtcctggccgccgccagcatggacggctatcgtgacgacgaggaccactgcactggtgccaccttgacagcggacacggcagcaggtgcagcaggtgccgcaggagcccacgccttccatccccagcacccccagcacccgccgcagcaccaccgccctccccagcatcaccagcactaccagcaccaccaccacgtcgatcacgagcctctccaccacctcgaccgcaacgaccacctgccgcacccaccacactacggctacaaccacgactacgaccacgactacgccggcgatcgcctctacgacgctgcattgggcccgacggctcacttcccaccgccagatgactcgctgtatgcgtctcatgccgcaaacaacctcgccgccgcccatgccaatgctgcaagcaccgagcccgtgggctttgtagatccggacagcttctatcaccagcagcacgccgacgggctgatggcgtcgaccatacccgtcccgagaccagcccacgatgcctccctgcgatcgaatggagctgcctccggcgctagacacccagtgatgccctcgagtcgatcccatctgaaacctgcttctcgctccgtctcggcccctctggaggagagacagcctactaacacgacgaggtcaagacctgcctggaacagccggcccggacaccagccgagcgtgaaggacctgaagaagaagttcgaccagcatgccgcccagtcccataccacgcctacgcgcaagtcgcctccacgtgcccctacccgcgatgcttcgtgggcagccgcgaccggccagcagcgttacgcgacgtcagcgtcccgtgaccgttctgctacaacgtcgtccaactctcgctcgacaaagagcaaagtgccacacgacgatcgcttgtctaacaacaatccacagtcgtttgccagccgcataggcaaacctcgctcttccgtagggaccaacgcttcagcctccaagtctatgaccaacctttctcctaatcctgcaacaacttcggtcccacctgtcccgcagtcgcgcggcctgctcttcggagagatagcgcctggcgatatcaatggaggatttgctggccacggaatcgacctcgcaccgggcaggcggatctccgagtccaatatccaaggcacacttgggaggcggcagaggagcttctcccataccgacgtcgagccgacctcgccgagcgactggtaccgcgctctaaggcgcgattcgagcgactccagcaacagtgacgccaagaagctgcaatcagctcggaatcatgctcggtctcgcagtgacatgggaagtacgaacgcgatcccattgccatctaccgcctcgacaacgccacgaacgaagcccactatcgacacttcactgtcagcaacttcaaggatcccgatctcagttcgaaaactcaactcgccatctagctcgaccagccccaactctacacgatcaaactcaccatctactcttagaagaccccaagcacagagcaaatctcccgccacaaatcaatttaggaataccaagacttacacgaacaatgccgctccagtggccaagcgtacacatagacctgaggctcttacccctaatggcagtacacgtttgaatgcctacatttcaacaccgccacccaagctatcccccacgctcagaagctctcgaccgcgccaacccgtgtcaacggcaactactacaagttcgaggatgagagcggttgaaagggataagtctccacaaaagcgagacggtcgaactagcgctagaggcaacgaacctcctacccgccggcgcaagatttcgatgggtccaatcgattttgaatcccgccgcgagcagatcaagctttcctataccaaatcgctccgcgagaatgaagcaaaagctgctgcaagaagagctgctcaggagaagaagagacaggaggccgaggaggctcttgccgcgcgagccgctgctgcagaagccctaaagcgccaggaggacgagctccgagcgcagttactggaggaagaagcacgcaccactcaggattccatggacgacattccggaatctcaggctgtggatactattaccgcgactgctgtgacggagagccctgtggatgtggatgatgcttcacgggatcctgtatcttcacagagccctgagagccccgaagtgcataacgatgcaatctatgttgacgatcatcgggtaccagtagattcgccaactctcggtctcgggatccctggaagttttcccgacgtcgcaacccctcaagacgacgacgaggccccactatcggccgtctcgaacacgacagaatttgacgctgagacacaaacagacccgccaactcgggaacagcctggattcgaagagtccggcacgacggctgctcgcatcgaggagcaagtcgaagtgtcacttcctaaatcagagtatcgatcaccgtttgacgaagagtctccagctgacgagaacgtatctatccaaatatcattagatccgttggatcttggtgtgtctgctccggatgcttccgagaccacagaccatgagatttccgtcttgggccacgaagatgaatatgaacctctgcctatacgcacgcactcttacgagacgaaggtgacaatattgggacgggattctggatttgcgcctatgaacaatgagtatgaaacctcggatcatcaagttgtcggcggccgcaacattcaagatcaaatgcaaagccccctaccatctcaattcctgaataatggtgttcccggatacctccatgaaaatggcgacttaagtactggtcttagtgagatcgaagaattttttgtcggcccactagtcaaggagaataaaacatccgagcgaggggattgcgaagaagaaggagtaggcattgaggtccatgaaaccgaatataatgtcgaagaatcccgcttctccctcgaatctaagaagaccttgggtacgcagcagagtctgactgtgcctcggacttcggagtcagcgaacagaatcagtcaaaccaccgtatggaccgattattcgatgaatagccatgattctagttcagggtacgaactgactgatcacgactcccagaggcctacctcgacgtggcgcgacgatttggctgtttccgagatagattcaaggcgcgagtcctataactatgatcgcagccccagaattgtgtcacatagccgcgatgtgtccccttgcgggacttatcgagagccagatctctacgagtctcagcaccagcttccagaactcgacacaggagaaggcttcgcggttaatctactcgatcggaagacaagcatgcgtgtcgcgcctcctcctgtccttccccaccagtcctctgacgaggcagctaaccatgacctggctagttcggccccgccaagcgagtactacgacgagactaggccaagcagctatgctcgcattgaaaaggacgatcaaagcctccactcattggatgcttcgagacgtgtcagtgattattcgtctcgcctggagtcagcttcacagtccattgatcaaagatcacttgaaacatctgatggtattcggtctgggtcatctcatctcaccagccagcagactctcgtaggcagcattaatgtcgaacaggcatccgaccttactgcaaaggagaggaagcggcttttcactcgtcttgaggtcgtcaaagaacttatagataccgaatcgttcttcataagagacatgaacattgtcgaggagatctataaagggacagcagaagcctgcccaaagctggacgataagactatcaagctcattttccgcaataccgatcagatcatcaaatttcattccacctttttggttgagctaaaagaaggcatttcaagtatctacacccctaggagccaccgaaacatgccaaaagaaacatctggtgcaagcagccgggccccttctctttctgaagtctcaacaacctcgactggtcaactcaatgatgggaaagatcgtgagacttcgttgggtcccatttttatccgtaacattgagcaaatgaaagtggttcacgagacgtttctgaagaacagcgatcacgccgcgaaaaagttgattcaaatacaagaagacccgacagttcaagtttggctcaacgaatgtaacgaggttgcaagggagctgactagggcctggaacttggactcactgcttatcaaaccaatgcaaagaatcaccaagtatcccaacctgcttattcaactgcttcatgagacacctcaagatcaccctgatcgtccgtctttagaagccgcgaagacagtgttggaagatgccattgaggagatcaacaaaaccaagaagaatttcgaattggttgggcaaatcgtgggtcgaaagcgcaaggaatcagacgtcaaagctggctttgcaagagcctttggcaaacgagtcgacaaactccaagttggggcgaatagagaacctgaagatccggaatacttgaagttacacgaaaaattcggcgatgactacctccgcttgcaggtcgttttgagagatgccgaattctacacaagacaggtgacagattatgtccacgagttcttgcagtacctttcctccatggagctcatcatgcgcatccagccttctccacatcctgaaattgagagcaggtgggttcagtttaatgtgtccatgagaaacatggagaaagtggcgctggaggaacatctctcgcaagttaggaagcaagtcattgagcccttcgaactcgtgattaaatcttatagtaatccatcactggcaatgaaaaacgttccaagcgacgcattgactacgagaaacacatccagctcacgagaggtggcaagaaaatcgataagcagctctcagacctcgtagagcaatacgaggctctgaatgaagccttgaagaaggaactgccgaaactttcatcgttaaccgaaaaggtgggcaacatctgcctcggaaactttgtgaacattcaagcccagtggtttgccctctggaaagagaagctcaaagtagtcttggacgacgcaagcgtacccgacgtttcgaacattatctcaagcttcttccgagacttcaagttccaagacgaacaaatcaacgccatcggtattatcaacccagtttcgaaaggtcgtccttcacattccactagtgtcgacgaagctgcttctagacttcgtcttagacccgccgaattatctccccgccaccgcggattgtctctgaacagcgacctggccccaagcttgccaacgccggatttcatgaaacgccacagtggtcaatttgctatctcgccttcgatggcctcaatgtcatccctcaatcaatatagtcgcgatggctacactccacctcttgggtatggttcacctagagctccggaattccctgctggatctcgatctctcgctggctcgctggcgcgacctggaactggccagagtcatgattcgaatgctatacctcgaaagagcattgactccggatcgcaatctaggcattatccgaattcagtgcagtcaaatgcgtatcagggatcagaaaatcaacggttctctggcctctttcagtcggcacttcctctatccgatacacaagaacgaccccaacgaccgtcgcaagtctcttcgcgtgcctcttcacgcgaacgtcagccagcgaacgggtataatgtcctatggcttgctgcatctctcttcgaattcaatattgaaaccaccaaacatgaagctggttacccttacctgacatatcacgctggcgagatctttgacgtcatcgctgagaaaggcgagctctggctagccaagaatcaagacgatccaaataatctagttggctggctgtggtcgaaacattttgccaaactagctgatgattagaccataccttctcagcacatcacatacttcttctttgctaacgacatttgtcacttttctctgctcgttgttgcgcgagcatctgcttttgccagcactgctgggcttctatgtcagccccagctttggaggtgacataggcacttcgaatactccagtttcatctgtaaaaaagttctctttgcttacgaaaaatctttacgagtgtctctgctttgagaccaggcgtggggaaagaatggcgtttctcccgaggactggaatcttctgtacgacgagatgggcaacgatacatctaacatcggtggtgggaaagagggcgtttcggcttatgaaagagcgtgttatgggttcatacacttgaactcatgttcttcgcgggactcgacatggtagcaggcgaccaatagacgtccctttgttgctgctcggcatcgaacttacgcatttatcactacaacatattcttatcacggcgcttattccccccaatgcgaatgatcagatagatacccaatccatcgggttctacatgttacgtatcatcttcaatctacataggggctcgcgtactcgctgtattttaggagtggccacatagtttagatgtggaattcaggaccgatttaggttcagggaggagtattgggagaggtagatcttacgagaagataagatgaaatggctaatttcagacaattaaacctaattcgctatctacactgttaagtgttttatgatcgatggtcgtacatcaggccgactgtgcttcattgaatgagacaaggtagactacattctgagtcatccaagtggttg

SEQ ID NO: 8911 - DNA, 1338 bp, Muscodor strobelii
  misc_feature: SGI cDNA ID NO. 562765
  misc_feature: Encodes the peptide sequence at SEQ ID NO 8912
atggcttcaggataccctgcaccaccgctgcatcaccagcaagctttccagcccgacatggccggcgctccgtctcaacatccgggctacgcccagcttcctcctccgatttcctccaacatgccttctaatatgcctccaagtaattactatgcagacccgatggccaatccccatcgacccaacatgcctccgccacgtgccaacatgatgccaccaaccatgccaggccagcccagggaccggctccctgagatgtctgctccagaaagcggccctggtccgcaacaccagagccaagtgccggtcaaagcggaaccagaggacgcgaagcctgtgaatctagagccacgcgaggggaacgatggcgttagaaaatataagttagaagtagtacaacaaccattgagagctagaatgtgtggatttggcgacaaggatcgacgcccgataacgccaccgccctgcgtcagaattataatcatggatatagagaccggcaaggaggtggatctcaacgaggttgaacaccagcacttcgtcctgcatgtcgacttatgggacgaagaggggcggaaagaagtgaacctcgtaaaacattctcaacaatcaccgtcaatttcctcaacgcaaccttcctctttccgggacgtcattggaagcgatcaagcattccagacaattgtgccatcgcaatccccaacagcggcctaccctcaccagatgtccccttacacggatgcatatggccaagggggttatccttactcacaacaaatgccttcatatggctattcacaggggcgttacggcgatatgccaaatatgccttcattgccatcacagcccatgtttagtcctcgctactctcacgacatggccgccaattccatgggacagaaccgtttgatgggacagcaggcaccgggaacagggatgtatacgcgcaatctcatcgggagcctcgcctctagtgcctcacgtctgaatgatcccaacgagaggattggcatctggtttgtcttgcaggatctcagtgtcagaaccgaaggatggttcaggcttcggttctcgttcatcaaccttcgacggcctgacaggccgtccaacggtgttggcggcagtagctcagatatgctgaccaaacgagcaccggtcctcgcatacgcctttagtgacaaatttcaagtatactcagccaagaaattccctggtgtttgtgaaagtacagcactcagtgtgtgcttcgcccggcagggagtcaagatccctatcagaaaggatcaggagggcaaaggagggaaagctgcccatgacaacgatgacgacgatgactaa

SEQ ID NO: 8912 - protein, 445 aa, Muscodor strobelii
  misc_feature: SGI Peptide ID NO. 562765
  misc_feature (27)..(431): NCBI GI: 39951955 Blast Desc: MGG_01620 [Magnaporthe grisea 70-15] gi|145020532|gb|EDK04661.1| MGG_01620 [Magnaporthe grisea 70-15]
  misc_feature (117)..(426): NCBI GI: 156058157 Blast Desc: SS1G_04810 [Sclerotinia sclerotiorum 1980] gi|154702595|gb|EDO02334.1| SS1G_04810 [Sclerotinia sclerotiorum 1980]
  misc_feature (125)..(442): NCBI GI: 256734292 Blast Desc: NECHADRAFT_74407 [Nectria haematococca mpVI 77-13-4]
  misc_feature (101)..(444): NCBI GI: 171948708 Blast Desc: RYP3 [Ajellomyces capsulatus]
  misc_feature (114)..(445): NCBI GI: 242795933 Blast Desc: developmental regulator VelB [Talaromyces stipitatus ATCC 10500] gi|218719281|gb|EED18701.1| developmental regulator VelB [Talaromyces stipitatus ATCC 10500]
  misc_feature (125)..(444): NCBI GI: 154280759 Blast Desc: conserved [Ajellomyces capsulatus NAm1] gi|150411371|gb|EDN06759.1| conserved [Ajellomyces capsulatus NAm1]
  misc_feature (125)..(444): NCBI GI: 225558139 Blast Desc: conserved [Ajellomyces capsulatus G186AR]
  misc_feature (125)..(428): NCBI GI: 115396864 Blast Desc: conserved [Aspergillus terreus NIH2624] gi|114193640|gb|EAU35340.1| conserved [Aspergillus terreus NIH2624]
  misc_feature (125)..(445): NCBI GI: 119172770 Blast Desc: CIMG_09962 [Coccidioides immitis RS]
  misc_feature (125)..(445): NCBI GI: 240111673 Blast Desc: CPC735_011360 [Coccidioides posadasii C735 delta SOWgp]
MASGYPAPPLHHQQAFQPDMAGAPSQHPGYAQLPPPISSNMPSNMPPSNYYADPMANPHRPNMPPPRANMMPPTMPGQPRDRLPEMSAPESGPGPQHQSQVPVKAEPEDAKPVNLEPREGNDGVRKYKLEVVQQPLRARMCGFGDKDRRPITPPPCVRIIIMDIETGKEVDLNEVEHQHFVLHVDLWDEEGRKEVNLVKHSQQSPSISSTQPSSFRDVIGSDQAFQTIVPSQSPTAAYPHQMSPYTDAYGQGGYPYSQQMPSYGYSQGRYGDMPNMPSLPSQPMFSPRYSHDMAANSMGQNRLMGQQAPGTGMYTRNLIGSLASSASRLNDPNERIGIWFVLQDLSVRTEGWFRLRFSFINLRRPDRPSNGVGGSSSDMLTKRAPVLAYAFSDKFQVYSAKKFPGVCESTALSVCFARQGVKIPIRKDQEGKGGKAAHDNDDDDD

SEQ ID NO: 8913 - DNA, 2160 bp, Muscodor strobelii
  misc_feature: SGI EST ID NO. CUFF.21364.0
  misc_feature: Variant of the nucleotide sequence at SEQ ID NO 8911
ctactctgctcgccgcttgctcggaaatatacgagtagcatcttgcgacctgactttctccctgattttctctcctgtctgttacatctttgcatcgtggcgagaccttcggaagactcatccatagagagaattcattttcgcagcgctactcgctctatacagatttataacgtcctagctcccgctgtcgaatctgcgcaacgcaccaagacccttttcttcaacattttggtcaaataagtctggctggctgctgcaacttctcacgtcctcccgtataacgaattcgacgtcttggagcaccacagagcttgctacttcccattcttgctgccgtctttgtcctggcgactaccgtcttgtcggcagtttgagcacgtcgcactgctgggagcgagtccgcttgctggacttgacctcgccgccgaactgccaggtagctggactacgcatcgcaattgactggcagcgtcgagggcatcgagagcaggaaacatggcttcaggataccctgcaccaccgctgcatcaccagcaagctttccagcccgacatggccggcgctccgtctcaacatccgggctacgcccagcttcctcctccgatttcctccaacatgccttctaatatgcctccaagtaattactatgcagacccgatggccaatccccatcgacccaacatgcctccgccacgtgccaacatgatgccaccaaccatgccaggccagcccagggaccggctccctgagatgtctgctccagaaagcggccctggtccgcaacaccagagccaagtgccggtcaaagcggaaccagaggacgcgaagcctgtgaatctagagccacgcgaggggaacgatggcgttagaaaatataagttagaagtagtacaacaaccattgagagctagaatgtgtggatttggcgacaaggatcgacgcccgataacgccaccgccctgcgtcagaattataatcatggatatagagaccggcaaggaggtggatctcaagtaaggtcgcgtgtggctagcatctcacccatttgctgacctcttaaacagcgaggttgaacaccagcacttcgtcctgcatgtcgacttatgggacgaagaggggcggaaagaagtgaacctcgtaaaacattctcaacaatcaccgtcaatttcctcaacgcaaccttcctctttccgggacgtcattggaagcgatcaagcattccagacaattgtgccatcgcaatccccaacagcggcctaccctcaccagatgtccccttacacggatgcatatggccaagggggttatccttactcacaacaaatgccttcatatggctattcacaggggcgttacggcgatatgccaaatatgccttcattgccatcacagcccatgtttagtcctcgctactctcacgacatggccgccaattccatgggacagaaccgtttgatgggacagcaggcaccgggaacagggatgtatacgcgcaatctcatcgggagcctcgcctctagtgcctcacgtctgaatgatcccaacgagaggattggcatctggtttgtcttgcaggatctcagtgtcagaaccgaaggatggttcaggcttcggttctcgttcatcaaccttcgacggcctgacaggccgtccaacggtgttggcggcagtagctcagatatgctgaccaaacgagcaccggtcctcgcatacgcctttagtgacaaatttcaagtatactcagccaagaaattccctggtgtttgtgaaagtacagcactcagtgtgtgcttcgcccggcagggagtcaagatccctatcagaaaggatcaggagggcaaaggagggaaagctgcccatgacaacgatgacgacgatgactaattcaacggcatgagtcttttgtatatagatgcctgcctacaagcgctgactttagataagaacctgttgcgctattggacaatgcggagcaagagatcgctaccataaatctagcacccagtagaggcaacatcatggatagttcttggtattagcaaaccaaataatagtgtgtatgttgctcatatggacatgtaacagtaaggataatgcgacagtcaccctcttcgcgagatatagaatgactgggcctattcatacgccgtgtctaac

SEQ ID NO: 8914 - DNA, 405 bp, Muscodor strobelii
  misc_feature: SGI cDNA ID NO. 562766
  misc_feature: Reduced expression when VOC is produced
  misc_feature: Encodes the peptide sequence at SEQ ID NO 8915
atgtcgggcatgcagtccactggccgtggcggcgctggtaacattgccgacgcctcaaattcaccccgtcttgagccctctgatcttcagacacctcatcttaagacccctgtggtgacaactggtcgcggaggctcaggtaacatggctccaaacacagatcctgtcgaaactagggcgcggcaagacgttgaagctcatgagcgaccgcccagcactaaggctactcacgttggtcgcggtggtgcagccaatgtcgccagaccctccaacgactccaatgaggtcaagccagtaacgccattctgtggagaggggcttgccggtgacaacgactcacagccacccccaaaccctcctaaagggctggcggcaaaagccaaagatttcttcaagaagacgtag

SEQ ID NO: 8915 - protein, 134 aa, Muscodor strobelii
  misc_feature: SGI Peptide ID NO. 562766
  misc_feature (4)..(86): NCBI GI: 85112094 Blast Desc: NCU02773 [Neurospora crassa OR74A] gi|28926043|gb|EAA35032.1| conserved [Neurospora crassa OR74A]
  misc_feature (1)..(99): NCBI GI: 39951957 Blast Desc: MGG_01621 [Magnaporthe grisea 70-15] gi|145020531|gb|EDK04660.1| MGG_01621 [Magnaporthe grisea 70-15]
  misc_feature (4)..(131): NCBI GI: 256734293 Blast Desc: NECHADRAFT_98630 [Nectria haematococca mpVI 77-13-4]
  misc_feature (4)..(91): NCBI GI: 261355956 Blast Desc: conserved [Verticillium albo-atrum VaMs.102]
  misc_feature (2)..(88): NCBI GI: 116181734 Blast Desc: CHGG_01495 [Chaetomium globosum CBS 148.51] gi|88185792|gb|EAQ93260.1| CHGG_01495 [Chaetomium globosum CBS 148.51]
  misc_feature (1)..(87): NCBI GI: 171696114 Blast Desc: protein product [Podospora anserina] gi|170948299|emb|CAP60463.1| protein product [Podospora anserina]
  misc_feature (6)..(102): NCBI GI: 45188164 Blast Desc: ADR291Cp [Ashbya gossypii ATCC 10895] gi|44982981|gb|AAS52211.1| ADR291Cp [Ashbya gossypii ATCC 10895]
  misc_feature (4)..(97): NCBI GI: 241955869 Blast Desc: uncharacterized protein ydl173w homologue, [Candida dubliniensis CD36] gi|223643997|emb|CAX41737.1| uncharacterized protein ydl173w homologue, [Candida dubliniensis CD36]
  misc_feature (4)..(97): NCBI GI: 68489956 Blast Desc: CaO19.8704 [Candida albicans SC5314] gi|68489999|ref|XP_711159.1| CaO19.1107 [Candida albicans SC5314] gi|46432439|gb|EAK91920.1| CaO19.1107 [Candida albicans SC5314]
  misc_feature (6)..(86): NCBI GI: 240111671 Blast Desc: CPC735_011340 [Coccidioides posadasii C735 delta SOWgp]
  misc_feature: Useful for introducing or modulating the production of volatile compounds
MSGMQSTGRGGAGNIADASNSPRLEPSDLQTPHLKTPVVTTGRGGSGNMAPNTDPVETRARQDVEAHERPPSTKATHVGRGGAANVARPSNDSNEVKPVTPFCGEGLAGDNDSQPPPNPPKGLAAKAKDFFKKT

SEQ ID NO: 8916 - DNA, 1537 bp, Muscodor strobelii
  misc_feature: SGI EST ID NO. CUFF.21358.1
  misc_feature: Variant of the nucleotide sequence at SEQ ID NO 8914
gcgggcctgcaatttatatcttccggatgacccatcgcctgttgcaagcttgcaggacccaagctcagcatgtgcaatatcagataattgtggattaggttggtgtcatatggatgttggtggaaggggaggggacgaaaagtcgcgtgcttttgcgaattggaacgtctactgtaacacggtgcttgcgacgagaaatactaatgatctatcaaaagttcaatcaattgcccggttctgcagacaaataagaaaaacgaggctggccgacttcagaggcgttcctaccatatcgttcttcaaatcagtcgggcacataagcgcacctaccgcaacagccaagcccgccttctctgcgtatcggagtggcttctctcgattgctatttaggacgtgtccttgccctcaacgtcgtcagatctttctctttctcttcgaatctgcgcagcgacttctggaggtgactgctggtaccttattcattccactcatttactgggcggatgagacatctggacttttccaggtcttccatctgaacaacatcgtcaaattccacgactggcatatcacgcaactattttttgctgcaaatcacaccattggagactccagtactcaattactgtgcacaattattcttcaattagattcaagtcatcatcagcatctgaatcagtaacatccaaatccactatccacacaatgtcgggcatgcagtccactggccgtggcggcgctggtaacattgccgacgcctcaaattcaccccgtcttgagccctctgatcttcagacacctcatcttaagacccctgtggtgacaactggtcgcggaggctcaggtaacatggctccaaacacagatcctgtcgaaactagggcgcggcaagacgttgaagctcatgagcgaccgcccagcactaaggctactcacgttggtcgcggtggtgcagccaatgtcgccagaccctccaacgactccaatgaggtcaagccagtaacgccattctgtggagaggggcttgccggtgacaacgactcacagccacccccaaaccctcctaaagggctggcggcaaaagccaaagatttcttcaagaagacgtagaagtctgtgaaggattgtgcggctcgcggaaaagaatcggtcaggaaagtcatcaaggcagagaagtcctttactcagccttaggctacataggagagctgtagcttgcttatctcttcctgttgacgcagcgaagtcatgaaattagtcatgttttgtttttgagatccgacatttagatatggtagaagagaggaatggtggacggaagcgaaagaacgatgataagtgtttgtttttcgatgatatcaaagggtttgttccattatcttttgttttaccttctcggaaaggctcttcgtcggcgtcgacagccagcgctctagcgatacaaactcggcatctatgggtgtcaatggaaaactgattccttcatacttgaactgtttcaacaagcctgatgagacttgaaatctttatgcatacg

SEQ ID NO: 8917 - DNA, 1824 bp, Muscodor strobelii
  misc_feature: SGI cDNA ID NO. 562767
  misc_feature: Encodes the peptide sequence at SEQ ID NO 8918
atggcaacacctgatttagcatcaacctaccgagagctataccgcgcaaaatttcgcaatgatgtgctcaacggtgatgctgagcatttcatagtaccattgcatttattggcttactggattgtgcctacgctctatctaagcataccccacaagaacaggccatggctgtaccaagcgagatgggttgttctcgccttcgtcgttgcatttcatttacgcatgatccgccgcgtggcaagcttgaattttgcttcagcataccttacaggtttactgggtgcatgggcaatgatttggacgtttcgtcttttagtatggactaagccgcaatgggatgcaaagagagttgaacgaagaaagataccgcgtaatgcccaacttgcagtgtcaaattcgttcgagtcttcagcaaaagctccaaggttgcatgccggtgaggttacattggatcggccggtagatctggaaatcgacgggacctttcgggattccgaccctgcactccgtgccgtggacgatcggttccaggcatgcgacgaggatgtcttctcttccgcacttgatggcaacgatttgaaaagacgtcaaggcattccggctcagtcaaacaatcattcatcttcaaataaagacaccgatttactgcgaagattgcatttgattaatatccaagatggaaacgaacatctcgaccggagaacggctgttgagctgatgaacatggctagggaccaggaatacgagtacttttggcaagaatatcctcaggatggttcgttcgcgactcgtttcgactgggcatttgatcttgttagttcttttcgcctgacgggatggaacagtgctccgtcttgtatgccggattttcatccaccaccaactatcggtccagttcaactgccactggaatatggctcacataggagtagacaaggatttcaacgtaccgtttctagacgcagtcttgtcatctctcgcttatgtttcactatcattccggcgtattttgtcatcgatatttgcgccacgattatgaccatggatccctacttcattctcgggccagagcacgggcacccacttcctcgtcacctagcatctttgcatcctgtgttactctcactatttcgcacaattctcgcctttgccggaatcatatccgcacttgagatggtttggaacattggcgccatttccatcgcactttactgtacgccaattctcggtttccgcgctcacccatggcatctgccaactatgagcggatctttcaagcaagttttggacagaggactgactggattctggggtggatggtggcaccaatcgttccgagcagggttttcagctccgactaagtggttactgaagcatagctaccttccctctgattctcctcttggccccttcatcggcgctgttattgctttcacgcaatctggactgcttcatgcagctgcaagttattctgctgtgcctgagacatggcctctaggtccatttactttcttcatgcttgctggtgccggaaccgttctacagagtgttctcgcccatcaatttcagtatcgcattggagaactcccgcgttgggttcggcgtttggggaatctatcctttgtaggactttggctatgggccacagcctggatattaattgacgattttggacgttgtggagtttggctctgggagcctgtgcccttttctcttgccagagccgtaggccttggatatgatcagcgtatatggcgttacgatgcggatttccttccattctggcatcggggtagatggtgggagactgggattgcaatataa

SEQ ID NO: 8918 - protein, 607 aa, Muscodor strobelii
  misc_feature: SGI Peptide ID NO. 562767
  misc_feature (4)..(607): NCBI GI: 256735160 Blast Desc: NECHADRAFT_31316 [Nectria haematococca mpVI 77-13-4]
  misc_feature (2)..(607): NCBI GI: 46108318 Blast Desc: FG01041.1 [Gibberella zeae PH-1]
  misc_feature (14)..(607): NCBI GI: 156036020 Blast Desc: SS1G_12696 [Sclerotinia sclerotiorum 1980] gi|154698104|gb|EDN97842.1| SS1G_12696 [Sclerotinia sclerotiorum 1980]
  misc_feature (84)..(607): NCBI GI: 154314185 Blast Desc: BC1G_05186 [Botryotinia fuckeliana B05.10] gi|150848831|gb|EDN24024.1| BC1G_05186 [Botryotinia fuckeliana B05.10]
  misc_feature (75)..(606): NCBI GI: 145613471 Blast Desc: MGG_01616 [Magnaporthe grisea 70-15] gi|145020537|gb|EDK04666.1| MGG_01616 [Magnaporthe grisea 70-15]
  misc_feature (188)..(604): NCBI GI: 261355937 Blast Desc: conserved [Verticillium albo-atrum VaMs.102]
  misc_feature (2)..(607): NCBI GI: 85111458 Blast Desc: NCU02790 [Neurospora crassa OR74A] gi|28925698|gb|EAA34710.1| [Neurospora crassa OR74A]
  misc_feature (185)..(607): NCBI GI: 189190244 Blast Desc: conserved [Pyrenophora tritici-repentis Pt-1C-BFP] gi|187973067|gb|EDU40566.1| conserved [Pyrenophora tritici-repentis Pt-1C-BFP]
  misc_feature (249)..(607): NCBI GI: 169612455 Blast Desc: SNOG_09350 [Phaeosphaeria nodorum SN15] gi|160702512|gb|EAT83542.2| SNOG_09350 [Phaeosphaeria nodorum SN15]
  misc_feature (242)..(607): NCBI GI: 171696122 Blast Desc: protein product [Podospora anserina] gi|170948303|emb|CAP60467.1| protein product [Podospora anserina]
MATPDLASTYRELYRAKFRNDVLNGDAEHFIVPLHLLAYWIVPTLYLSIPHKNRPWLYQARWVVLAFVVAFHLRMIRRVASLNFASAYLTGLLGAWAMIWTFRLLVWTKPQWDAKRVERRKIPRNAQLAVSNSFESSAKAPRLHAGEVTLDRPVDLEIDGTFRDSDPALRAVDDRFQACDEDVFSSALDGNDLKRRQGIPAQSNNHSSSNKDTDLLRRLHLINIQDGNEHLDRRTAVELMNMARDQEYEYFWQEYPQDGSFATRFDWAFDLVSSFRLTGWNSAPSCMPDFHPPPTIGPVQLPLEYGSHRSRQGFQRTVSRRSLVISRLCFTIIPAYFVIDICATIMTMDPYFILGPEHGHPLPRHLASLHPVLLSLFRTILAFAGIISALEMVWNIGAISIALYCTPILGFRAHPWHLPTMSGSFKQVLDRGLTGFWGGWWHQSFRAGFSAPTKWLLKHSYLPSDSPLGPFIGAVIAFTQSGLLHAAASYSAVPETWPLGPFTFFMLAGAGTVLQSVLAHQFQYRIGELPRWVRRLGNLSFVGLWLWATAWILIDDFGRCGVWLWEPVPFSLARAVGLGYDQRIWRYDADFLPFWHRGRWWETGIAI

SEQ ID NO: 8919 - DNA, 2257 bp, Muscodor strobelii
  misc_feature: SGI EST ID NO. CUFF.21332.1
  misc_feature: Variant of the nucleotide sequence at SEQ ID NO 8917
gcctacgtcatcaaagttttaccagaacccgcgtctttggcaccggtgaagaggcgtgacccgattccaaagcttgagcttaagcttaagcagcttcagggccctcggccgtaagccattgcgagtttgatatttgcgagaatggcaacacctgatttagcatcaacctaccgagagctataccgcgcaaaatttcgcaatgatgtgctcaacggtgatgctgagcatttcatagtaccattgcatttattggcttactggattgtgcctacgctctatctaagcataccccacaagaacaggccatggctgtaccaagcgagatgggttgttctcgccttcgtcgttgcatttcatttacgcatgatccgccgcgtggcaagcttgaattttgcttcagcataccttacaggtttactgggtgcatgggcaatgatttggacgtttcgtcttttagtatggactaagccgcaatgggatgcaaagagagttgaacgaagaaagataccgcgtaatgcccaacttgcagtgtcaaattcgttcgagtcttcagcaaaagctccaaggttgcatgccggtgaggttacattggatcggccggtagatctggaaatcgacgggacctttcgggattccgaccctgcactccgtgccgtggacgatcggttccaggcatgcgacgaggatgtcttctcttccgcacttgatggcaacgatttgaaaagacgtcaaggcattccggctcagtcaaacaatcattcatcttcaaataaagacaccgatttactgcgaagattgcatttgattaatatccaagatggaaacgaacatctcgaccggagaacggctgttgagctgatgaacatggctagggaccaggaatacgagtacttttggcaagaatatcctcaggatggttcgttcgcgactcgtttcgactgggcatttgatcttgttagttcttttcgcctgacgggatggaacagtgctccgtcttgtatgccggattttcatccaccaccaactatcggtccagttcaactgccactggaatatggctcacataggagtagacaaggatttcaacgtaccgtttctagacgcagtcttgtcatctctcgcttatgtttcactatcattccggcgtattttgtcatcgatatttgcgccacgattatgaccatggatccctacttcattctcgggccagagcacgggcacccacttcctcgtcacctagcatctttgcatcctgtgttactctcactatttcgcacaattctcgcctttgccggaatcatatccgcacttgagatggtttggaacattggcgccatttccatcgcactttactgtacgccaattctcggtttccgcgctcacccatggcatctgccaactatgagcggatctttcaagcaagttttggacagaggactgactggattctggggtggatggtggcaccaatcgttccgagcagggttttcagctccgactaagtggttactgaagcatagctaccttccctctgattctcctcttggccccttcatcggcgctgttattgctttcacgcaatctggactgcttcatgcagctgcaagttattctgctgtgcctgagacatggcctctaggtccatttactttcttcatgcttgctggtgccggaaccgttctacagagtgttctcgcccatcaatttcagtatcgcattggagaactcccgcgttgggttcggcgtttggggaatctatcctttgtaggactttggctatgggccacagcctggatattaattgacgattttggacgttgtggagtttggctctgggagcctgtgcccttttctcttgccagagccgtaggccttggatatgatcagcgtatatggcgttacgatgcggatttccttccattctggcatcggggtagatggtgggagactgggattgcaatataaaggggataaaactgggacatatttggtaatgcatggcgttgaagcgaagcaagattatatgcattttgaacataccttgatcattcacaaagatcattctggggaacatatatattgatagttttcgcaccgagaccaaacccgctcgcctctttcgcttggtctcccattgcgactaggaaactggaataaagacataatcaccgtatgctccagcccatattttagattggactgtacttgtaccatctatagcagtttcttccacggatcgataaggtctcgtctcaat

SEQ ID NO: 8920 - DNA, 309 bp, Muscodor strobelii
  misc_feature: SGI cDNA ID NO. 562768
  misc_feature: Encodes the peptide sequence at SEQ ID NO 8921
atggagcatctgcatcggcactatcacgaccccaatgccaagaagaaagcgagggtcgggtacaaagatctgcagatgccctccgatctggacaagtaccagacattccgtaactccttcacacgtctcgctggcgaattccaactgtcgaaagacgattacaagggagagttttatgacaaacttgcttcatgtatccgcaccgcagggctcgcaatcatctctgagctggcggttttccaagacccgatctccatccttcgtctcaactggtgtcttattgcgaccagttgggctgctttgacttag

SEQ ID NO: 8921 - protein, 102 aa, Muscodor strobelii
  misc_feature: SGI Peptide ID NO. 562768
  misc_feature (2)..(72): NCBI GI: 226294057 Blast Desc: conserved [Paracoccidioides brasiliensis Pb18]
  misc_feature (2)..(72): NCBI GI: 225680277 Blast Desc: [Paracoccidioides brasiliensis Pb03]
  misc_feature (2)..(72): NCBI GI: 225684412 Blast Desc: [Paracoccidioides brasiliensis Pb03]
  misc_feature (2)..(72): NCBI GI: 225681346 Blast Desc: [Paracoccidioides brasiliensis Pb03]
  misc_feature (2)..(72): NCBI GI: 225679082 Blast Desc: [Paracoccidioides brasiliensis Pb03]
  misc_feature (2)..(81): NCBI GI: 226286172 Blast Desc: conserved [Paracoccidioides brasiliensis Pb01]
MEHLHRHYHDPNAKKKARVGYKDLQMPSDLDKYQTFRNSFTRLAGEFQLSKDDYKGEFYDKLASCIRTAGLAIISELAVFQDPISILRLNWCLIATSWAALT

SEQ ID NO: 8922 - DNA, 322 bp, Muscodor strobelii
  misc_feature: SGI EST ID NO. CUFF.21335.0
  misc_feature: Variant of the nucleotide sequence at SEQ ID NO 8920
cagatgccctccgatctggacaagtaccagacattccgtaactccttcacacgtctcgctggcgaattccaactgtcgaaagacgattacaagggagagttttatgacaaacttgcttcatgtatccgcaccgcagggctcgcaatcatctctgagctggcggttttccaagacccgatctccatccttcgtctcaactggtgtcttgtaagctgatgtcctctgaaaactaacgctccgaatagttatcagatattgcgtagagtttagctttgatcctaattcaaaatagattgcgaccagttgggctgctttgacttag

SEQ ID NO: 8923 - DNA, 1032 bp, Muscodor strobelii
  misc_feature: SGI cDNA ID NO. 562769
  misc_feature: Reduced expression when VOC is produced
  misc_feature: Encodes the peptide sequence at SEQ ID NO 8924
atggctaacctgaatacccctatcgaaaatagcttggaggggagactcctatttgctgttcctaagaagggtcggttgaaccaggcagctctcaaccttctccaaggagccgatattcagttcagacgagaaacccgcctcgatatcgccctagtcaaaaacttaccgattgcactcatctttctgcccgctgctgacatacccactttcgtcggtgaaggtcaggtcgatctcggtattaccggctgggatcaggttcaagagcatgatgcaggtgtgcgcgctctattcagagcacggcgcttctcaggagagattacacccgaagaagagaatgtacaatcctccaaaggctctggttgcgagaccgtcttagacttaggctttggcggttgtaaactccaggtgcaagtacctcagaacggtgcttacagctcgcccaaagacttgatcgggaagaacattggcacgagttttgtgaacctggcgcaccggtactttgccaacctggaaatggaggtagactctgccaatccacagctagacaatcagccagtaaaactatcctccaagctgaggacaaatatcatcgagctctccggtagcgtagaggccgcttgcgctctcggcgtagctgatggcatcgttgatcttgttgaatcgggagaaacgatgaaagctgcgggtttgaaacctattgataccgtcattgagactactgccatcctcatcaaatcgagaaaaccaaccaatccagagctcgtcgatctcatcgcatctcggatacgtggagtcatcactgctcaaagatatgtattatgtcagtacaacgtgcagagaagtggtcttgcagctgctgcaaagattgctcccggaaagcgcgctccaaccgtcacatcgctggaagaggatggctgggtcgccgtcagtgtaatggtagaaaagaagaagattgcgccgattatggacgagctacaaaaagttggcgcgcacgatatcttggtcctagacatcgcaaatacaagagattag

SEQ ID NO: 8924 - protein, 343 aa, Muscodor strobelii
  misc_feature: SGI Peptide ID NO. 562769
  misc_feature (62)..(266): Pfam Id: PF01634 Pfam Desc: ATP phosphoribosyltransferase
  misc_feature (267)..(341): Pfam Id: PF08029 Pfam Desc: HisG, C-terminal domain
  misc_feature (122)..(266): Pfam Id: PF01634 Pfam Desc: ATP phosphoribosyltransferase
  misc_feature (62)..(95): Pfam Id: PF01634 Pfam Desc: ATP phosphoribosyltransferase
  misc_feature (1)..(342): NCBI GI: 116180310 Blast Desc: conserved [Chaetomium globosum CBS 148.51] gi|88185080|gb|EAQ92548.1| conserved [Chaetomium globosum CBS 148.51]
  misc_feature (5)..(342): NCBI GI: 164423000 Blast Desc: ATP phosphoribosyltransferase [Neurospora crassa OR74A] gi|157069906|gb|EAA34788.2| ATP phosphoribosyltransferase [Neurospora crassa OR74A]
  misc_feature (10)..(342): NCBI GI: 256735004 Blast Desc: NECHADRAFT_65366 [Nectria haematococca mpVI 77-13-4]
  misc_feature (10)..(342): NCBI GI: 154323858 Blast Desc: ATP phosphoribosyltransferase [Botryotinia fuckeliana B05.10] gi|150842557|gb|EDN17750.1| ATP phosphoribosyltransferase [Botryotinia fuckeliana B05.10]
  misc_feature (8)..(342): NCBI GI: 261355920 Blast Desc: ATP phosphoribosyltransferase [Verticillium albo-atrum VaMs.102]
  misc_feature (10)..(342): NCBI GI: 145247997 Blast Desc: An13g01080 [Aspergillus niger] gi|134080994|emb|CAK41508.1| protein product [Aspergillus niger]
  misc_feature (16)..(342): NCBI GI: 156056635 Blast Desc: SS1G_04048 [Sclerotinia sclerotiorum 1980] gi|154701834|gb|EDO01573.1| SS1G_04048 [Sclerotinia sclerotiorum 1980]
  misc_feature (10)..(342): NCBI GI: 259481705 Blast Desc: TPA: conserved :ATP-phosphoribosyltransferase (Eurofung) [Aspergillus nidulans FGSC A4]
  misc_feature (10)..(342): NCBI GI: 212536452 Blast Desc: ATP phosphoribosyltransferase His1, [Penicillium marneffei ATCC 18224] gi|170676371|gb|ACB30373.1| ATP phosphoribosyltransferase [Penicillium marneffei] ATP His1, ATCC
  misc_feature (10)..(342): NCBI GI: 242795662 Blast Desc: ATP phosphoribosyltransferase His1, [Talaromyces stipitatus ATCC 10500] gi|218719226|gb|EED18646.1| ATP phosphoribosyltransferase His1, [Talaromyces stipitatus ATCC
  misc_feature (10)..(342): SWISSPROT Homolog: EC 2.4.2.17 ATP phosphoribosyltransferase
  misc_feature: Useful for introducing or modulating the production of volatile compounds
MANLNTPIENSLEGRLLFAVPKKGRLNQAALNLLQGADIQFRRETRLDIALVKNLPIALIFLPAADIPTFVGEGQVDLGITGWDQVQEHDAGVRALFRARRFSGEITPEEENVQSSKGSGCETVLDLGFGGCKLQVQVPQNGAYSSPKDLIGKNIGTSFVNLAHRYFANLEMEVDSANPQLDNQPVKLSSKLRTNIIELSGSVEAACALGVADGIVDLVESGETMKAAGLKPIDTVIETTAILIKSRKPTNPELVDLIASRIRGVITAQRYVLCQYNVQRSGLAAAAKIAPGKRAPTVTSLEEDGWVAVSVMVEKKKIAPIMDELQKVGAHDILVLDIANTRD

SEQ ID NO: 8925 - DNA, 1431 bp, Muscodor strobelii
  misc_feature: SGI EST ID NO. CUFF.21342.0
  misc_feature: Variant of the nucleotide sequence at SEQ ID NO 8923
cccaaaaagctcacagcattgcacactacccgagcttcattcgacagctggaattcaaagagctggaattcaccctagcctacacgcaatcacccgtatgaattatcgtctgctgcagcaatccctcaattgatagctctttttgccaagttcacaaagagtgcccctatccgacacgataccaccttagctcctcatctccccgcgttttgcgcggacgaagcgtactgctcttgtactacattttcactcctaaggccttgaccgaagagtcttttccgacagaagccatggatttggtgaaccacttggaggggagactcctatttgctgttcctaagaagggtcggttgaaccaggcagctctcaaccttctccaaggagccgatattcagttcagacgagaaacccgcctcgatatcgccctagtcaaaaacttaccgattgcactcatctttctgcccgctgctgacatacccactttcgtcggtgaaggtcaggtcgatctcggtattaccggctgggatcaggttcaagagcatgatgcaggtgtgcgcgctctattcagagcacggcgcttctcaggagagattacacccgaagaagagaatgtacaatcctccaaaggctctggttgcgagaccgtcttagacttaggctttggcggttgtaaactccaggtgcaagtacctcagaacggtgcttacagctcgcccaaagacttgatcgggaagaacattggcacgagttttgtgaacctggcgcaccggtactttgccaacctggaaatggaggtagactctgccaatccacagctagacaatcagccagtaaaactatcctccaagctgaggacaaatatcatcgagctctccggtagcgtagaggccgcttgcgctctcggcgtagctgatggcatcgttgatcttgttggtgagtctcttgctattgttcgatttcaactcatctggaacatgctaacgcgaatagaatcgggagaaacgatgaaagctgcgggtttgaaacctattgataccgtcattgagactactgccatcctcatcaaatcgagaaaaccaaccaatccagagctcgtcgatctcatcgcatctcggatacgtggagtcatcactgctcaaagatatgtattatgtcagtacaacgtgcagagaagtggtcttgcagctgctgcaaagattgctcccggaaagcgcgctccaaccgtcacatcgctggaagaggatggctgggtcgccgtcagtgtaatggtagaaaagaagaagattgcgccgattatggacgagctacaaaaagttggcgcgcacgatatcttggtcctagacatcgcaaatacaagagattagctgagacacaagagtattcataacaataaaaatgataaatcgtcaaacctactacatgacagaccat

SEQ ID NO: 8926 - DNA, 1626 bp, Muscodor strobelii
  misc_feature: SGI cDNA ID NO. 562770
  misc_feature: Encodes the peptide sequence at SEQ ID NO 8927
atgtcgcgatggctgggacatccctctgtcaagggcagctttgaagccacgcgaatggctctgctgacgctcaatacagttggcatcaccttcgtttggggcatagaacagacgtattgcacgccatacctcctctcccttggattgacaaagagcagaacgtcgctcgtgtggatcgccggtccgctttctggcctaattgttcagcctcttgttggcacaattgcagacagatctacgtcgagatgggggaggagacggccctttattgtcgttggagctatcataacagctctatgtcttctcgtgttgggtttcacaaaggaatttgttagcttcttcgttgccgacgaccaggagtctcaacatctgacagttactatggcggtattgtcaatttatgccgtcgatttttcgatcaatgcagttatgagtgcggccaggagtcttgtagtcgatactctacccattgaaaagcaacagacaggatcggcttggggaagtagaatgtctgccattggccatggaattgcgtttgcaacaggcgccatagacctgccttcactcctgggcacgtctctgggtgagacccaattcaagcagcttacagtactagcagcactgctgctggttgcaacctgtggcatcacgtgcttggctgtgaccgaaagagttttgatatccagtggtccaaattctcagaaagaagagggactgcatcaaatcgttactcaaatctggtcgacgatattacacttacctcctcgtattcgggctatttgcatggctcagttttgggcctggatcggatggttccctttcctcttctacagcacaacctggattggcgagacctatttccgatatgacgccccacatgatgccaagcagtcgggagatgccctcggagaggttgggcgagtaggtagtagagcgtttatcatctactcgattatcacattctttggcagctggtttctgcctcttgtcattcgatctccggacgatgagaactacacacaacgaccaccacagagcatcgcaccgctgctggagaagctcaatgcatacaagcccgacttgctaactgcctggatatgtgctcatgctacctttgccactgctatgatgtttgcgccattcgcacacagtttcagatttgcgactgtgctagtctgcatctgtggactaccctggaacattgcttcatgggcgccgcacgccttcctgggcgtggaagttaacaagctaagtggcggcggaggtgcatcgtatcgacggctgtcggatgcgtcggtggaaatgacagacctcaatgggtctatgttgcatctagagcacggtccagaggacacgacgacgtcgaaatctacgggcgagctctctggggtctactttgggatcttgaatatctacacgacaatcccgcagttcattgggaccattctgtcaacgattgtgttcagcatcctggaacctggcaagagccccgaacttgcgcataacgcgcatccagacgagcatcacagcacggacggaccaaatggggttgcagtgtgcttattcattggcgcattgagtgccattgcggctgtgttcgcgacaaagaagcttaaaagcatgtaa

SEQ ID NO: 8927 - protein, 541 aa, Muscodor strobelii
  misc_feature: SGI Peptide ID NO. 562770
  misc_feature (22)..(286): Pfam Id: PF07690 Pfam Desc: Major Facilitator Superfamily
  misc_feature (1)..(541): NCBI GI: 46108322 Blast Desc: FG01043.1 [Gibberella zeae PH-1]
  misc_feature (1)..(541): NCBI GI: 256735158 Blast Desc: NECHADRAFT_30693 [Nectria haematococca mpVI 77-13-4]
  misc_feature (1)..(539): NCBI GI: 171687929 Blast Desc: protein product [Podospora anserina] gi|170943926|emb|CAP69578.1| protein product [Podospora anserina]
  misc_feature (2)..(539): NCBI GI: 119492399 Blast Desc: sucrose transport protein [Neosartorya fischeri NRRL 181] gi|119411751|gb|EAW21694.1| sucrose transport protein [Neosartorya fischeri NRRL 181]
  misc_feature (1)..(541): NCBI GI: 156045669 Blast Desc: SS1G_10025 [Sclerotinia sclerotiorum 1980] gi|154694418|gb|EDN94156.1| SS1G_10025 [Sclerotinia sclerotiorum 1980]
  misc_feature (2)..(539): NCBI GI: 121705210 Blast Desc: sucrose transport protein [Aspergillus clavatus NRRL 1] gi|119399014|gb|EAW09442.1| sucrose transport protein [Aspergillus clavatus NRRL 1]
  misc_feature (2)..(539): NCBI GI: 115384880 Blast Desc: conserved [Aspergillus terreus NIH2624] gi|114196679|gb|EAU38379.1| conserved [Aspergillus terreus NIH2624]
  misc_feature (31)..(541): NCBI GI: 116180312 Blast Desc: CHGG_00784 [Chaetomium globosum CBS 148.51] gi|88185081|gb|EAQ92549.1| CHGG_00784 [Chaetomium globosum CBS 148.51]
  misc_feature (2)..(539): NCBI GI: 145233943 Blast Desc: An02g12160 [Aspergillus niger] gi|134057283|emb|CAK37897.1| protein product [Aspergillus niger]
  misc_feature (4)..(539): NCBI GI: 240281093 Blast Desc: sucrose transporter [Ajellomyces capsulatus H143]
MSRWLGHPSVKGSFEATRMALLTLNTVGITFVWGIEQTYCTPYLLSLGLTKSRTSLVWIAGPLSGLIVQPLVGTIADRSTSRWGRRRPFIVVGAIITALCLLVLGFTKEFVSFFVADDQESQHLTVTMAVLSIYAVDFSINAVMSAARSLVVDTLPIEKQQTGSAWGSRMSAIGHGIAFATGAIDLPSLLGTSLGETQFKQLTVLAALLLVATCGITCLAVTERVLISSGPNSQKEEGLHQIVTQIWSTILHLPPRIRAICMAQFWAWIGWFPFLFYSTTWIGETYFRYDAPHDAKQSGDALGEVGRVGSRAFIIYSIITFFGSWFLPLVIRSPDDENYTQRPPQSIAPLLEKLNAYKPDLLTAWICAHATFATAMMFAPFAHSFRFATVLVCICGLPWNIASWAPHAFLGVEVNKLSGGGGASYRRLSDASVEMTDLNGSMLHLEHGPEDTTTSKSTGELSGVYFGILNIYTTIPQFIGTILSTIVFSILEPGKSPELAHNAHPDEHHSTDGPNGVAVCLFIGALSAIAAVFATKKLKSM

SEQ ID NO: 8928 - DNA, 3925 bp, Muscodor strobelii
  misc_feature: SGI EST ID NO. CUFF.21392.1
  misc_feature: Variant of the nucleotide sequence at SEQ ID NO 8926
tggtcacacaggctgacgagacacaatgcataacagaattgcgatatgtcgcctctggggactcgcaatgtcggttgataaggggccaaggcaaaagccgcaagtgggtgccatggtgcgagccagacggctggattcccggacccccctgaactgcccatacccagtcttttcgtgtcggaaatagaaaccccaaagttccgtcttgatatatgaaggtattctgtatctcttggatctctgacacacgcgctatccgtccgaacgacttgcccatcaatcctctcccgccatccaccaagctctacagtggcctcagctagggttctcgctgagattatttgataattaatgggaatcacgtagagaacgcccgtatcctgcgacgccgaaccctaacaccgacccggtcgcttcgacatcgtgagaaaccgaaccgccgaaccaaacacgtgtgccagtcactcatatagcaaagcttcacacttcagatcgacccttccatcacgctatgtcgcgatggctgggacatccctctgtcaagggcagctttgaagccacgcgaatggctctgctgacgctcaatacagttggcatcaccttcgtttggggcatagaacagacgtattgcacgccatacctcctctcccttggattgacaaagagcagaacgtcgctcgtgtggatcgccggtccgctttctggcctaattgttcagcctcttgttggcacaattgcagacagatctacgtcgagatgggggaggagacggccctttattgtcgttggagctatcataacagctctatgtcttctcgtgttgggtttcacaaaggaatttgttagcttcttcgttgccgacgaccaggagtctcaacatctgacagttactatggcggtattgtcaatttatgccgtcgatttttcgatcaatgcagttatgagtgcggccaggagtcttgtagtcgatactctacccattgaaaagcaacagacaggatcggcttggggaagtagaatgtctgccattggccatggaattgcgtttgcaacaggcgccatagacctgccttcactcctgggcacgtctctgggtgagacccaattcaagcagcttacagtactagcagcactgctgctggttgcaacctgtggcatcacgtgcttggctgtgaccgaaagagttttgatatccagtggtccaaattctcagaaagaagagggactgcatcaaatcgttactcaaatctggtcgacgatattacacttacctcctcgtattcgggctatttgcatggctcagttttgggcctggatcggatggttccctttcctcttctacagcacaacctggattggcgagacctatttccgatatgacgccccacatgatgccaagcagtcgggagatgccctcggagaggttgggcgagtaggtagtagagcgtttatcatctactcgattatcacattctttggcagctggtttctgcctcttgtcattcgatctccggacgatgagaactacacacaacgaccaccacagagcatcgcaccgctgctggagaagctcaatgcatacaagcccgacttgctaactgcctggatatgtgctcatgctacctttgccactgctatgatgtttgcgccattcgcacacagtttcagatttgcgactgtgctagtctgcatctgtggactaccctggaacattgcttcatgggcgccgcacgccttcctgggcgtggaagttaacaagctaagtggcggcggaggtgcatcgtatcgacggctgtcggatgcgtcggtggaaatgacagacctcaatgggtctatgttgcatctagagcacggtccagaggacacgacgacgtcgaaatctacgggcgagctctctggggtctactttgggatcttgaatatctacacgacaatcccgcagttcattgggaccattctgtcaacgattgtgttcagcatcctggaacctggcaagagccccgaacttgcgcataacgcgcatccagacgagcatcacagcacggacggaccaaatggggttgcagtgtgcttattcattggcgcattgagtgccattgcggctgtgttcgcgacaaagaagcttaaaagcatgtaagaatacgagattaccgatagatctggtttatcgagaatacccttggtcaggagttgcattcctttcgggcaagcaatggcgttcatgggtggcagcgttcaggctctgagcatgtagactatctgaatgcaatgtattatcagcagattcaatacctacttgtcgaatgataaaatgaaaatagtgactagcgttccaacacgtgagacgggcgaattgataattctacgcgcaagtagtttgtagattgacataggattacataattcaatgccccacatccaggaagaaagttactggcgagggccaaatgatacaacaaaaaaggtcattgtggatttaacaagctcatgatttaactgagccacttgacgtctatttctcccttctttcttgcttggccaggccagataaaatggctcctaccgcgcccaccaaacgccgttcactgcgtgcaaagctcgccgcaaagagcggccccgagccccatgcaccacgcaaggcaggccggcccgacgccgttgcaccgtccgtcgacgggtttacgagtaccaagaaagacaagcggacgatgaagcactccgttttcgtctcgcgcatcgagaaggccaatcgcaagcccctcaaacgacggcgaccaagcaagaagctcgtcacgaatctcgattcgctcgctaatgcgctaccggacctactttccaacggtgaaacggaggaaggcctcaagcagctccgcgagggcaagatccgtcacaagagtctgaagtcaggtggcggcgcattgaaaaagaaagagaagatcgtgcgtggggagatgaacagattcggacagagtctttcgcgacttaatgccgtgggtgctcatgctgctgcgggagccgaggctgccgagcagactggacaaatggactctcaaacccagacacaggcacaaacctcggcttcgaccgcgagtcggttcgcggctttgcgaggattcatcagccagacgatggagcagcatcctgcatttgttaggaaatgagaagacgtcaggactatcacgaagactctaattcgcagagactaaaattacgacccatgctcacttttgagggcgatacggctaaccgctcctaccggaaatattattattctttgtcgagcagagtagcatgttgcaagctgctcaaaactcccgcaaagatgtgagtagatgggaatggtttctgactagtagacacgagacaacgtggttatgtatccatcttaaactggctatgcttgaatttgtaacggaattcattgtcatccaagatgtccactacggctagaggctcaggtacagcacagttacagcagctaaactctggactctcactgtggggattcccagtgggattgtcacatgcaaaggctaagttcaagctggagaccttgctaccgcgcagcgattacgttgacggggatcagatggcaagagaaataaactatatttgtccaaggatagtctcaacaagcgaaaattctttaagaggaatcattgcttccttggttttgatgatactaagaaagagagtgttgtgaattgaagactctatgaatagcccgtgaccaaatggggtctagattggaacgtgtctgtacgacatcagcaactcagtgacctacatacctaatgcaagaggtaatgacgttactggagaggcgccacaattccggggctgttgaagatctgggccgagcctttccatccgcagatcagtgcagatgcgcttttaagattcatttacgacgacagagtttccg

SEQ ID NO: 8929 - DNA, 609 bp, Muscodor strobelii
  misc_feature: SGI cDNA ID NO. 562771
  misc_feature: Reduced expression when VOC is produced
  misc_feature: Encodes the peptide sequence at SEQ ID NO 8930
atggctcctaccgcgcccaccaaacgccgttcactgcgtgcaaagctcgccgcaaagagcggccccgagccccatgcaccacgcaaggcaggccggcccgacgccgttgcaccgtccgtcgacgggtttacgagtaccaagaaagacaagcggacgatgaagcactccgttttcgtctcgcgcatcgagaaggccaatcgcaagcccctcaaacgacggcgaccaagcaagaagctcgtcacgaatctcgattcgctcgctaatgcgctaccggacctactttccaacggtgaaacggaggaaggcctcaagcagctccgcgagggcaagatccgtcacaagagtctgaagtcaggtggcggcgcattgaaaaagaaagagaagatcgtgcgtggggagatgaacagattcggacagagtctttcgcgacttaatgccgtgggtgctcatgctgctgcgggagccgaggctgccgagcagactggacaaatggactctcaaacccagacacaggcacaaacctcggcttcgaccgcgagtcggttcgcggctttgcgaggattcatcagccagacgatggagcagcatcctgcatttgttaggaaatga

SEQ ID NO: 8930 - protein, 202 aa, Muscodor strobelii
  misc_feature: SGI Peptide ID NO. 562771
  misc_feature (24)..(199): NCBI GI: 46121297 Blast Desc: FG05027.1 [Gibberella zeae PH-1]
  misc_feature (1)..(202): NCBI GI: 85112685 Blast Desc: NCU00735 [Neurospora crassa OR74A] gi|28926168|gb|EAA35152.1| [Neurospora crassa OR74A]
  misc_feature (2)..(202): NCBI GI: 116181076 Blast Desc: CHGG_01166 [Chaetomium globosum CBS 148.51] gi|88185463|gb|EAQ92931.1| CHGG_01166 [Chaetomium globosum CBS 148.51]
  misc_feature (41)..(199): NCBI GI: 156036144 Blast Desc: SS1G_12758 [Sclerotinia sclerotiorum 1980] gi|154698166|gb|EDN97904.1| SS1G_12758 [Sclerotinia sclerotiorum 1980]
  misc_feature (2)..(202): NCBI GI: 171695818 Blast Desc: protein product [Podospora anserina] gi|170948151|emb|CAP60315.1| protein product [Podospora anserina]
  misc_feature (12)..(199): NCBI GI: 154314299 Blast Desc: BC1G_05243 [Botryotinia fuckeliana B05.10] gi|150848888|gb|EDN24081.1| BC1G_05243 [Botryotinia fuckeliana B05.10]
  misc_feature (43)..(199): NCBI GI: 238843025 Blast Desc: conserved [Microsporum canis CBS 113480]
  misc_feature (24)..(200): NCBI GI: 256726786 Blast Desc: NECHADRAFT_66135 [Nectria haematococca mpVI 77-13-4]
  misc_feature (1)..(199): NCBI GI: 242796148 Blast Desc: conserved [Talaromyces stipitatus ATCC 10500] gi|218719327|gb|EED18747.1| conserved [Talaromyces stipitatus ATCC 10500]
  misc_feature (1)..(201): NCBI GI: 226287684 Blast Desc: conserved [Paracoccidioides brasiliensis Pb18]
  misc_feature: Useful for introducing or modulating the production of volatile compounds
MAPTAPTKRRSLRAKLAAKSGPEPHAPRKAGRPDAVAPSVDGFTSTKKDKRTMKHSVFVSRIEKANRKPLKRRRPSKKLVTNLDSLANALPDLLSNGETEEGLKQLREGKIRHKSLKSGGGALKKKEKIVRGEMNRFGQSLSRLNAVGAHAAAGAEAAEQTGQMDSQTQTQAQTSASTASRFAALRGFISQTMEQHPAFVRK

SEQ ID NO: 8931 - DNA, 3925 bp, Muscodor strobelii; identical to SEQ ID NO: 8928
  misc_feature: SGI EST ID NO. CUFF.21392.1
  misc_feature: Variant of the nucleotide sequence at SEQ ID NO 8929

SEQ ID NO: 8932 - DNA, 768 bp, Muscodor strobelii
  misc_feature: SGI cDNA ID NO. 562772
  misc_feature: Encodes the peptide sequence at SEQ ID NO 8933
atgactcgtcgtcttcgctcccaagaaccaaactcagaccactcccagctgtcacccgctcccgcctcggatagaccctacctctcctatcatgatatcctcttgacctacgaggatatcaaggccctcaagaatgactggctgaccgacaacaatatcgctttctgggaggagttcatggagcatgaggtcctcaccaagtacccccaagcacacatcgtcctgcttcggccttccatgacattcttgttgatgaagaataaggacacggacatggtccgcgacgccctgcccgacctccgccacattacccacatcttcctgccgatcaacgacaaccgcaacgtcaaccaagctgagggcggcagtcattggtccctgctcctcgttagcatcatcgatggagttgccttccactacgactcgctcgagggtagcaataacaatgaagcctgggaagcctccaagcggctctcaagtgtcctgggccggcccctgcgcttccactacttagccgagtgtccccagcaagacaacgggagcgactgcggcgtctttgtctgcatcatcatgcgacacctcctggtgaagcgtcttctggccgttaatgctggtgagaagatttcgatgagcatggctggtaaggcaatcgatagtgccggtgcccgcaaggaaatgctgaagatcatcgagaacttacgcaaggagggtgagagacggcgcgtcccgtcacaatctgcagatcatacaccgccgcgaatcgattag

SEQ ID NO: 8933 - protein, 255 aa, Muscodor strobelii
  misc_feature: SGI Peptide ID NO. 562772
  misc_feature (46)..(226): Pfam Id: PF02902 Pfam Desc: Ulp1 protease family, C-terminal catalytic domain
  misc_feature (46)..(194): Pfam Id: PF02902 Pfam Desc: Ulp1 protease family, C-terminal catalytic domain
  misc_feature (22)..(236): NCBI GI: 46121295 Blast Desc: FG05026.1 [Gibberella zeae PH-1]
  misc_feature (22)..(236): NCBI GI: 256727348 Blast Desc: NECHADRAFT_57904 [Nectria haematococca mpVI 77-13-4]
  misc_feature (25)..(255): NCBI GI: 164428561 Blast Desc: NCU00734 [Neurospora crassa OR74A] gi|157072193|gb|EAA35151.2| conserved [Neurospora crassa OR74A]
  misc_feature (27)..(241): NCBI GI: 171695820 Blast Desc: protein product [Podospora anserina] gi|170948152|emb|CAP60316.1| protein product [Podospora anserina]
  misc_feature (26)..(255): NCBI GI: 156036148 Blast Desc: SS1G_12760 [Sclerotinia sclerotiorum 1980] gi|154698168|gb|EDN97906.1| SS1G_12760 [Sclerotinia sclerotiorum 1980]
  misc_feature (22)..(255): NCBI GI: 116181074 Blast Desc: CHGG_01165 [Chaetomium globosum CBS 148.51] gi|88185462|gb|EAQ92930.1| CHGG_01165 [Chaetomium globosum CBS 148.51]
  misc_feature (28)..(255): NCBI GI: 261356523 Blast Desc: NEDD8-specific protease [Verticillium albo-atrum VaMs.102]
  misc_feature (24)..(241): NCBI GI: 238482147 Blast Desc: Ulp1 protease family protein [Aspergillus flavus NRRL3357] gi|220700362|gb|EED56700.1| Ulp1 protease family protein [Aspergillus flavus NRRL3357]
  misc_feature (24)..(245): NCBI GI: 145248019 Blast Desc: An13g01190 [Aspergillus niger] gi|134081006|emb|CAK41519.1| protein product [Aspergillus niger]
  misc_feature (15)..(241): NCBI GI: 261188319 Blast Desc: Ulp1 protease [Ajellomyces dermatitidis SLH14081] gi|239593254|gb|EEQ75835.1| Ulp1 protease [Ajellomyces dermatitidis SLH14081]
MTRRLRSQEPNSDHSQLSPAPASDRPYLSYHDILLTYEDIKALKNDWLTDNNIAFWEEFMEHEVLTKYPQAHIVLLRPSMTFLLMKNKDTDMVRDALPDLRHITHIFLPINDNRNVNQAEGGSHWSLLLVSIIDGVAFHYDSLEGSNNNEAWEASKRLSSVLGRPLRFHYLAECPQQDNGSDCGVFVCIIMRHLLVKRLLAVNAGEKISMSMAGKAIDSAGARKEMLKIIENLRKEGERRRVPSQSADHTPPRID

SEQ ID NO: 8934 - DNA, 2667 bp, Muscodor strobelii
  misc_feature: SGI EST ID NO. CUFF.21470.1
  misc_feature: Variant of the nucleotide sequence at SEQ ID NO 8932
tctctgtctcgcccgagctctgtctctcgttgaaatccattgaaatgcgtccgttgactgactcaccttgatcacgtcggcattgctgtacacatagtcccagattgatatagtttgaatgtgctatgtttgacgccagataatcacccttgcctatgattacatgtatatatcgagtttgaaggcagcgaaaccaatgccaactcagctgccctgttgggggcgattcacggctgtggcagacccccagttggtagtaatccgttctgacctcatcttcccgctttcccactccctcttttccaaatgccattcatcccaccaccacattggcaatcaccccatctgcccacgctgcctgctcaactcactgctcgactgcttatacccaccgcacttctttgtatagctctggacgcgatatatatctcacagccacttggcccattagcaagacctgttgattgtacattgttctcgtcgttgcatgctattgtgccattgtctagccagccgtatacccccccttttaagtttatagagccattgtcctcggcttgactcgtgcccactcccgctgtcttcacgatcattgtcacgactccatccagacttcaatagtgccatttaagtagccagctagcgagtttcccactgttggatagtatagctcttcttgtcttcgtcccgtctcggcgtcgcaaacttggtgcattcgatatctggagcgacagagctgtgactctcgcccaattgaagcggcgatccatcgacaccctcccacgccgcgaccacagcgttgacagataatatatcactcttcttgcccgccttctttgctcccctgctgtgactgtcgacagaatccccgaccctctgcgattcggcgactctaattcatcctctcccaacgcgaccttgctcgcaacccacgatcttacacgagctcgactccattcacaccggtgcccgattcttccttgcgcacacgcagccctccatccgacgctctcctccacgacggccccctttgcggcgtcaccacatcttctttccatgacattccgccagaaatttgcgcggcggctaaatgaaagcgtgagcactcactcgccacaatgactcgtcgtcttcgctcccaagaaccaaactcagaccactcccagctgtcacccgctcccgcctcggatagaccctacctctcctatcatgatatcctcttgacctacgaggatatcaaggccctcaagaatgactggctgaccgacaacgtatgttgtctccttcctcaaagcacagaaatgctgtggtttgcttcacccgcctaaccttgcttgtgattattagaatatcgctttctgggaggagttcatggagcatgaggtcctcaccaagtacccccaagcacacatcgtcctgcttcggccttccatgacattcttgttgatgaagaataaggacacggacatggtccgcgacgccctgcccgacctccgccacattacccacatcttcctgccgatcaacgacaaccgcaacgtcaaccaagctgagggcggcagtcattggtccctgctcctcgttagcatcatcgatggagttgccttccactacgactcgctcgagggtagcaataacaatgaagcctgggaagcctccaagcggctctcaagtgtcctgggccggcccctgcgcttccactacttagccgagtgtccccagcaagacaacgggagcgactgcggcgtctttgtctgcatcatcatgcgacacctcctggtgaagcgtcttctggccgttaatgctggtgagaagatttcgatgagcatggctggtaaggcaatcgatagtgccggtgcccgcaaggaaatgctgaagatcatcgagaacttacgcaaggagggtgagagacggcgcgtcccgtcacaatctgcagatcatacaccgccgcgaatcgattagttataggtgaacggacagtgcatgatcaactgctttggtacactgcggcacgaagcgtcagtccggaggttgtgtggatgctgagtgcagttcaatcatctggatgcacattgtgttactctgggtggggactgtgttaccaaccgggacgcggtgcttcaagacaactccagaccacaagctgtgcagatagttgcttcgcaagagctatcatggggctcataaggcagacaacaaaaagaggcacagtagcaatcaaggatatcaacaaaaccttgggggcgggttggttggaaggtacaagcaataggaaaggtacaaagggctcacaaggatgcaaatgatcaggccagggtttgtttagccctccatgccaaatgattcacggaaaggaacagtataggagttgggatgggcatgcatggatgctggtctcggttgccttttcataggtgttacgctttcatgagaaccaatggttactgggactaattttgaggtgacctcccagaccaaatccttctccctcttcgtgattgcatgccagggtacagttatcgatatgattttctctgggtcgagtgatgcttttgttctgtttgttagtaattgcatgatgacgttgttgcctctgatagccaggcatgacaaccagcagaaagtagcagacaaagaagtaaagccaggtattatagtgcaggaaat

SEQ ID NO: 8935 - DNA, 5046 bp, Muscodor strobelii
  misc_feature: SGI cDNA ID NO. 562773
  misc_feature: Reduced expression when VOC is produced
  misc_feature: Encodes the peptide sequence at SEQ ID NO 8936
atggcgcagcagctccccatcaagttcacggagctattgatgctcaacaatgttggcgtcgatcccgcttccattggcttcaactcctgcaccctcgagtccgaccacttcatctgcataagagagcaaaaggccggaaccaacgaggtggtcatcattgacctcaagaacaacaacaatgtcagccggcgccccatcaaggctgacagtgccatcatgcactggagccgacagatcatcgccctgcgcgcacagtctagaacactgcagatcttcgacctcgatgccaagcagaagctcaagtcggccaccatgaacgaggatgtcgtcttctggaagtggatcagcgagtccagcctcggcctggtcaccgagacctccgtctaccactgggacatcttcgacgctgcccaggctgctcctgtcgaggtcttcaagcgcaacaccaatctcaatggctgccaaatcatcaactaccgtgtcaacagcgatggcaaatggatggctgtcgtaggaatctcccaacagcagggccgtgtagtgggcagcctgcagctctactccaaagaccgatctatcagccaggccatagagggccatgcagctaccttcggcaccttgaggttagaaggcgccgccgaggacaccagacttttcacattcgccgtgcgcactgccaccggcgccaagcttcacatcgttgagatcgaccacaaggatggcaatccaccctttcagaagaaggctgtggacatcttcttccctcccgaggcgaccaacgacttccccgtcgccatccaggtgtcgcagaagtacggcatcgtctacatggtgaccaaatatggtttcatccatctctacgacctcgagacaggctcaaccatcttcatgaaccgtatttctagcgagaccatcttcaccacatgctccgatacggactcggctggtatcgtcggcatcaacagaaagggtcaggtgctctttgtgtctgtcgaggacaataacatggtgcagtacctcctgcagaacccagccaacacagagattgccatcaagatggcctcgcgtgccggcttacctggtgcggatcagctctattcccgccaattcgaccaactcttcaacgcaggtgactacgagaaggctgccaaggtcgcggctaactcaccccgcggattcctgcggactaccgagacgatcaacaaattcaagctcctgcagacccagcctggaaagatgtcctacatcctccagtactttggcatgctgcttgacaagactacaccactaaacaagacagagactcttgagttggctgtgccagtcctcgctcaaggtcgtaagcatctccttgagaagtgggccaaagaaggcaagctcgacttctctgaagagctcggcgaccaggtccgaccacacgacaacaatcttgctcttggcatttacttgaaggccaatgtcacccacaaggttgttgcttcttatgcagaactcggccagtttgataagatcctcccatactgcaaccagaccggatactcgcccgattggatcggtctcctccagcacatggttcgtgccaatcccgataagtgcgctgagtttgccactgctttggctactcacgagagtggtcccttggtcgatcttgagcgcgtagtcgatgtattccagtcccaaggacaggttcaggcagctaccgctttccttcttgaagtgcttaaggagaaccgccccgagcatggccatcttcagactaggctcttggagatgaatctgctcaatgcgcctcaagttgccgacgccattcttagcaaccagatgttcagccagttcgacaaggctaagattgccaagctttgcgaacagaacggacttgtcactaaagccctcgagctgtatgagaacgaagccgatatcaagcgagtcattgtcggaatccctggctcgcccaatttcaatcctgagtggcttttgaattacttcggtaacttgtctgttgagcaatctgtggactgcttggatgcgatgatgaaggccaatatccgccagaatcttcaatctgttgttcaaattgctactaagtactcagacctccttgggccaactagactgatcgacttgttcgagaaataccggactttcgagggtcttttctactatctgggcagtatcgtcaatttgtctcaggatgccgatgtacacttcaagtacattgaagccgccaccagaatgggccaggctaatgaagtggaacgtatctgccgtgacagcaactactacaaccccgaaaaggtcaagaatttcttgaaggaagcaaaactcactgagatgctccccctcatcatcgtttgcgacagacacaatttcgttcatgatctggttttgtacttgtatcagaaccaacggtttcaggctatcgagacttacgtccagcgtgtcaaccccggtcgtactccagaggtcgtaggtggcttattagatgttgattgcgacgagcaggttatcaaggacttgcttcggtctgtcgatgctaccgccattacaattgatgcgctcgtccgtgaagttgagtctcgcaaccgcctcaaacttttgctaccattccttgaggccacacttgctaccggcaaccagcagcaagccatcttcaatgccctcgctaagatttacatcgactccaacaacaaccctgagaagttcctaaaggagaacgaccagtacgacacactcagtgttggtaaatactgcgagaagcgtgatccaaatctggccttcgtcgcctaccagaaaggccagaacgacttggagctcgtcaatatcacaaatgagaactccatgtaccgcgctcaagctcgttatctcttagaccgcgctgatcgtgagctctggaccttcgttcttagcgagagcaacatccaccggcgatctgttgtcgaccaagtcattgcgaccgctgttcctgagtctactgaccctgcaaaggtttccgaggccgtcgcgtcatttatgcaatgcgacttgcccattgagttgattgagcttctcgagaaaatcattcttgaaccgtcgccatttacggacaacccgagcttgcagaaccttctcatgctcaccgctgcgaaagctgataagggtagagttatggactacatccatcgcttggatgctttcgaccccgacgaggtcgctcatctctgtatcgacattggcctttacgaagaagctcttgaaatctacaagaaggtcggaaaccagcaggcggcggttgaggtcctagtgagcaatatcgttagtatcgatcgtgctaatagctatgccgaagatgtcgatatgcccgaagtgtggagtaaagttgcaaaggctcagctcgatggcctgcgtgttggtgaggccatcgactcctacatcaaagctggcgacccgcgtaattacgaagaagtcatcgaggtcgctacacatgccggcaagaacgaggaactcgtcaagtaccttcgtatggctcggaagacccttcgcgagccacctatcgatactgctcttgctttctgttacgccagactcgatcagctatccgagctagaagatttccttcggggcactaacgtcgccaacatcgaagagtcaggtgacaaggcggcgaatgaagatctacacgaagctgccaagatcttctacagcagtatttcaaattggtccaagctggcaactactcttgtccatttgggagactaccaggccgctgttgagtgcgcccgcaaggccaacaatatcaaggtctggaaccaggtgcacggtgcctgtgttgctaagaaagaattccgtctcgccaagatttgtggtctcaacttgattgtcgatgcggaacaactgcaggctctcgtgaaacagtatgagaacgaaggttacttcgatgaactgatcgatctcctcgagcaaggcctaggtctcgagcgtgcccacatgggcatgttcaccgagttaggcatcgccctctcgaaataccgccctgagagattgatggagcacatcaaactgttctgggctcgcatgaatctaccgaagttgattcgcgcttgcgaagaggctaatctgtggcctgagcttgttttctgctattatcactatgatgaatttgataatgctgcgctggcagtgatggaacgagcagccaactcctgggagcaccaacagttcaaggacatagtagtcaaagtggccaacctcgagatctactacagagcccttaacttctaccttgaacagcacccttctcttcttactgacctgctgcaagctctgacgccacgtatagacgtcaaccgagtcgtccggatgttccagaaatctgacaatctcccgttgatcaagcccttcctattaaacgttcagacacagaacaagcgaaccgtcaacgacgccatcaacgatctgcttattgaggaagaggactacaagactctccgagattctgttgagaactacgacaactatgatgccgttgaccttgccagccgacttgagaaacacgacctcgtcttcttcagacagattgcctccaacatctaccgtaagacgaagagatgggagaagtctattgcgttgtctaagcaagacaaattgttcaaggatgctatcgagacagctgccatttctggcaaaaccgacgtggttgaggaacttctccgatacttcgtcggtattggtagccgagaatgctatgttggcatgctctatgcgtgctatgacctcatccgccctgacttggttcttgagatctcgtggcgccatggcttgaacgactttactatgccctacatgatcaacatgttgtgccagcagaccaaggagcttgcgagcctgaaggctgacaatgaagcacgaaaagcaaaagaagctgctcaggagcagcatgaagatgacacccctatccttggcggcaatcgactgatgattaccgctgggcccggcgccggtggcatgtcccctgcgccttacggccagacgaatggttttgcgcctcaacctacgggctttggtttctag

SEQ ID NO: 8936 - protein, 1681 aa, Muscodor strobelii
  misc_feature: SGI Peptide ID NO. 562773
  misc_feature (255)..(290): Pfam Id: PF01394 Pfam Desc: Clathrin propeller repeat
  misc_feature (19)..(56): Pfam Id: PF01394 Pfam Desc: Clathrin propeller repeat
  misc_feature (693)..(835): Pfam Id: PF00637 Pfam Desc: Region in Clathrin and VPS
  misc_feature (1282)..(1428): Pfam Id: PF00637 Pfam Desc: Region in Clathrin and VPS
  misc_feature (987)..(1132): Pfam Id: PF00637 Pfam Desc: Region in Clathrin and VPS
  misc_feature (1136)..(1277): Pfam Id: PF00637 Pfam Desc: Region in Clathrin and VPS
  misc_feature (839)..(980): Pfam Id: PF00637 Pfam Desc: Region in Clathrin and VPS
  misc_feature (1431)..(1590): Pfam Id: PF00637 Pfam Desc: Region in Clathrin and VPS
  misc_feature (541)..(686): Pfam Id: PF00637 Pfam Desc: Region in Clathrin and VPS
  misc_feature (298)..(332): Pfam Id: PF01394 Pfam Desc: Clathrin propeller repeat
  misc_feature (103)..(134): Pfam Id: PF01394 Pfam Desc: Clathrin propeller repeat
  misc_feature (60)..(95): Pfam Id: PF01394 Pfam Desc: Clathrin propeller repeat
  misc_feature (151)..(190): Pfam Id: PF01394 Pfam Desc: Clathrin propeller repeat
  misc_feature (2)..(1681): NCBI GI: 171696270 Blast Desc: protein product [Podospora anserina] gi|170948377|emb|CAP60541.1| protein product [Podospora anserina]
  misc_feature (5)..(1681): NCBI GI: 39972947 Blast Desc: conserved [Magnaporthe grisea 70-15] gi|145012538|gb|EDJ97192.1| conserved [Magnaporthe grisea 70-15]
  misc_feature (5)..(1681): NCBI GI: 46122483 Blast Desc: FG05619.1 [Gibberella zeae PH-1]
  misc_feature (5)..(1681): NCBI GI: 256729832 Blast Desc: [Nectria haematococca mpVI 77-13-4]
  misc_feature (1)..(1681): NCBI GI: 116181004 Blast Desc: conserved [Chaetomium globosum CBS 148.51] gi|88185427|gb|EAQ92895.1| conserved [Chaetomium globosum CBS 148.51]
  misc_feature (1)..(1681): NCBI GI: 85119481 Blast Desc: clathrin heavy chain [Neurospora crassa OR74A] gi|28927453|gb|EAA36405.1| clathrin heavy chain [Neurospora crassa OR74A]
  misc_feature (5)..(1681): NCBI GI: 261356511 Blast Desc: clathrin heavy chain 1 [Verticillium albo-atrum VaMs.102]
  misc_feature (5)..(1680): NCBI GI: 154289637 Blast Desc: BC1G_16097 [Botryotinia fuckeliana B05.10] gi|150848988|gb|EDN24181.1| BC1G_16097 [Botryotinia fuckeliana B05.10]
  misc_feature (5)..(1656): NCBI GI: 156036302 Blast Desc: SS1G_12840 [Sclerotinia sclerotiorum 1980] gi|154698245|gb|EDN97983.1| SS1G_12840 [Sclerotinia sclerotiorum 1980]
  misc_feature (5)..(1679): NCBI GI: 119500990 Blast Desc: clathrin heavy chain [Neosartorya fischeri NRRL 181] gi|119415417|gb|EAW25355.1| clathrin heavy chain [Neosartorya fischeri NRRL 181]
  misc_feature: Useful for introducing or modulating the production of volatile compounds
MAQQLPIKFTELLMLNNVGVDPASIGFNSCTLESDHFICIREQKAGTNEVVIIDLKNNNNVSRRPIKADSAIMHWSRQIIALRAQSRTLQIFDLDAKQKLKSATMNEDVVFWKWISESSLGLVTETSVYHWDIFDAAQAAPVEVFKRNTNLNGCQIINYRVNSDGKWMAVVGISQQQGRVVGSLQLYSKDRSISQAIEGHAATFGTLRLEGAAEDTRLFTFAVRTATGAKLHIVEIDHKDGNPPFQKKAVDIFFPPEATNDFPVAIQVSQKYGIVYMVTKYGFIHLYDLETGSTIFMNRISSETIFTTCSDTDSAGIVGINRKGQVLFVSVEDNNMVQYLLQNPANTEIAIKMASRAGLPGADQLYSRQFDQLFNAGDYEKAAKVAANSPRGFLRTTETINKFKLLQTQPGKMSYILQYFGMLLDKTTPLNKTETLELAVPVLAQGRKHLLEKWAKEGKLDFSEELGDQVRPHDNNLALGIYLKANVTHKVVASYAELGQFDKILPYCNQTGYSPDWIGLLQHMVRANPDKCAEFATALATHESGPLVDLERVVDVFQSQGQVQAATAFLLEVLKENRPEHGHLQTRLLEMNLLNAPQVADAILSNQMFSQFDKAKIAKLCEQNGLVTKALELYENEADIKRVIVGIPGSPNFNPEWLLNYFGNLSVEQSVDCLDAMMKANIRQNLQSVVQIATKYSDLLGPTRLIDLFEKYRTFEGLFYYLGSIVNLSQDADVHFKYIEAATRMGQANEVERICRDSNYYNPEKVKNFLKEAKLTEMLPLIIVCDRHNFVHDLVLYLYQNQRFQAIETYVQRVNPGRTPEVVGGLLDVDCDEQVIKDLLRSVDATAITIDALVREVESRNRLKLLLPFLEATLATGNQQQAIFNALAKIYIDSNNNPEKFLKENDQYDTLSVGKYCEKRDPNLAFVAYQKGQNDLELVNITNENSMYRAQARYLLDRADRELWTFVLSESNIHRRSVVDQVIATAVPESTDPAKVSEAVASFMQCDLPIELIELLEKIILEPSPFTDNPSLQNLLMLTAAKADKGRVMDYIHRLDAFDPDEVAHLCIDIGLYEEALEIYKKVGNQQAAVEVLVSNIVSIDRANSYAEDVDMPEVWSKVAKAQLDGLRVGEAIDSYIKAGDPRNYEEVIEVATHAGKNEELVKYLRMARKTLREPPIDTALAFCYARLDQLSELEDFLRGTNVANIEESGDKAANEDLHEAAKIFYSSISNWSKLATTLVHLGDYQAAVECARKANNIKVWNQVHGACVAKKEFRLAKICGLNLIVDAEQLQALVKQYENEGYFDELIDLLEQGLGLERAHMGMFTELGIALSKYRPERLMEHIKLFWARMNLPKLIRACEEANLWPELVFCYYHYDEFDNAALAVMERAANSWEHQQFKDIVVKVANLEIYYRALNFYLEQHPSLLTDLLQALTPRIDVNRVVRMFQKSDNLPLIKPFLLNVQTQNKRTVNDAINDLLIEEEDYKTLRDSVENYDNYDAVDLASRLEKHDLVFFRQIASNIYRKTKRWEKSIALSKQDKLFKDAIETAAISGKTDVVEELLRYFVGIGSRECYVGMLYACYDLIRPDLVLEISWRHGLNDFTMPYMINMLCQQTKELASLKADNEARKAKEAAQEQHEDDTPILGGNRLMITAGPGAGGMSPAPYGQTNGFAPQPTGFGF

SEQ ID NO: 8937 - DNA, 6137 bp, Muscodor strobelii
  misc_feature: SGI EST ID NO. CUFF.21459.0
  misc_feature: Variant of the nucleotide sequence at SEQ ID NO 8935
cctcaatccatggaagcgacaccttgcttgaatggaacaggtaaatgtttaactgcttgcccacacctgagaaaaaaggatcactgtcgtcgccgtgcagcaattccccgtcaccttagttctcacaacctttttttccatcgtcgaccaagcatccccttctcgcactctcttcctccatttttggcgtcttcaatcgtgcattgccgtgcgagagagtttgcgcgcatccttgcactgcttgtcaattcccaccttagcacggtagctcgcagtacctgggggcgcgtcactccttttgctgccttgccgacctgtcaactgtacacaacacactttcgcacgacccgtcctttccatctccaaacgtcacttcctcccgattcgacgctccatcatcattgccctacccctacataggcggacgatagagcgcaacggtgcctttgacatcctcgccgcgccttccgtttgtctgtgacgtcgttgaattccatctcgccgagccctgtggcggcccaagccatcaccaccaacccgaccgattctcgccctcccggaacccatgtggtcgtgagccatggcgcagcagctccccatcaagttcacggagctattgatgctcaacaatgttggcgtcgatcccgcttccattggcttcaactcctgcaccctcgagtccgaccacttcatctgcataagagagcaaaaggccggaaccaacgaggtggtcatcattgacctcaagaacaacaacaatgtcagccggcgccccatcaaggctgacagtgccatcatgcactggagccgacagatcatcgccctgcgcgcacagtctagaacactgcagatcttcgacctcgatgccaagcagaagctcaagtcggccaccatgaacgaggatgtcgtcttctggaagtggatcagcgagtccagcctcggcctggtcaccgagacctccgtctaccactgggacatcttcgacgctgcccaggctgctcctgtcgaggtcttcaagcgcaacaccaatctcaatggctgccaaatcatcaactaccgtgtcaacagcgatggcaaatggatggctgtcgtaggaatctcccaacagcagggccgtgtagtgggcagcctgcagctctactccaaagaccgatctatcagccaggccatagagggccatgcagctaccttcggcaccttgaggttagaaggcgccgccgaggacaccagacttttcacattcgccgtgcgcactgccaccggcgccaagcttcacatcgttgagatcgaccacaaggatggcaatccaccctttcagaagaaggctgtggacatcttcttccctcccgaggcgaccaacgacttccccgtcgccatccaggtgtcgcagaagtacggcatcgtctacatggtgaccaaatatggtttcatccatctctacgacctcgagacaggctcaaccatcttcatgaaccgtatttctagcgagaccatcttcaccacatgctccgatacggactcggctggtatcgtcggcatcaacagaaagggtcaggtgctctttgtgtctgtcgaggacaataacatggtgcagtacctcctgcagaacccagccaacacagagattgccatcaagatggcctcgcgtgccggcttacctggtgcggatcagctctattcccgccaattcgaccaactcttcaacgcaggtgactacgagaaggctgccaaggtcgcggctaactcaccccgcggattcctgcggactaccgagacgatcaacaaattcaagctcctgcagacccagcctggaaagatgtcctacatcctccagtactttggcatgctgcttgacaagactacaccactaaacaagacagagactcttgagttggctgtgccagtcctcgctcaaggtcgtaagcatctccttgagaagtgggccaaagaaggcaagctcgacttctctgaagagctcggcgaccaggtccgaccacacgacaacaatcttgctcttggcatttacttgaaggccaatgtcacccacaaggttgttgcttcttatgcagaactcggccagtttgataagatcctcccatactgcaaccagaccggatactcgcccgattggatcggtctcctccagcacatggttcgtgccaatcccgataagtgcgctgagtttgccactgctttggctactcacgagagtggtcccttggtcgatcttgagcgcgtagtcgatgtattccagtcccaaggacaggttcaggcagctaccgctttccttcttgaagtgcttaaggagaaccgccccgagcatggccatcttcagactaggctcttggagatgaatctgctcaatgcgcctcaagttgccgacgccattcttagcaaccagatgttcagccagttcgacaaggctaagattgccaagctttgcgaacagaacggacttgtcactaaagccctcgagctgtatgagaacgaagccgatatcaagcgagtcattgtcggaatccctggctcgcccaatttcaatcctgagtggcttttgaattacttcggtaacttgtctgttgagcaatctgtggactgcttggatgcgatgatgaaggccaatatccgccagaatcttcaatctgttgttcaaattgctactaagtactcagacctccttgggccaactagactgatcgacttgttcgagaaataccggactttcgagggtcttttctactatctgggcagtatcgtcaatttgtctcaggatgccgatgtacacttcaagtacattgaagccgccaccagaatgggccaggctaatgaagtggaacgtatctgccgtgacagcaactactacaaccccgaaaaggtcaagaatttcttgaaggaagcaaaactcactgagatgctccccctcatcatcgtttgcgacagacacaatttcgttcatgatctggttttgtacttgtatcagaaccaacggtttcaggctatcgagacttacgtccagcgtgtcaaccccggtcgtactccagaggtcgtaggtggcttattagatgttgattgcgacgagcaggttatcaaggacttgcttcggtctgtcgatgctaccgccattacaattgatgcgctcgtccgtgaagttgagtctcgcaaccgcctcaaacttttgctaccattccttgaggccacacttgctaccggcaaccagcagcaagccatcttcaatgccctcgctaagatttacatcgactccaacaacaaccctgagaagttcctaaaggagaacgaccagtacgacacactcagtgttggtaaatactgcgagaagcgtgatccaaatctggccttcgtcgcctaccagaaaggccagaacgacttggagctcgtcaatatcacaaatgagaactccatgtaccgcgctcaagctcgttatctcttagaccgcgctgatcgtgagctctggaccttcgttcttagcgagagcaacatccaccggcgatctgttgtcgaccaagtcattgcgaccgctgttcctgagtctactgaccctgcaaaggtttccgaggccgtcgcgtcatttatgcaatgcgacttgcccattgagttgattgagcttctcgagaaaatcattcttgaaccgtcgccatttacggacaacccgagcttgcagaaccttctcatgctcaccgctgcgaaagctgataagggtagagttatggactacatccatcgcttggatgctttcgaccccgacgaggtcgctcatctctgtatcgacattggcctttacgaagaagctcttgaaatctacaagaaggtcggaaaccagcaggcggcggttgaggtcctagtgagcaatatcgttagtatcgatcgtgctaatagctatgccgaagatgtcgatatgcccgaagtgtggagtaaagttgcaaaggctcagctcgatggcctgcgtgttggtgaggccatcgactcctacatcaaagctggcgacccgcgtaattacgaagaagtcatcgaggtcgctacacatgccggcaagaacgaggaactcgtcaagtaccttcgtatggctcggaagacccttcgcgagccacctatcgatactgctcttgctttctgttacgccagactcgatcagctatccgagctagaagatttccttcggggcactaacgtcgccaacatcgaagagtcaggtgacaaggcggcgaatgaagatctacacgaagctgccaagatcttctacagcagtatttcaaattggtccaagctggcaactactcttgtccatttgggagactaccaggccgctgttgagtgcgcccgcaaggccaacaatatcaaggtctggaaccaggtgcacggtgcctgtgttgctaagaaagaattccgtctcgccaagatttgtggtctcaacttgattgtcgatgcggaacaactgcaggctctcgtgaaacagtatgagaacgaaggttacttcgatgaactgatcgatctcctcgagcaaggcctaggtctcgagcgtgcccacatgggcatgttcaccgagttaggcatcgccctctcgaaataccgccctgagagattgatggagcacatcaaactgttctgggctcgcatgaatctaccgaagttgattcgcgcttgcgaagaggctaatctgtggcctgagcttgttttctgctattatcactatgatgaatttgataatgctgcgctggcagtgatggaacgagcagccaactcctgggagcaccaacagttcaaggacatagtagtcaaagtggccaacctcgagatctactacagagcccttaacttctaccttgaacagcacccttctcttcttactgacctgctgcaagctctgacgccacgtatagacgtcaaccgagtcgtccggatgttccagaaatctgacaatctcccgttgatcaagcccttcctattaaacgttcagacacagaacaagcgaaccgtcaacgacgccatcaacgatctgcttattgaggaagaggactacaagactctccgagattctgttgagaactacgacaactatgatgccgttgaccttgccagccgacttgagaaacacgacctcgtcttcttcagacagattgcctccaacatctaccgtaagacgaagagatgggagaagtctattgcgttgtctaagcaagacaaattgttcaaggatgctatcgagacagctgccatttctggcaaaaccgacgtggttgaggaacttctccgatacttcgtcggtattggtagccgagaatgctatgttggcatgctctatgcgtgctatgacctcatccgccctgacttggttcttgagatctcgtggcgccatggcttgaacgactttactatgccctacatgatcaacatgttgtgccagcagaccaaggagcttgcgagcctgaaggctgacaatgaagcacgaaaagcaaaagaagctgctcaggagcagcatgaagatgacacccctatccttggcggcaatcgactgatgattaccgctgggcccggcgccggtggcatgtcccctgcgccttacggccagacgaatggttttgcgcctcaacctacgggctttggtttctaggcaccaccccaacctctgttgttgatgcccatcatcacacccgcacagcacgttttcacaggccctaagtcgcataactacttgaaagcgtctaagacacaacattgagcccttcaggctcgtatttttgacctgcacggaagcactaatgctgtggtcaccctcacaacttgatgtcaggtcacctgtaaacttccggggggttatagaaaagttccttgcgaattgagacggagataatgcatgatatctggaggatcgctgtaggccccaggaggccagtacatgacgtttcgctccatccgcgagaatgaggcgccggggcagtgtcttgtctaaacttgtatgatagtacaataaaggattgactgtttttacgtactattgagttgattatttgtgcctcatatgtccattgtgctcctggaaacctagatacctatttgtcttgaatgtttccatagaggagagagtgacgaacgtaggaagtaatcacaagctcgtgggtagc

SEQ ID NO: 8938 - DNA, 441 bp, Muscodor strobelii
  misc_feature: SGI cDNA ID NO. 562774
  misc_feature: Encodes the peptide sequence at SEQ ID NO 8939
atgaattcccgaccaacttcacccgaatccacgactgtcctgtacgatggcttatcaaaggaagaagcagataaggatttgggcgcgcttgtggaaggcatgcgcatggatcagacgttccacgatagtatgactgatattgacgggttgggggtgcaatggtggccacctttgaattacacaagtgacgaagaactctgcgagtgggccgcggaggaggcttggggtcatcacgcttcgtgctccaattctatcggttcagacgatgatcccatggctgttctcgatggtaacttccgggttaggggcatcgacggccttcgtgttgttgatgcttgggtcttccctaagattccaggtactttcatcaatctatcggtttatctggccgccgaaaaggcttctgccgctatcctcagcggtaatcagacgagatcgtag

SEQ ID NO: 8939 - protein, 146 aa, Muscodor strobelii
  misc_feature: SGI Peptide ID NO. 562774
  misc_feature (11)..(134): Pfam Id: PF05199 Pfam Desc: GMC oxidoreductase
  misc_feature (82)..(134): Pfam Id: PF05199 Pfam Desc: GMC oxidoreductase
  misc_feature (4)..(144): NCBI GI: 189195680 Blast Desc: choline dehydrogenase, mitochondrial precursor [Pyrenophora tritici-repentis Pt-1C-BFP] gi|187980057|gb|EDU46683.1| choline dehydrogenase, mitochondrial
  misc_feature (24)..(139): NCBI GI: 115491891 Blast Desc: conserved [Aspergillus terreus NIH2624] gi|114197433|gb|EAU39133.1| conserved [Aspergillus terreus NIH2624]
  misc_feature (23)..(140): NCBI GI: 154321511 Blast Desc: BC1G_01630 [Botryotinia fuckeliana B05.10] gi|150852168|gb|EDN27360.1| BC1G_01630 [Botryotinia fuckeliana B05.10]
  misc_feature (19)..(139): NCBI GI: 256732331 Blast Desc: [Nectria haematococca mpVI 77-13-4]
  misc_feature (16)..(139): NCBI GI: 154293881 Blast Desc: BC1G_14012 [Botryotinia fuckeliana B05.10] gi|150845167|gb|EDN20360.1| BC1G_14012 [Botryotinia fuckeliana B05.10]
  misc_feature (23)..(144): NCBI GI: 169609841 Blast Desc: SNOG_08012 [Phaeosphaeria nodorum SN15] gi|111063168|gb|EAT84288.1| SNOG_08012 [Phaeosphaeria nodorum SN15]
  misc_feature (4)..(140): NCBI GI: 255948056 Blast Desc: Pc22g07790 [Penicillium chrysogenum Wisconsin 54-1255] gi|211591812|emb|CAP98067.1| Pc22g07790 [Penicillium chrysogenum Wisconsin 54-1255]
  misc_feature (4)..(140): NCBI GI: 169769607 Blast Desc: [Aspergillus oryzae RIB40] gi|83767132|dbj|BAE57271.1| protein product [Aspergillus oryzae]
  misc_feature (15)..(144): NCBI GI: 46114384 Blast Desc: FG03034.1 [Gibberella zeae PH-1]
  misc_feature (4)..(140): NCBI GI: 238488078 Blast Desc: choline dehydrogenase, [Aspergillus flavus NRRL3357] gi|220700156|gb|EED56495.1| choline dehydrogenase, [Aspergillus flavus NRRL3357]
  misc_feature (51)..(139): SWISSPROT Homolog: EC 1.1.99.1 Choline dehydrogenase
MNSRPTSPESTTVLYDGLSKEEADKDLGALVEGMRMDQTFHDSMTDIDGLGVQWWPPLNYTSDEELCEWAAEEAWGHHASCSNSIGSDDDPMAVLDGNFRVRGIDGLRVVDAWVFPKIPGTFINLSVYLAAEKASAAILSGNQTRS

SEQ ID NO: 8940 - DNA, 594 bp, Muscodor strobelii
  misc_feature: SGI cDNA ID NO. 562775
  misc_feature: Encodes the peptide sequence at SEQ ID NO 8941
atgtttgatgcttccgctcagtttaggcctactcacttctgcgaatcacacactatttggcagacggtgttgagcacggtgcatgtttctcggcgcgtactactcgtagcccttatcttgggttgttcggcaggttgcgaaaatttcatgcgcaactggacaccctttcaccttgttctcgctcgaccccaactccttgctagtaatattcctgtagatttggctccaaatggccctgacgtactcatcccaaaagcggaggaccaagtaccttttaaccaaactggcgcgacactccctatccaggagcctcttgcgaaagaatatgagtatatcgtcgttggctcgggctctgaaggctcgcctattgcggcaaacttagctcgcgccggccatagtgtgcttctcgtcgatgcaggtggtgaccatggacacctaccacagtttgaagctcctgctttggcgaacgttgctgcggagagaaacgaggtcgtttggagctatttcactcatcattattccaatgaaaccatggctctcaaagaccggaagctgacttggctaacacccgacaaccagtattatagcaagtaa

SEQ ID NO: 8941 - protein, 197 aa, Muscodor strobelii
  misc_feature: SGI Peptide ID NO. 562775
  misc_feature (107)..(196): NCBI GI: 169609841 Blast Desc: SNOG_08012 [Phaeosphaeria nodorum SN15] gi|111063168|gb|EAT84288.1| SNOG_08012 [Phaeosphaeria nodorum SN15]
  misc_feature (107)..(196): NCBI GI: 115492519 Blast Desc: conserved [Aspergillus terreus NIH2624] gi|114197747|gb|EAU39447.1| conserved [Aspergillus terreus NIH2624]
  misc_feature (92)..(195): NCBI GI: 256727900 Blast Desc: NECHADRAFT_83489 [Nectria haematococca mpVI 77-13-4]
  misc_feature (109)..(195): NCBI GI: 154321511 Blast Desc: BC1G_01630 [Botryotinia fuckeliana B05.10] gi|150852168|gb|EDN27360.1| BC1G_01630 [Botryotinia fuckeliana B05.10]
  misc_feature (107)..(195): NCBI GI: 240275508 Blast Desc: GMC oxidoreductase [Ajellomyces capsulatus H143]
  misc_feature (107)..(195): NCBI GI: 225561900 Blast Desc: glucose-methanol-choline oxidoreductase [Ajellomyces capsulatus G186AR]
  misc_feature (109)..(196): NCBI GI: 119480809 Blast Desc: GMC oxidoreductase, [Neosartorya fischeri NRRL 181] gi|119408587|gb|EAW18536.1| GMC oxidoreductase, [Neosartorya fischeri NRRL 181]
  misc_feature (107)..(195): NCBI GI: 154283557 Blast Desc: [Ajellomyces capsulatus NAm1] gi|150410754|gb|EDN06142.1| [Ajellomyces capsulatus NAm1]
  misc_feature (109)..(196): NCBI GI: 255937515 Blast Desc: Pc13g13730 [Penicillium chrysogenum Wisconsin 54-1255] gi|211584404|emb|CAP92442.1| Pc13g13730 [Penicillium chrysogenum Wisconsin 54-1255]
  misc_feature (109)..(196): NCBI GI: 189195680 Blast Desc: choline dehydrogenase, mitochondrial precursor [Pyrenophora tritici-repentis Pt-1C-BFP] gi|187980057|gb|EDU46683.1| choline dehydrogenase, mitochondrial
MFDASAQFRPTHFCESHTIWQTVLSTVHVSRRVLLVALILGCSAGCENFMRNWTPFHLVLARPQLLASNIPVDLAPNGPDVLIPKAEDQVPFNQTGATLPIQEPLAKEYEYIVVGSGSEGSPIAANLARAGHSVLLVDAGGDHGHLPQFEAPALANVAAERNEVVWSYFTHHYSNETMALKDRKLTWLTPDNQYYSK

SEQ ID NO: 8942 - DNA, 811 bp, Muscodor strobelii
  misc_feature: SGI EST ID NO. CUFF.21374.0
  misc_feature: Variant of the nucleotide sequence at SEQ ID NO 8940
ttgcaattttcctcttcttcattatatatgaacaacgcaaaaaaatcacattctcgagacatgattattgatgcgaggtagccccaagaccatcgatttctctcgaacagaatgaagacgaaattacaatgcacaatcttgggtgcggtgtttccctgtcctctcgagggctgtgggatggatcgcaatgattgagcgtacatcccatcatgtacaactccaatatgtttgatgcttccgctcagtttaggcctactcacttctgcgaatcacacactatttggcagacggtgttgagcacggtgcatgtttctcggcgcgtactactcgtagcccttatcttgggttgttcggcaggttgcgaaaatttcatgcgcaactggacaccctttcagtatgtgtatgtagttttatcgcagctggtgtcagtctgtagggcattgttctattccgctttataatgtagcatttgggatgatggtcctcgttgatggaagatcttgccaatatgcaaataggccttgaccgtgttcgctatgttccagatgtccttcacatctgttattggagcaattacatctaacttcctccaaaacttcgccatacatcctcgaattactctacatcatgtcggcttatggtagctgccaggtactgagatgccacctagaaagggctcagttgcaaggcctggaaatggcaagcttatcaagtacagtatcatatcaatcaatgggctacgatgtgtcacaaatcttatgcttattgcttaagtatttgatgctgaacgtgtgaaagccttgttctcgct

SEQ ID NO: 8943 - DNA, 822 bp, Muscodor strobelii
  misc_feature: SGI cDNA ID NO. 562776
  misc_feature: Encodes the peptide sequence at SEQ ID NO 8944
atggcgagtaccaccagaacaattgctcattcgctgccaaacttcttgctgcccaggctgagctggacagggccagcaagcttgactgccggcgcattgcgaggtgctgcatttgcctcaaccgccgaattctcgaatcagcgaaaccggaccgcaccataccacactgcttcgaaggccacacgatgccctgcttcaaggcgtagacagccgcaatcatccataacacagcagcatccaggactgcgccgctcctttcactcgacggcttcaagatgtagagaccaccacttcgacacgctcaagttcatccagaggctccagagcgagggttttaccgaggaacaatcagtggctatgatgaaggtcctgaacgacgtgatagaagagagcatccaaaacctcacccgtacaatggtactccgcgaagatgctgcaaaggcaacctacacccagaaagtagatttcgccaagctacgatccgagcttctatctgctgacagcaccgagtccaacaccacccgtgccgcacacgagcgcctgacaaacgacataacgaagctcaactcgcgtctccgtgacgagatcggtcgaacgcaggcctccacccggctcgatctgaacttagaaaagggtcgtatccgtgaagaagcctcgcagcaagagctgaagatcaaagagaccgagaccaagatcgagcaggaggtagccgcactcaaggagaagcttgagcaagtcaaattccaaaccttgcagtggctgatgggtgtctgtaccggtttcgcagctctgcttctcggtgcgtggcgcttgctgatgtag

SEQ ID NO: 8944 - protein, 273 aa, Muscodor strobelii
  misc_feature: SGI Peptide ID NO. 562776
  misc_feature (83)..(272): Pfam Id: PF07798 Pfam Desc: Domain of function (DUF1640)
  misc_feature (7)..(273): NCBI GI: 171696266 Blast Desc: protein product [Podospora anserina] gi|170948375|emb|CAP60539.1| protein product [Podospora anserina]
  misc_feature (1)..(273): NCBI GI: 156036310 Blast Desc: conserved [Sclerotinia sclerotiorum 1980] gi|154698249|gb|EDN97987.1| conserved [Sclerotinia sclerotiorum 1980]
  misc_feature (1)..(273): NCBI GI: 154289605 Blast Desc: BC1G_16042 [Botryotinia fuckeliana B05.10] gi|150849005|gb|EDN24198.1| conserved [Botryotinia fuckeliana B05.10]
  misc_feature (11)..(273): NCBI GI: 145604495 Blast Desc: MGG_07736 [Magnaporthe grisea 70-15] gi|145012502|gb|EDJ97156.1| MGG_07736 [Magnaporthe grisea 70-15]
  misc_feature (11)..(263): NCBI GI: 116181008 Blast Desc: CHGG_01132 [Chaetomium globosum CBS 148.51] gi|88185429|gb|EAQ92897.1| CHGG_01132 [Chaetomium globosum CBS 148.51]
  misc_feature (13)..(273): NCBI GI: 242808999 Blast Desc: conserved [Talaromyces stipitatus ATCC 10500] gi|218715903|gb|EED15325.1| conserved [Talaromyces stipitatus ATCC 10500]
  misc_feature (13)..(273): NCBI GI: 212537517 Blast Desc: conserved [Penicillium marneffei ATCC 18224] gi|210068656|gb|EEA22747.1| conserved [Penicillium marneffei ATCC 18224]
  misc_feature (1)..(273): NCBI GI: 154278974 Blast Desc: HCAG_04140 [Ajellomyces capsulatus NAm1] gi|150412243|gb|EDN07630.1| HCAG_04140 [Ajellomyces capsulatus NAm1] gi|225562281|gb|EEH10560.1| DUF1640 domain-containing
  misc_feature (29)..(273): NCBI GI: 240106564 Blast Desc: CPC735_000960 [Coccidioides posadasii C735 delta SOWgp]
  misc_feature (83)..(273): NCBI GI: 255938732 Blast Desc: Pc14g01420 [Penicillium chrysogenum Wisconsin 54-1255] gi|211584757|emb|CAP74283.1| Pc14g01420 [Penicillium chrysogenum Wisconsin 54-1255]
MASTTRTIAHSLPNFLLPRLSWTGPASLTAGALRGAAFASTAEFSNQRNRTAPYHTASKATRCPASRRRQPQSSITQQHPGLRRSFHSTASRCRDHHFDTLKFIQRLQSEGFTEEQSVAMMKVLNDVIEESIQNLTRTMVLREDAAKATYTQKVDFAKLRSELLSADSTESNTTRAAHERLTNDITKLNSRLRDEIGRTQASTRLDLNLEKGRIREEASQQELKIKETETKIEQEVAALKEKLEQVKFQTLQWLMGVCTGFAALLLGAWRLLM

SEQ ID NO: 8945 - DNA, 1161 bp, Muscodor strobelii
  misc_feature: SGI EST ID NO. CUFF.21401.0
  misc_feature: Variant of the nucleotide sequence at SEQ ID NO 8943
cggaccatagcctttgcatgatcgccagctcagaacaaaacaagctggatttacttcagagaaagtacagaaaatggcgagtaccaccagaacaattgctcattcgctgccaaacttcttgctgcccaggctgagctggacagggccagcaagcttgactgccggcgcattgcgaggtgctgcatttgcctcaaccgccgaattctcgaatcagcgaaaccggaccgcaccataccacactgcttcgaaggccacacgatgccctgcttcaaggcgtagacagccgcaatcatccataacacagcagcatccaggactgcgccgctcctttcactcgacggcttcaagatgtagagaccaccacttcgacacgctcaagttcatccagaggctccagagcgagggttttaccgaggaacaatcagtggctatgatgaaggtcctgaacgacgtgatagaagagagcatccaaaacctcacccgtacaatggtactccgcgaagatgctgcaaaggcaacctacacccagaaagtagatttcgccaagctacgatccgagcttctatctgctgacagcaccgagtccaacaccacccgtgccgcacacgagcgcctgacaaacgacataacgaagctcaactcgcgtctccgtgacgagatcggtcgaacgcaggcctccacccggctcgatctgaacttagaaaagggtcgtatccgtgaagaagcctcgcagcaagagctgaagatcaaagagaccgagaccaagatcgagcaggaggtagccgcactcaaggagaagcttgagcaagtcaaattccaaaccttgcagtggctgatgggtgtctgtaccggtttcgcagctctgcttctcggtgcgtggcgcttgctgatgtagtataatcttttgcctttgggtcaaaagcaacactctgagacagacttgtatttttcatttgtgcataacctggctttgcgcaaaactgggactttagggcgtccttcgtggcgactactcattcatgatcgatgaattcgatgaagagtattcgaatacgacttcgcgctcaatgatatacccttgaatatagctagaaactgagacaataagatactatatttaccagttcacagaaatatcaacattccttgggccagtctata

SEQ ID NO: 8946 - DNA, 339 bp, Muscodor strobelii
  misc_feature: SGI cDNA ID NO. 562777
  misc_feature: Encodes the peptide sequence at SEQ ID NO 8947
atgggagcaacagcggctgttcctcgaaggtggattgtcctcccgaagcgttccgcgataccgaaaatggggtttgcgttggtaattcaaagcgtggcgacagctcccggttccaagcaccaccggcactacaacttcttcaactgccaagctcacaacgacgtcattaactacggatactacaactacaacatcgtcaatgacagctacaacaaccaccaccagcagtggcacgacaacgatgtcatctacaagctctaccacagcttctactacaacttcttctactacttcttcttctacaacaccgacgacgacaacaacagtaaatctctctag

SEQ ID NO: 8947 - protein, 112 aa, Muscodor strobelii
  misc_feature: SGI Peptide ID NO. 562777
MGATAAVPRRWIVLPKRSAIPKMGFALVIQSVATAPGSKHHRHYNFFNCQAHNDVINYGYYNYNIVNDSYNNHHQQWHDNDVIYKLYHSFYYNFFYYFFFYNTDDDNNSKSL

SEQ ID NO: 8948 - DNA, 3594 bp, Muscodor strobelii
  misc_feature: SGI cDNA ID NO. 562778
  misc_feature: Encodes the peptide sequence at SEQ ID NO 8949
atggaggatctcgagatactgagggcctcaaaggccgccgctggcgttgatgaagctgccgtcgaagaggacgctgaacctcagaaggtcgcgaagacggcacaccatattcgggctaatagctctatcatgcacctcaacaaaattctggtggccaatagaggcgagatccctattcgtattttcagaaccgcccacgagctgtctcttcacactgttgctgtctttagttatgaggatcgtcttagcatgcacagacaaaaggccgatgaggcgtatgtcatcggaaagcgtggccagtatacccccgttggagcatacttagcaggtgacgagatcatcaagatcgcagtcgaacatggagttcagatgatccatcctggctatggcttcctatctgagaacgcttcgtttgcccgcaatgtcgagaaagcaggcctgatttttgtcggtccctcaccagatgtcatcgattctcttggagacaaggtgtctgcccgaaagcttgctattgctgcgaacgtcccggtcgtacccggcacacccgacgctgtgggcacattcgaagaagttaagagcttcacggacgaatacggattccccatcatcatcaaggctgcctttggtggtggtggccgcggaatgagagtcgtgcggaaccaggcagatctgaaggaatcattcgagcgagctacttccgaggcaaagacggcgttcggaaacggcaccgttttcgtcgaacgattcttggacaagcccaagcatatcgaagttcagctgttaggcgacaaccatggtaacattgttcatttgtacgagcgtgattgctcggtccagcgcagacatcaaaaggtagtggagattgcgcccgcaaaagatctgcctgccgagacccgagacgcgattttggccgatgcagtcaagctggccaaatccgtaaactaccgaaatgccggaacagcggagttcttagtggatcaacaaaaccgatactacttcatcgagatcaacccacgtatccaagtcgagcacaccattaccgaggaaatcactggcattgatatcgtcgccgctcagattcagatcgctgcaggtgcttccttgcagcagctcggcttgacccaagatcgcatttccactcggggttttgccatccaatgccgaattaccaccgaggatccagccaaacagttccagcctgataccggcaagatcgaggtgtatagatctgcgggtggtaatggtgttcgtctggatggtggtaatggatttgctggcgcggtcattacaccctactacgattctatgctggtcaagtgcacatgccacggctcaacctacgaaatagcacgtcgcaaggtcctgcgagccctgattgaatttcgagtacgcggtgtgaagaccaatatcccattcttggcttctctgctcactcacgaaactttcatcgatggcaactgctggaccacattcattgacgatagccctgagctcttcaacttggtcggcagtcaaaaccgtgctcagaagctgcttgcatacctcggagatgttgctgtgaacggaagcagtatagctggccagataggtgaacccaaattcaagggtgagatcatcctaccagagctgttcaacgacgatggtacgaaacttgatgtttctcaaccttgtcagaaaggttggcgacaagtcattctggagcaaggcccgaaggctttcgccaaagcagttcgtgaatacaaggggtgtttgctgatggataccacatggcgagatgctcatcaatctctgcttgctacccgtgtccgaactgttgaccttcttggcattgccaaagaaacaagccatgccttatcaaacctatacagtctggagtgctggggtggtgccaccttcgacgtcgccatgcgattcttgtacgaagatccttgggaccgtctgcgcaaaatgcgcaaagccgtacccaacattcccttccaaatgcttcttcgtggcgccaacggtgttgcttatgcctcgcttccagacaatgccatttaccactttgtcgagcaagctaagaagaatggagtcgatatcttccgagtctttgatgccttgaacgatatcgaccagcttgaggttggtatcaaagccgtccaaaaagccgggggtgtatgtgagggaactgtttgctactcgggagacatgttgaaccccaagaagaagtataacctggagtactacatgagtctcgtcgagaaactagtcgctcttgacatcgatgtcctcggtatcaaggatatggctggtgtcttgaaaccacatgctgcaactctccttatcggcagtatcagaaagaaataccccgatcttgcaatccatgtccatactcacgactccgcgggtactggtgttgcatccatggttgcctgtgccgcagccggcgctgatgctgtcgatgcggctaccgatagtctttctggtatgacctctcagcccagcatcaacgctattctagcctcgctcgaaggcagcgatttggaccctggtctgaatcctgctcacgtacgtgcactcgatacctactggtctcagctgcgccttctgtactcgcctttcgaagcgcaccttgctggtcccgacccagaagtttacgaacacgaaattccaggagggcaactcacaaacatgatgttccaggcctcgcagctaggcctgggttcgcaatgggctgagacaaagaaggcttacgagcaagctaatgacctccttggtgacattgtgaaagtcacgccaacttccaaggtcgtcggtgatcttgcacaattcatggtgtcgaacaaattgggacctcaagatgttgtcaagcgtgctgctgagctcgatttccccggctcagtactcgagttcctcgagggtatgatgggccagccttacggcggattccctgaaccacttcgcagcaatgcacttcgtaaccgccggaagttcgataagcgacctggactctacctggaccccattgacttcaagaaggccaaagcagagctctcgcagaaatggggcaataccaccgagtgtgatcttgcttcttatttgatgtaccccaaggtttttgatgattacaagaaattcgttgacaagtttggcgacctgtccgttcttcctactcgatacttcctgtctgcttcccagattggcgaggagttccatgttgagctcgagaagggcaaggtcttgattttgaagcttttggcaatcggccctctatctgagaacactggtcagcgtgaggtgttctatgaaatgaacggcgaagtccgccaagtcactgtcgatgacaagaaggctagcgtcgagaatgttagccgacccaaggccgaccccaatgattcaagccaagttggtgcgcccatggctggtgtcctggttgaactgcgagtgcacgaaggctctgatgtcaagaagggcgatcctttggctgtgcttagcgccatgaagatggaaatggtcatctcagcgcctcacaatggaaaagttacggggctccaggccacacaaggtgattcagtggcaggctcggatctactttgccgaatcacgaaggcatag

SEQ ID NO: 8949 - protein, 1197 aa, Muscodor strobelii
  misc_feature: SGI Peptide ID NO. 562778
  misc_feature (386)..(493): Pfam Id: PF02785 Pfam Desc: Biotin carboxylase C-terminal domain
  misc_feature (1127)..(1194): Pfam Id: PF00364 Pfam Desc: Biotin-requiring enzyme
  misc_feature (45)..(160): Pfam Id: PF00289 Pfam Desc: Carbamoyl-phosphate synthase L chain, N-terminal domain
  misc_feature (162)..(379): Pfam Id: PF02786 Pfam Desc: Carbamoyl-phosphate synthase L chain, ATP binding domain
  misc_feature (591)..(860): Pfam Id: PF00682 Pfam Desc: HMGL-like
  misc_feature (878)..(1085): Pfam Id: PF02436 Pfam Desc: Conserved carboxylase domain
  misc_feature (1125)..(1157): Pfam Id: PF00529 Pfam Desc: HlyD family secretion protein
  misc_feature (591)..(717): Pfam Id: PF00682 Pfam Desc: HMGL-like
  misc_feature (745)..(816): Pfam Id: PF00682 Pfam Desc: HMGL-like
  misc_feature (15)..(1197): NCBI GI: 154279148 Blast Desc: HCAG_04227 [Ajellomyces capsulatus NAm1] gi|150412330|gb|EDN07717.1| HCAG_04227 [Ajellomyces capsulatus NAm1]
  misc_feature (15)..(1197): NCBI GI: 115398039 Blast Desc: pyruvate carboxylase [Aspergillus terreus NIH2624] gi|114192802|gb|EAU34502.1| pyruvate carboxylase [Aspergillus terreus NIH2624]
  misc_feature (16)..(1197): NCBI GI: 261204866 Blast Desc: pyruvate carboxylase [Ajellomyces dermatitidis SLH14081] gi|239592229|gb|EEQ74810.1| pyruvate carboxylase [Ajellomyces dermatitidis SLH14081]
  misc_feature (17)..(1196): NCBI GI: 258566632 Blast Desc: pyruvate carboxylase [Uncinocarpus reesii 1704] gi|237905506|gb|EEP79907.1| pyruvate carboxylase [Uncinocarpus reesii 1704]
  misc_feature (15)..(1120): NCBI GI: 240281214 Blast Desc: pyruvate carboxylase pyc [Ajellomyces capsulatus H143]
  misc_feature (16)..(1197): NCBI GI: 50549479 Blast Desc: YALI0C24101p [Yarrowia lipolytica] gi|47506225|gb|AAN46741.1| pyruvate carboxylase [Yarrowia lipolytica] gi|49648077|emb|CAG82532.1| YALI0C24101p [Yarrowia
  misc_feature (35)..(1196): NCBI GI: 260945601 Blast Desc: CLUG_02542 [Clavispora lusitaniae ATCC 42720] gi|238848952|gb|EEQ38416.1| CLUG_02542 [Clavispora lusitaniae ATCC 42720]
  misc_feature (35)..(1196): NCBI GI: 190347402 Blast Desc: conserved [Pichia guilliermondii ATCC 6260]
  misc_feature (35)..(1196): NCBI GI: 146416813 Blast Desc: conserved [Pichia guilliermondii ATCC 6260]
  misc_feature (37)..(1192): NCBI GI: 50292171 Blast Desc: protein product [Candida glabrata] gi|49527830|emb|CAG61479.1| protein product [Candida glabrata]
  misc_feature (33)..(1197): SWISSPROT Homolog: EC 6.4.1.1 Pyruvate carboxylase
MEDLEILRASKAAAGVDEAAVEEDAEPQKVAKTAHHIRANSSIMHLNKILVANRGEIPIRIFRTAHELSLHTVAVFSYEDRLSMHRQKADEAYVIGKRGQYTPVGAYLAGDEIIKIAVEHGVQMIHPGYGFLSENASFARNVEKAGLIFVGPSPDVIDSLGDKVSARKLAIAANVPVVPGTPDAVGTFEEVKSFTDEYGFPIIIKAAFGGGGRGMRVVRNQADLKESFERATSEAKTAFGNGTVFVERFLDKPKHIEVQLLGDNHGNIVHLYERDCSVQRRHQKVVEIAPAKDLPAETRDAILADAVKLAKSVNYRNAGTAEFLVDQQNRYYFIEINPRIQVEHTITEEITGIDIVAAQIQIAAGASLQQLGLTQDRISTRGFAIQCRITTEDPAKQFQPDTGKIEVYRSAGGNGVRLDGGNGFAGAVITPYYDSMLVKCTCHGSTYEIARRKVLRALIEFRVRGVKTNIPFLASLLTHETFIDGNCWTTFIDDSPELFNLVGSQNRAQKLLAYLGDVAVNGSSIAGQIGEPKFKGEIILPELFNDDGTKLDVSQPCQKGWRQVILEQGPKAFAKAVREYKGCLLMDTTWRDAHQSLLATRVRTVDLLGIAKETSHALSNLYSLECWGGATFDVAMRFLYEDPWDRLRKMRKAVPNIPFQMLLRGANGVAYASLPDNAIYHFVEQAKKNGVDIFRVFDALNDIDQLEVGIKAVQKAGGVCEGTVCYSGDMLNPKKKYNLEYYMSLVEKLVALDIDVLGIKDMAGVLKPHAATLLIGSIRKKYPDLAIHVHTHDSAGTGVASMVACAAAGADAVDAATDSLSGMTSQPSINAILASLEGSDLDPGLNPAHVRALDTYWSQLRLLYSPFEAHLAGPDPEVYEHEIPGGQLTNMMFQASQLGLGSQWAETKKAYEQANDLLGDIVKVTPTSKVVGDLAQFMVSNKLGPQDVVKRAAELDFPGSVLEFLEGMMGQPYGGFPEPLRSNALRNRRKFDKRPGLYLDPIDFKKAKAELSQKWGNTTECDLASYLMYPKVFDDYKKFVDKFGDLSVLPTRYFLSASQIGEEFHVELEKGKVLILKLLAIGPLSENTGQREVFYEMNGEVRQVTVDDKKASVENVSRPKADPNDSSQVGAPMAGVLVELRVHEGSDVKKGDPLAVLSAMKMEMVISAPHNGKVTGLQATQGDSVAGSDLLCRITKA

SEQ ID NO: 8950 - DNA, 3765 bp, Muscodor strobelii
  misc_feature: SGI EST ID NO. CUFF.21706.0
  misc_feature: Variant of the nucleotide sequence at SEQ ID NO 8948
accgcccacgagctgtctcttcacactgttgctgtctttagttatgaggatcgtcttagcatgcacagacaaaaggccgatgaggcgtatgtcatcggaaagcgtggccagtatacccccgttggagcatacttagcaggtgacgagatcatcaagatcgcagtcgaacatggagttcagatgatccatcctggtatgttcaaaggacgcttgcacagtctcgcattcgtagtctgacaggcatgtcctaggctatggcttcctatctgagaacgcttcgtttgcccgcaatgtcgagaaagcaggcctgattgtgagtgacgtctagtttaatctacgttaagtacttcgcaacttgggctaatagctgtgaatataatagtttgtcggtccctcaccagatgtcatcgattctcttggagacaaggtgtctgcccgaaagcttgctattgctgcgaacgtcccggtcgtacccggcacacccgacgctgtgggcacattcgaagaagttaagagcttcacggacgaatacggattccccatcatcatcaaggctgcctttggtggtggtggccgcggaatgagagtcgtgcggaaccaggcagatctgaaggaatcattcgagcgagctacttccgaggcaaagacggcgttcggaaacggcaccgttttcgtcgaacgattcttggacaagcccaagcatatcgaagttcagctgttaggcgacaaccatggtaacattgttcatttgtacgagcgtgattgctcggtccagcgcagacatcaaaaggtagtggagattgcgcccgcaaaagatctgcctgccgagacccgagacgcgattttggccgatgcagtcaagctggccaaatccgtaaactaccgaaatgccggaacagcggagttcttagtggatcaacaaaaccgatactacttcatcgagatcaacccacgtatccaagtcgagcacaccattaccgaggaaatcactggcattgatatcgtcgccgctcagattcagatcgctgcaggtgcttccttgcagcagctcggcttgacccaagatcgcatttccactcggggttttgccatccaatgccgaattaccaccgaggatccagccaaacagttccagcctgataccggcaagatcgaggtgtatagatctgcgggtggtaatggtgttcgtctggatggtggtaatggatttgctggcgcggtcattacaccctactacgattctatgctggtcaagtgcacatgccacggctcaacctacgaaatagcacgtcgcaaggtcctgcgagccctgattgaatttcgagtacgcggtgtgaagaccaatatcccattcttggcttctctgctcactcacgaaactttcatcgatggcaactgctggaccacattcattgacgatagccctgagctcttcaacttggtcggcagtcaaaaccgtgctcagaagctgcttgcatacctcggagatgttgctgtgaacggaagcagtatagctggccagataggtgaacccaaattcaagggtgagatcatcctaccagagctgttcaacgacgatggtacgaaacttgatgtttctcaaccttgtcagaaaggttggcgacaagtcattctggagcaaggcccgaaggctttcgccaaagcagttcgtgaatacaaggggtgtttgctgatggataccacatggcgagatgctcatcaatctctgcttgctacccgtgtccgaactgttgaccttcttggcattgccaaagaaacaagccatgccttatcaaacctatacagtctggagtgctggggtggtgccaccttcgacgtcgccatgcgattcttgtacgaagatccttgggaccgtctgcgcaaaatgcgcaaagccgtacccaacattcccttccaaatgcttcttcgtggcgccaacggtgttgcttatgcctcgcttccagacaatgccatttaccactttgtcgagcaagctaagaagaatggagtcgatatcttccgagtctttgatgccttgaacgatatcgaccagcttgaggttggtatcaaagccgtccaaaaagccgggggtgtatgtgagggaactgtttgctactcgggagacatgttgaaccccaagaagaagtataacctggagtactacatgagtctcgtcgagaaactagtcgctcttgacatcgatgtcctcggtatcaaggatatggctggtgtcttgaaaccacatgctgcaactctccttatcggcagtatcagaaagaaataccccgatcttgcaatccatgtccatactcacgactccgcgggtactggtgttgcatccatggttgcctgtgccgcagccggcgctgatgctgtcgatgcggctaccgatagtctttctggtatgacctctcagcccagcatcaacgctattctagcctcgctcgaaggcagcgatttggaccctggtctgaatcctgctcacgtacgtgcactcgatacctactggtctcagctgcgccttctgtactcgcctttcgaagcgcaccttgctggtcccgacccagaagtttacgaacacgaaattccaggagggcaactcacaaacatgatgttccaggcctcgcagctaggcctgggttcgcaatgggctgagacaaagaaggcttacgagcaagctaatgacctccttggtgacattgtgaaagtcacgccaacttccaaggtcgtcggtgatcttgcacaattcatggtgtcgaacaaattgggacctcaagatgttgtcaagcgtgctgctgagctcgatttccccggctcagtactcgagttcctcgagggtatgatgggccagccttacggcggattccctgaaccacttcgcagcaatgcacttcgtaaccgccggaagttcgataagcgacctggactctacctggaccccattgacttcaagaaggccaaagcagagctctcgcagaaatggggcaataccaccgagtgtgatcttgcttcttatttgatgtaccccaaggtttttgatgattacaagaaattcgttgacaagtttggcgacctgtccgttcttcctactcgatacttcctgtctgcttcccagattggcgaggagttccatgttgagctcgagaagggcaaggtcttgattttgaagcttttggcaatcggccctctatctgagaacactggtcagcgtgaggtgttctatgaaatgaacggcgaagtccgccaagtcactgtcgatgacaagaaggctagcgtcgagaatgttagccgacccaaggccgaccccaatgattcaagccaagttggtgcgcccatggctggtgtcctggttgaactgcgagtgcacgaaggctctgatgtcaagaagggcgatcctttggctgtgcttagcgccatgaagatggaaatggtcatctcagcgcctcacaatggaaaagttacggggctccaggccacacaaggtgattcagtggcaggctcggatctactttgccgaatcacgaaggcatagacaacctgctactgctgttcagatggtttcttggcgtgatcataaaccagatggctggttttgtgctttagatcaatgggtgggagacggagccaggctcgtacagctgacagactctccctacgtctcggggtttggtgtcttagattatgtttcctatgagaatcatcacatataagagtattatgcttatcattcatcaattaagaaaaactttgctctttagtctcggt

SEQ ID NO: 8951 - DNA, 2400 bp, Muscodor strobelii
  misc_feature: SGI cDNA ID NO. 562779
  misc_feature: Encodes the peptide sequence at SEQ ID NO 8952
atgttcgattcaacatcttctagaggccttttggctcttacgctgggtcttcttcctctcgcaagtaccgcctcttgcccgtatgctcgtgatgcctcgtcagttcagcagccggagtcgatcctgaagacaagagcgaatcaagatggagacattggtcgatgtccgaggaagtctaagtttgccggcggtggtaccagaagttcagactggtggccctgcgagttgaacttagcggtcttgcgtcagaatagcccaaaagtcaatccgtttgacgctgactttgattacgcgacagagtttgctggcttggatgtgtcccaacttaaaaaagatctaacagctctgcaaacggaatctcagagctggtggccggcagacttccagaactatggtcctttctgggttcgtcttgcctggcacagcgctggtacatatcgccaggttgatggtcggggtggtgctggcatggggcaacaacgctttgctccccttaacagctggccggataatgccagtcttgacaaagctcgccgtcttctctggcctatcaagcagaaatacggtgatcaactatcatgggccgacttattcgtttatgccggcaacgtcgcgatggagaacatgggctttcccacatacgggtttgccttcggtcgtgttgatacctggcagtcagatgagggtgtctattggggagcagagaccgaattcgttccaggtccggacagcgatggcccacgctacaacggaagcgatgatatctttgaccgtgccgacaagcttgagagtcctcttggtgctacaaacatgggtctcatctacgtaaatccagaaggacctgctggatctagtgactttaacgctgctgctcttgacattcgcatgacctttggcagaatgggtatggatgatgaagaaaccgttgccttaatcgctggtggccacgcgttcggaaagactcacggcgctgtcgatggtgctaatatcggcgctgagcccaatgccgccgcgatcgagctccagggcttgggatggaagaacagcttcgagagtggtgtcggcaccaatgccttcacgtccggtcttgaagttatctggtcaaagacgcccactaagtggagcaatgaattcctcacatctctcttcaagaacgaatggacactagtagacgcacctgctgctgggcacaagcaatgggaagctctcaatgctacagcaaactaccctgaccctttcgtccctggcaaatttcataggccaactatgttgacgagtgatctggctttaattcatgacgccaagtacaagaagatctctgagacatacctcaaggactttgactccttcacggagaaattcgccttaacctggtacaagcttttgcatcgtgatatgggacctgtgtctcgctacctcggccccgaggttcccaagaacaacactttcatctggcaagatcctcttcctattgcaagctacgacacgatcgacgatacggatgtggcatctctaaaagaagctattctcaccgcacctggtctcaacatttccaacttggttaccaccgcctggggatcagcctcgactttccgtatttcggacaagcgcggtggtgccaatggtgctcgtattgccttggagccccaaaagtcatttgctgtcaacaatcctgagcggctggatgccgttcttaagagtctcaaagaagtcatggacacattcaactccgccaacggaggcaagcaagtgtccctcgctgatctcatcgtcattggtggtagcgctgctgtcgaggcggctgctaaggcagcgggcgtcgatgtctcagtaccagtcaccgttggccgtgtagatgctacccaagaagataccgatcttgaggccttttcctaccttgaacccattgccgatggtttccgcaactacggtcacggaagcaccacaggctcgcttaccgaggagatcctcgtagataaggcatcgcagctctccctcagcccaccggagctgacagtcctcgtcggtggtctgcgtgccctaggtgccaactacgatggctccagcaccggtatcctcaccgacaacgtcggagagctgaccaacgactggtttgtgaacttgctgagctcatccactgcctggtcgcctgttgccggctcaaacgacgagctgttcgagggtaaggacctcgagagtgggaagactaagtactctgctacacgcgccgatctcatcttcggctcgcatcccgaacttcgcgctgttgccgaggtttatggcaccaagaccaagaaggcgcagtccaagttcgtcggtgacttcgtcaaggttttcgccaaggtcatggacttggatcgctatgatatcaaggggcgcgcacagaacaacgtccagtaa

SEQ ID NO: 8952 - protein, 799 aa, Muscodor strobelii
  misc_feature: SGI Peptide ID NO. 562779
  misc_feature (453)..(791): Pfam Id: PF00141 Pfam Desc: Peroxidase
  misc_feature (109)..(446): Pfam Id: PF00141 Pfam Desc: Peroxidase
  misc_feature (458)..(791): Pfam Id: PF00141 Pfam Desc: Peroxidase
  misc_feature (10)..(791): NCBI GI: 39964306 Blast Desc: MGG_09834 [Magnaporthe grisea 70-15] gi|205495874|sp|A4QUT2.1|KATG2_MAGGR RecName: Full=Catalase-peroxidase 2; Short=CP 2; AltName: 2; Flags: grisea
  misc_feature (26)..(791): NCBI GI: 46116016 Blast Desc: FG03850.1 [Gibberella zeae PH-1]
  misc_feature (7)..(793): NCBI GI: 256722721 Blast Desc: NECHADRAFT_102077 [Nectria haematococca mpVI 77-13-4]
  misc_feature (26)..(789): NCBI GI: 242276189 Blast Desc: KatG2 precursor [synthetic construct]
  misc_feature (10)..(790): NCBI GI: 261361055 Blast Desc: peroxidase/catalase [Verticillium albo-atrum VaMs.102]
  misc_feature (12)..(791): NCBI GI: 126663684 Blast Desc: catalase/peroxidase HPI [Flavobacteria bacterium BAL38] gi|126624267|gb|EAZ94959.1| catalase/peroxidase HPI [Flavobacteria bacterium BAL38]
  misc_feature (54)..(791): NCBI GI: 115433813 Blast Desc: peroxidase/catalase 2 [Aspergillus terreus NIH2624] gi|121734972|sp|Q0CD12.1|KATG_ASPTN RecName: Full=Catalase-peroxidase; Short=CP; AltName: peroxidase/catalase
  misc_feature (54)..(790): NCBI GI: 167564020 Blast Desc: catalase/peroxidase HPI [Burkholderia oklahomensis EO147]
  misc_feature (54)..(790): NCBI GI: 167571165 Blast Desc: catalase/peroxidase HPI [Burkholderia oklahomensis C6786]
  misc_feature (54)..(793): NCBI GI: 121715033 Blast Desc: bifunctional catalase-peroxidase Cat2 [Aspergillus clavatus NRRL 1] gi|215275380|sp|A1C8R3.1|KATG_ASPCL RecName: Full=Catalase-peroxidase; Short=CP; AltName: bifunctional Cat2 1]
  misc_feature (26)..(791): SWISSPROT Homolog: EC 1.11.1.6 Catalase
  misc_feature (26)..(791): SWISSPROT Homolog: EC 1.11.1.7 Peroxidase
MFDSTSSRGLLALTLGLLPLASTASCPYARDASSVQQPESILKTRANQDGDIGRCPRKSKFAGGGTRSSDWWPCELNLAVLRQNSPKVNPFDADFDYATEFAGLDVSQLKKDLTALQTESQSWWPADFQNYGPFWVRLAWHSAGTYRQVDGRGGAGMGQQRFAPLNSWPDNASLDKARRLLWPIKQKYGDQLSWADLFVYAGNVAMENMGFPTYGFAFGRVDTWQSDEGVYWGAETEFVPGPDSDGPRYNGSDDIFDRADKLESPLGATNMGLIYVNPEGPAGSSDFNAAALDIRMTFGRMGMDDEETVALIAGGHAFGKTHGAVDGANIGAEPNAAAIELQGLGWKNSFESGVGTNAFTSGLEVIWSKTPTKWSNEFLTSLFKNEWTLVDAPAAGHKQWEALNATANYPDPFVPGKFHRPTMLTSDLALIHDAKYKKISETYLKDFDSFTEKFALTWYKLLHRDMGPVSRYLGPEVPKNNTFIWQDPLPIASYDTIDDTDVASLKEAILTAPGLNISNLVTTAWGSASTFRISDKRGGANGARIALEPQKSFAVNNPERLDAVLKSLKEVMDTFNSANGGKQVSLADLIVIGGSAAVEAAAKAAGVDVSVPVTVGRVDATQEDTDLEAFSYLEPIADGFRNYGHGSTTGSLTEEILVDKASQLSLSPPELTVLVGGLRALGANYDGSSTGILTDNVGELTNDWFVNLLSSSTAWSPVAGSNDELFEGKDLESGKTKYSATRADLIFGSHPELRAVAEVYGTKTKKAQSKFVGDFVKVFAKVMDLDRYDIKGRAQNNVQ

SEQ ID NO: 8953 - DNA, 3095 bp, Muscodor strobelii
  misc_feature: SGI EST ID NO. CUFF.21398.0
  misc_feature: Variant of the nucleotide sequence at SEQ ID NO 8951
aagctacacacctattctaagaaaatatgattccaaaaagtgatggatatcgatacgtaagattatagtctcgcgattcattgtctctttgtggcaatcgggggtttcagatccacactcagcaagatgcctccttctgcaatcagaagttcatatcactcctaacagcacatggatgacttaacgtctaagaggattatttcggaagaagcctattggctgtctcgaattacatcacgccagcgtcgaggcgcgaggaagagaatgtctgtgatccacatgaaaagacccgcaacatgcttgtaaatcaaggatcatgactccctggcactggcatggggagaaaagataacaaacattctggaccctttgggaacaacagcgagtcgatttttccgaatagtcatacatgggccaaactatacataaatacgatgagggttgtttggacaaaaagccagctgggcagctctcatcgctcgttaccgggttgtctcctttcaataggtttagagttctcggcccgctgatataatgatgttcgattcaacatcttctagaggccttttggctcttacgctgggtcttcttcctctcgcaagtaccgcctcttgcccgtatgctcgtgatgcctcgtcagttcagcagccggagtcgatcctgaagacaagagcgaatcaagatggagacattggtcgatgtccgaggaagtctaagtttgccggcggtggtaccagaagttcagactggtggccctgcgagttgaacttagcggtcttgcgtcagaatagcccaaaagtcaatccgtttgacgctgactttgattacgcgacagagtttgctggcttggatgtgtcccaacttaaaaaagatctaacagctctgcaaacggaatctcagagctggtggccggcagacttccagaactatggtcctttctgggttcgtcttgcctggcacagcgctggtacatatcgccaggttgatggtcggggtggtgctggcatggggcaacaacgctttgctccccttaacagctggccggataatgccagtcttgacaaagctcgccgtcttctctggcctatcaagcagaaatacggtgatcaactatcatgggccgacttattcgtttatgccggcaacgtcgcgatggagaacatgggctttcccacatacgggtttgccttcggtcgtgttgatacctggcagtcagatgagggtgtctattggggagcagagaccgaattcgttccaggtccggacagcgatggcccacgctacaacggaagcgatgatatctttgaccgtgccgacaagcttgagagtcctcttggtgctacaaacatgggtctcatctacgtaaatccagaaggacctgctggatctagtgactttaacgctgctgctcttgacattcgcatgacctttggcagaatgggtatggatgatgaagaaaccgttgccttaatcgctggtggccacgcgttcggaaagactcacggcgctgtcgatggtgctaatatcggcgctgagcccaatgccgccgcgatcgagctccagggcttgggatggaagaacagcttcgagagtggtgtcggcaccaatgccttcacgtccggtcttgaagttatctggtcaaagacgcccactaagtggagcaatgaattcctcacatctctcttcaagaacgaatggacactagtagacgcacctgctgctgggcacaagcaatgggaagctctcaatgctacagcaaactaccctgaccctttcgtccctggcaaatttcataggccaactatgttgacgagtgatctggctttaattcatgacgccaagtacaagaagatctctgagacatacctcaaggactttgactccttcacggagaaattcgccttaacctggtacaagcttttgcatcgtgatatgggacctgtgtctcgctacctcggccccgaggttcccaagaacaacactttcatctggcaagatcctcttcctattgcaagctacgacacgatcgacgatacggatgtggcatctctaaaagaagctattctcaccgcacctggtctcaacatttccaacttggttaccaccgcctggggatcagcctcgactttccgtatttcggacaagcgcggtggtgccaatggtgctcgtattgccttggagccccaaaagtcatttgctgtcaacaatcctgagcggctggatgccgttcttaagagtctcaaagaagtcatggacacattcaactccgccaacggaggcaagcaagtgtccctcgctgatctcatcgtcattggtggtagcgctgctgtcgaggcggctgctaaggcagcgggcgtcgatgtctcagtaccagtcaccgttggccgtgtagatgctacccaagaagataccgatcttgaggccttttcctaccttgaacccattgccgatggtttccgcaactacggtcacggaagcaccacaggctcgcttaccgaggagatcctcgtagataaggcatcgcagctctccctcagcccaccggagctgacagtcctcgtcggtggtctgcgtgccctaggtgccaactacgatggctccagcaccggtatcctcaccgacaacgtcggagagctgaccaacgactggtttgtgaacttgctgagctcatccactgcctggtcgcctgttgccggctcaaacgacgagctgttcgagggtaaggacctcgagagtgggaagactaagtactctgctacacgcgccgatctcatcttcggctcgcatcccgaacttcgcgctgttgccgaggtttatggcaccaagaccaagaaggcgcagtccaagttcgtcggtgacttcgtcaaggttttcgccaaggtcatggacttggatcgctatgatatcaaggggcgcgcacagaacaacgtccagtaagcaatagacgatgtaatgggatctatgatggacggcctaggattacatagggtttgattgagttacttcccttcgctgtatatataacttgtcaatgagtcgatcgatgtacaaattgcgcgcgcatcaaaatatttaacacctttgctcgaacgaga

SEQ ID NO: 8954 - DNA, 408 bp, Muscodor strobelii
  misc_feature: SGI cDNA ID NO. 562780
  misc_feature: Reduced expression when VOC is produced
  misc_feature: Encodes the peptide sequence at SEQ ID NO 8955
atggccgccttcgtcaaagccgtcaatgccaagatcaggtccaacccaaccgtgagctacttctgctcgacgcatttctgggggcctgcatctaacttcggtattcctatggcagcgattgctgacgctcagaagtcgcccgagctgatctcaggccacatgaccctcgctctctgcgtctactccgcaaccttcatgcgctactcgctcgccgtgagccccaagaactacctccttttcttatgccacttcatcaacgagggttcgcaactcaatcaaggttaccgatacttgaattggcaccactggggcggaaaggagaaagccggtgtgacgggtactctcgaggctgcaaaggagaaggttgttgccgctggcgataaggctaaggaggccatctcgaaataa

SEQ ID NO: 8955 - protein, 135 aa, Muscodor strobelii
  misc_feature: SGI Peptide ID NO. 562780
  misc_feature (7)..(124): Pfam Id: PF03650 Pfam Desc: Uncharacterised protein family (UPF0041)
  misc_feature (23)..(124): Pfam Id: PF03650 Pfam Desc: Uncharacterised protein family (UPF0041)
  misc_feature (1)..(135): NCBI GI: 116181000 Blast Desc: CHGG_01128 [Chaetomium globosum CBS 148.51] gi|88185425|gb|EAQ92893.1| CHGG_01128 [Chaetomium globosum CBS 148.51]
  misc_feature (1)..(135): NCBI GI: 154308566 Blast Desc: BC1G_08343 [Botryotinia fuckeliana B05.10] gi|150852884|gb|EDN28076.1| BC1G_08343 [Botryotinia fuckeliana B05.10]
  misc_feature (1)..(135): NCBI GI: 85119469 Blast Desc: NCU02507 [Neurospora crassa OR74A] gi|28927450|gb|EAA36402.1| [Neurospora crassa OR74A]
  misc_feature (1)..(135): NCBI GI: 156036370 Blast Desc: SS1G_12874 [Sclerotinia sclerotiorum 1980] gi|154698279|gb|EDN98017.1| SS1G_12874 [Sclerotinia sclerotiorum 1980]
  misc_feature (1)..(116): NCBI GI: 171696274 Blast Desc: protein product [Podospora anserina] gi|170948379|emb|CAP60543.1| protein product [Podospora anserina]
  misc_feature (1)..(109): NCBI GI: 85078821 Blast Desc: NCU08794 [Neurospora crassa OR74A] gi|28917291|gb|EAA27001.1| conserved [Neurospora crassa OR74A]
  misc_feature (1)..(128): NCBI GI: 225680899 Blast Desc: [Paracoccidioides brasiliensis Pb03] gi|226292604|gb|EEH48024.1| [Paracoccidioides brasiliensis Pb18]
  misc_feature (1)..(122): NCBI GI: 39974011 Blast Desc: MGG_00848 [Magnaporthe grisea 70-15] gi|145018211|gb|EDK02490.1| MGG_00848 [Magnaporthe grisea 70-15]
  misc_feature (13)..(135): NCBI GI: 46125393 Blast Desc: FG07074.1 [Gibberella zeae PH-1]
  misc_feature (13)..(135): NCBI GI: 256733061 Blast Desc: [Nectria haematococca mpVI 77-13-4]
  misc_feature: Useful for introducing or modulating the production of volatile compounds
MAAFVKAVNAKIRSNPTVSYFCSTHFWGPASNFGIPMAAIADAQKSPELISGHMTLALCVYSATFMRYSLAVSPKNYLLFLCHFINEGSQLNQGYRYLNWHHWGGKEKAGVTGTLEAAKEKVVAAGDKAKEAISK

SEQ ID NO: 8956 - DNA, 937 bp, Muscodor strobelii
  misc_feature: SGI EST ID NO. CUFF.21492.1
  misc_feature: Variant of the nucleotide sequence at SEQ ID NO 8954
cgtcagccacaattccgattttctccgaacctcgagagacccgagagattgcgcgaagacgaccttgatctcctggcgcaacgaccttcacgaacgtccacgagtccgcgccctcttccgccaattgcccacgtctgccgccccgcgatccctcaaaatggccgccttcgtcaaagccgtcaatgccaagatcaggtccaacccaaccgtgagctacttctgctcgacgcatttctgggggcctgcatctaacttcggtattcctatggcagcgattgctgacgctcagaagtcgcccgagctgatctcaggccacatgaccctcgctctctgcgtctactccgcaaccttcatgcgctactcgctcgccgtgagccccaagaactacctccttttcttatgccacttcatcaacgagggttcgcaactcaatcaaggttaccgatacttgaattggcaccactggggcggaaaggagaaagccggtgtgacgggtactctcgaggctgcaaaggagaaggttgttgccgctggcgataaggctaaggaggccatctcgaaataagtcaaatcattgtgtatcaccaacaatgacacaagtcatatcgtggggacggtgaagtggcgaggcgttatccgtagaagggacttaacttgttagacaatcaggactactaagcctggagagtccacctctgtttatactccatcagagaaacacatgaggccgacccgccattagattggtggcttctataaacactgtatatctactgcccagctaaagaagtaggcagctcgcacttaaaacgagtggccacattacatcacaaaagatttaaaacaacgttcctcattaaattatgaacggcttgttgtcacgaaaattgagtgtgctgtaaaagatatccaacaaatttacaacgcttcgcatcgg

SEQ ID NO: 8957 - DNA, 441 bp, Muscodor strobelii
  misc_feature: SGI cDNA ID NO. 562781
  misc_feature: Encodes the peptide sequence at SEQ ID NO 8958
atggccgccttcgtcaaagccgtcaatgccaagatcaggtccaacccaaccgtgagctacttctgctcgacgcatttctgggggcctgcatctaacttcggtattcctatggcagcgattgctgacgctcagaagtcgcccgagcttggcgaccagctgaccatcaatgatcataacaggatctcaggccacatgaccctcgctctctgcgtctactccgcaaccttcatgcgctactcgctcgccgtgagccccaagaactacctccttttcttatgccacttcatcaacgagggttcgcaactcaatcaaggttaccgatacttgaattggcaccactggggcggaaaggagaaagccggtgtgacgggtactctcgaggctgcaaaggagaaggttgttgccgctggcgataaggctaaggaggccatctcgaaataa

SEQ ID NO: 8958 - protein, 146 aa, Muscodor strobelii
  misc_feature: SGI Peptide ID NO. 562781
  misc_feature (7)..(135): Pfam Id: PF03650 Pfam Desc: Uncharacterised protein family (UPF0041)
  misc_feature (23)..(135): Pfam Id: PF03650 Pfam Desc: Uncharacterised protein family (UPF0041)
  misc_feature (1)..(146): NCBI GI: 116181000 Blast Desc: CHGG_01128 [Chaetomium globosum CBS 148.51] gi|88185425|gb|EAQ92893.1| CHGG_01128 [Chaetomium globosum CBS 148.51]
  misc_feature (1)..(146): NCBI GI: 85119469 Blast Desc: NCU02507 [Neurospora crassa OR74A] gi|28927450|gb|EAA36402.1| [Neurospora crassa OR74A]
  misc_feature (1)..(146): NCBI GI: 154308566 Blast Desc: BC1G_08343 [Botryotinia fuckeliana B05.10] gi|150852884|gb|EDN28076.1| BC1G_08343 [Botryotinia fuckeliana B05.10]
  misc_feature (1)..(146): NCBI GI: 156036370 Blast Desc: SS1G_12874 [Sclerotinia sclerotiorum 1980] gi|154698279|gb|EDN98017.1| SS1G_12874 [Sclerotinia sclerotiorum 1980]
  misc_feature (1)..(127): NCBI GI: 171696274 Blast Desc: protein product [Podospora anserina] gi|170948379|emb|CAP60543.1| protein product [Podospora anserina]
  misc_feature (1)..(120): NCBI GI: 85078821 Blast Desc: NCU08794 [Neurospora crassa OR74A] gi|28917291|gb|EAA27001.1| conserved [Neurospora crassa OR74A]
  misc_feature (1)..(139): NCBI GI: 225680899 Blast Desc: [Paracoccidioides brasiliensis Pb03] gi|226292604|gb|EEH48024.1| [Paracoccidioides brasiliensis Pb18]
  misc_feature (1)..(133): NCBI GI: 39974011 Blast Desc: MGG_00848 [Magnaporthe grisea 70-15] gi|145018211|gb|EDK02490.1| MGG_00848 [Magnaporthe grisea 70-15]
  misc_feature (13)..(146): NCBI GI: 46125393 Blast Desc: FG07074.1 [Gibberella zeae PH-1]
  misc_feature (13)..(146): NCBI GI: 256733061 Blast Desc: [Nectria haematococca mpVI 77-13-4]
MAAFVKAVNAKIRSNPTVSYFCSTHFWGPASNFGIPMAAIADAQKSPELGDQLTINDHNRISGHMTLALCVYSATFMRYSLAVSPKNYLLFLCHFINEGSQLNQGYRYLNWHHWGGKEKAGVTGTLEAAKEKVVAAGDKAKEAISK

SEQ ID NO: 8959 - DNA, 937 bp, Muscodor strobelii; identical to SEQ ID NO: 8956
  misc_feature: SGI EST ID NO. CUFF.21492.1
  misc_feature: Variant of the nucleotide sequence at SEQ ID NO 8957

SEQ ID NO: 8960 - DNA, 627 bp, Muscodor strobelii
  misc_feature: SGI cDNA ID NO. 562782
  misc_feature: Reduced expression when VOC is produced
  misc_feature: Encodes the peptide sequence at SEQ ID NO 8961
atgtccaacaagcaaggcaagatggccggttatatcaactaccggatgagagtcacgttgacggacggtcgacagatgaccggacagctcctcgcattcgacaagcatatgaacctggttctaggcgacacggatgaattccgacgaataaagcgaaagcaggcgaagcccgctgcccccggggcttcgagctcatccacccagaccgtcgagacagaagagaagcgaacactgggactcaccatcttgcgcggcgcacatatcgtttccctctccgtcgagtccgcacccccggccaaccccagcacaagactcggcaagagcacaaccggcggtcttcccactggcctggccacgggtcctggtgtgtcgcgtcctgccggccgaggtgctgccccgacatcccttgctggtcctgctgcaggtgttggtggtggcgcccctccgccgttcccccaatttggtggcgcccctggcttcccgggaagaggcggcccccctggcggattcccacctggaaacttccctcctcccggctttcctcaaggtgcacagcaattcccgccgcctggcttcaacccgggtgctggtggacctcctggattcaaccctcctccccgcagatga

SEQ ID NO: 8961 - protein, 208 aa, Muscodor strobelii
  misc_feature: SGI Peptide ID NO. 562782
  misc_feature (6)..(93): Pfam Id: PF01423 Pfam Desc: LSM domain
  misc_feature (1)..(136): NCBI GI: 256734426 Blast Desc: NECHADRAFT_98762 [Nectria haematococca mpVI 77-13-4]
  misc_feature (1)..(140): NCBI GI: 46108400 Blast Desc: FG01082.1 [Gibberella zeae PH-1]
  misc_feature (1)..(132): NCBI GI: 261356485 Blast Desc: SMB [Verticillium albo-atrum VaMs.102]
  misc_feature (2)..(123): NCBI GI: 116181000 Blast Desc: CHGG_01128 [Chaetomium globosum CBS 148.51] gi|88185425|gb|EAQ92893.1| CHGG_01128 [Chaetomium globosum CBS 148.51]
  misc_feature (2)..(123): NCBI GI: 85119473 Blast Desc: NCU02508 [Neurospora crassa OR74A] gi|28927451|gb|EAA36403.1| [Neurospora crassa OR74A]
  misc_feature (2)..(117): NCBI GI: 39972919 Blast Desc: MGG_07754 [Magnaporthe grisea 70-15] gi|145012525|gb|EDJ97179.1| MGG_07754 [Magnaporthe grisea 70-15]
  misc_feature (1)..(151): NCBI GI: 156036372 Blast Desc: SS1G_12875 [Sclerotinia sclerotiorum 1980] gi|154698280|gb|EDN98018.1| SS1G_12875 [Sclerotinia sclerotiorum 1980]
  misc_feature (2)..(130): NCBI GI: 238843659 Blast Desc: SMB [Microsporum canis CBS 113480]
  misc_feature (2)..(130): NCBI GI: 226282236 Blast Desc: PAAG_00723 [Paracoccidioides brasiliensis Pb01]
  misc_feature (2)..(130): NCBI GI: 226292603 Blast Desc: PADG_04107 [Paracoccidioides brasiliensis Pb18]
  misc_feature: Useful for introducing or modulating the production of volatile compounds
MSNKQGKMAGYINYRMRVTLTDGRQMTGQLLAFDKHMNLVLGDTDEFRRIKRKQAKPAAPGASSSSTQTVETEEKRTLGLTILRGAHIVSLSVESAPPANPSTRLGKSTTGGLPTGLATGPGVSRPAGRGAAPTSLAGPAAGVGGGAPPPFPQFGGAPGFPGRGGPPGGFPPGNFPPPGFPQGAQQFPPPGFNPGAGGPPGFNPPPRR

SEQ ID NO: 8962 - DNA, 1145 bp, Muscodor strobelii
  misc_feature: SGI EST ID NO. CUFF.21405.0
  misc_feature: Variant of the nucleotide sequence at SEQ ID NO 8960
gccggttatatcaactaccggatgagagtcacgttgacggacggtcgacagatgaccggacagctcctcgcattcgacaagcatatgaacctggttctaggcgacacggatgaattccgacgaataaagcgaaagcaggcgaagcccgctgcccccggggcttcgagctcatccacccagaccgtcgagacagaagagaagcgaacactgggactcaccatcttgcgcggcgcacatatcgtttccctctccgtcgagtccgcacccccggccaaccccagcacaagactcggcaagagcacaaccggcggtcttcccactggcctggccacgggtcctggtgtgtcgcgtcctgccggccgaggtgctgccccgacatcccttgctggtcctgctgcaggtgttggtggtggcgcccctccgccgttcccccaatttggtggcgcccctggcttcccgggaagaggcggcccccctggcggattcccacctggaaacttccctcctcccggctttcctcaaggtgcacagcaattcccgccgcctggcttcaacccgggtgctggtggacctcctggattcaaccctcctccccgcagatgatctagcagcttgatctggacacaaggtagcggaaagggctcaagaaattatgataccctcaggtgttgggtagtatgacgaaggcatatgcatgctatagcaatggaaagctgacggattctgggtctacaaaaggcggcttggattctcaaagagaagacgatgagtttgaccgccagagcgtacgttaaggaaggctaaagcagtaatgactggctgtcctcctgttatgatgcgccagtaaaagaactgaaagcatagctggtcgatactaggactatgacatcaataattaggctgtcgggtaagcttcaggagcgtcagctcggttacgagctgatttccgacaaaatacaaattacttcagattaatatctgctccagctgccaattgagaagtttgctagcattgggttatccgccgagacaaagtgagaagagtgattataacagtgacttggttcgcttgatgagactttgaacgaatttaagtgttcatccaatgtgatctacatgagataggtatgcaaggtgtgcacgtg

SEQ ID NO: 8963 - DNA, 576 bp, Muscodor strobelii
  misc_feature: SGI cDNA ID NO. 562783
  misc_feature: Reduced expression when VOC is produced
  misc_feature: Encodes the peptide sequence at SEQ ID NO 8964
atggaggggacaaaagcagatatgggttgcggcggcaaggctgacgcgctagccaccatgtccgacaagtcccagaaccccatgcgggagctccgcatccagaagctcgtcctcaacatctccgtcggcgagtctggtgacagactgacccgtgccgccaaggtgctcgagcagttgagcggtcagactcctgtctacagcaaggcccgctacaccgtccgtaccttcggtatccgccgtaacgagaagatcgctgtccacgtcaccatccgtggcgccaaggccgaggagattctcgagcgtggcctcaaggtcaaggagtacgagctccgcaagcgcaacttcagcgagactggcaacttcggcttcggtatcagcgagcacatcgatctcggcatcaagtacgaccccgccattggtatctacggcatggacttttacacctgcatgacccgccctggtgagcgtgtcacccgccgccgccgctgcaagggcagactcggtgccagccacaagatcaaccgtgacgagactgtcaagtggttcaagcagcgctttgacggcatcgtccgataa

SEQ ID NO: 8964 - protein, 191 aa, Muscodor strobelii
  misc_feature: SGI Peptide ID NO. 562783
  misc_feature (26)..(79): Pfam Id: PF00281 Pfam Desc: Ribosomal protein L5
  misc_feature (83)..(182): Pfam Id: PF00673 Pfam Desc: ribosomal L5P family C-terminus
  misc_feature (21)..(191): NCBI GI: 145604519 Blast Desc: MGG_07753 [Magnaporthe grisea 70-15] gi|145012524|gb|EDJ97178.1| MGG_07753 [Magnaporthe grisea 70-15]
  misc_feature (21)..(191): NCBI GI: 256735139 Blast Desc: [Nectria haematococca mpVI 77-13-4]
  misc_feature (22)..(191): NCBI GI: 119175492 Blast Desc: CIMG_09585 [Coccidioides immitis RS] gi|240107134|gb|EER25321.1| 60S ribosomal protein L11, [Coccidioides posadasii C735 delta SOWgp]
  misc_feature (17)..(191): NCBI GI: 156036374 Blast Desc: 60S ribosomal protein L11 [Sclerotinia sclerotiorum 1980] gi|154698281|gb|EDN98019.1| 60S ribosomal protein L11 [Sclerotinia sclerotiorum 1980]
  misc_feature (21)..(191): NCBI GI: 46108398 Blast Desc: FG01081.1 [Gibberella zeae PH-1]
  misc_feature (17)..(191): NCBI GI: 67531106 Blast Desc: AN4475.2 [Aspergillus nidulans FGSC A4] gi|40741628|gb|EAA60818.1| AN4475.2 [Aspergillus nidulans FGSC A4] gi|259482703|tpe|CBF77434.1| TPA: 60S ribosomal protein L11
  misc_feature (17)..(191): NCBI GI: 154308570 Blast Desc: 60S ribosomal protein L11 [Botryotinia fuckeliana B05.10] gi|150852886|gb|EDN28078.1| 60S ribosomal protein L11 [Botryotinia fuckeliana B05.10]
  misc_feature (20)..(191): NCBI GI: 169601384 Blast Desc: SNOG_03556 [Phaeosphaeria nodorum SN15] gi|111067641|gb|EAT88761.1| SNOG_03556 [Phaeosphaeria nodorum SN15]
  misc_feature (22)..(191): NCBI GI: 169773669 Blast Desc: [Aspergillus oryzae RIB40] gi|83769164|dbj|BAE59301.1| protein product [Aspergillus oryzae]
  misc_feature (22)..(191): NCBI GI: 238491682 Blast Desc: 60S ribosomal protein L11 [Aspergillus flavus NRRL3357] gi|220697491|gb|EED53832.1| 60S ribosomal protein L11 [Aspergillus flavus NRRL3357]
  misc_feature: Useful for introducing or modulating the production of volatile compounds
MEGTKADMGCGGKADALATMSDKSQNPMRELRIQKLVLNISVGESGDRLTRAAKVLEQLSGQTPVYSKARYTVRTFGIRRNEKIAVHVTIRGAKAEEILERGLKVKEYELRKRNFSETGNFGFGISEHIDLGIKYDPAIGIYGMDFYTCMTRPGERVTRRRRCKGRLGASHKINRDETVKWFKQRFDGIVR

SEQ ID NO: 8965 - DNA, 1002 bp, Muscodor strobelii
  misc_feature: SGI EST ID NO. CUFF.21422.0
  misc_feature: Variant of the nucleotide sequence at SEQ ID NO 8963
cgaaattctgaggagaactagccgaaataatcgttcgttgcaacttcagactacgagtcctgacttctgcatcagcacctgtgaccaatctccaacacaaccatcccctgggtactaacaaaccacagccaccatgtccgacaagtcccagaaccccatgcgggagctccgcatccagaagctcgtcctcaacatctccgtcggcgagtctggtgacagactgacccgtgccgccaaggtgctcgagcagttgagcggtcagactcctgtctacagcaaggcccgctacaccgtccgtaccttcggtatccgccgtaacgagaagatcgctgtccacgtcaccatccgtggcgccaaggccgaggagattctcgagcgtggcctcaaggtcaaggagtacgagctccgcaagcgcaacttcagcgagactggcaacttcggcttcggtatcagcgagcacatcgatctcggcatcaagtacgaccccgccattggtatctacggcatggacttttacacctgcatgacccgccctggtgagcgtgtcacccgccgccgccgctgcaagggcagactcggtgccagccacaagatcaaccgtgacgagactgtcaagtggttcaagcagcgctttgacggcatcgtccgataaatcaacaaaaatggcatggataatgaaaagggacatggctcggcgttagtgaattgcattggtcaggcggatctgggacaaaatcgttcacggacttgtatctactgaattctgacgagtatccacgaatacttgagcttgacttgtcaatcaagtcagctacggcctcagagaccgaccggcaccatgccggcttcctacgctacgcaaaatctgacggtgactatgtctgacattacctggaatccaacgaacttcgagtgaaattgtgttgcagcgagtacgtttactcccttggtaaagtgaatagtgagagaagagcaacatgtatagtctcgataggcgcgaac

SEQ ID NO: 8966 - DNA, 2346 bp, Muscodor strobelii
  misc_feature: SGI cDNA ID NO. 562784
  misc_feature: Encodes the peptide sequence at SEQ ID NO 8967
atgcaggccaaagatcagagggcacgtgccgagccatccagtgacggcgccgaatctaacctgagtataataaacctcccaggcgggtcatcagtcgcaggatcagctacgagatcatcgagtcgagccttgtcaaatgggccaagaagcattggttcgccctcaacagatggcgagcagtcaactctcccacgcccgccagacatattaaaccctgatcaccatccaatgctgcaaacatccagcgatgaaatagaatcatccatagacgctggtgagcccgagtcagttgagacagcgaatgatgacgacgattatgagctttcggtctctgaaggagagggttcggaaacatccattgtcactgacatgattggtcaccgtggtcgaaaatcgaagaagtcaactgcggctgtagcagcatctcggatgaagggcaaaccggttgcgaggtccaagcctacggcaggcaagaatcaagttcaagcacaaatgtctagaggtaacactgcaacgaagcaaccaagacaagctcaaggtagtgcttcaaaatctagagtaccggtcccgaaacagtcaaaacaaaccactagttcgcagtcggaccagcctgccgagcctgctcgagtctcttcctctggtcctgcaacccaaggaaaccccaaggctaatgcttccagagcaagattgcccaagccgaccttcttctctggacagaagggtgggattgcaggcactggcaaccaagcgcaccctccacagtccaagaagaaccagtataccttgaccaatggacctagtaagcgcgtggcgcctattgcgacccgatcaaacgcaaagaagcaaagaataaatgctacacatgatgttaacagtgatggcaagcaggatgaacacagcttcaatgatcaacgtgagcaggatcccaaaagagcgtcaccagaggatgtgtctgtggtcactgaagtacgatcgcaagacgatgatgctttcccagctagccatgagagtcccagtgcttccgcagcggaggacatgttcgtagggcttaaacaaaagacagacaaagacaaattttcgaccgagaaacatatgttcacagagccaattgctgaagatgctgaagacttgttcgagacgtcgatgaagaatactaacttgacaacctacgacatgcgatcaaagggtaaagcgacagaaaatgcagcctcgactctcatatcatcgccacaagtcacagtcgggaacaaggcatctgataatactcaacatcggacagatcttcgtgatcaagagatggagaatgcgtccacgagagcgaaagcaactcgacaccagcagtcagcttacgattatcccaatgatgataagaatattacaggagagacggcaactgtatctgaagccgaactttcgtatctacctgagaaagttgatatttctgataagtcactcactctccctggtccaaagcatcatggtgaatctcttgctccatcaccacaaagccttggaggacgaggttccagacagagcgagattagagcttttaatcttgtgccaggtgacgcctctcacagacgcctgccagtcggtgaagattcctcacgctggcgtgcacaaattgaccaggagttttcgcattctccaggtgtctacccacaagcagacgacgtctatcacccaacgaagcccaccccaatgtcggaccaatcacgatacgagaaaaacatgagtccattaaattcgattggctcaactcgagaccttagatatccagacatgagattgccgttgaacccgaagtctattgaatttgcccgtagaatgtctcagagaccgtccgcctctggttcaaattcctcagatgtcggccataggcaggtctgtcaagatcgggcgccagtgcacgggaagtcctacttttcttcccaggcaccaagcgagcatttagcagagcctaacgatttggaagagtgcatgggtatcaagggggcccgtgaggacgtttaccacgcaatgggacaagtaacgagcgacgcgtttaaaaatcttgagtcgaaagaagccgatctcgatgaaatcactcgttctttccagcgaaacatacccagaatattcgaccaggttatggctcgccagcaaagagaacttgatacatgcatctctcaattcaagaccaattgcaaggataaacaagccgtgtacaaacaggcgatggggtttgtggatggtcttcaaaacaaagctgatgaccagcaggacactatcgcaatgtggaaaaagatcgctgcagaagaagaagaagccctcagaaagtacagcaagaaaacagcaaagctttga

SEQ ID NO: 8967 - protein, 781 aa, Muscodor strobelii
  misc_feature: SGI Peptide ID NO. 562784
MQAKDQRARAEPSSDGAESNLSIINLPGGSSVAGSATRSSSRALSNGPRSIGSPSTDGEQSTLPRPPDILNPDHHPMLQTSSDEIESSIDAGEPESVETANDDDDYELSVSEGEGSETSIVTDMIGHRGRKSKKSTAAVAASRMKGKPVARSKPTAGKNQVQAQMSRGNTATKQPRQAQGSASKSRVPVPKQSKQTTSSQSDQPAEPARVSSSGPATQGNPKANASRARLPKPTFFSGQKGGIAGTGNQAHPPQSKKNQYTLTNGPSKRVAPIATRSNAKKQRINATHDVNSDGKQDEHSFNDQREQDPKRASPEDVSVVTEVRSQDDDAFPASHESPSASAAEDMFVGLKQKTDKDKFSTEKHMFTEPIAEDAEDLFETSMKNTNLTTYDMRSKGKATENAASTLISSPQVTVGNKASDNTQHRTDLRDQEMENASTRAKATRHQQSAYDYPNDDKNITGETATVSEAELSYLPEKVDISDKSLTLPGPKHHGESLAPSPQSLGGRGSRQSEIRAFNLVPGDASHRRLPVGEDSSRWRAQIDQEFSHSPGVYPQADDVYHPTKPTPMSDQSRYEKNMSPLNSIGSTRDLRYPDMRLPLNPKSIEFARRMSQRPSASGSNSSDVGHRQVCQDRAPVHGKSYFSSQAPSEHLAEPNDLEECMGIKGAREDVYHAMGQVTSDAFKNLESKEADLDEITRSFQRNIPRIFDQVMARQQRELDTCISQFKTNCKDKQAVYKQAMGFVDGLQNKADDQQDTIAMWKKIAAEEEEALRKYSKKTAKL

SEQ ID NO: 8968 - DNA, 428 bp, Muscodor strobelii
  misc_feature: SGI EST ID NO. CUFF.21424.0
  misc_feature: Variant of the nucleotide sequence at SEQ ID NO 8966
gacgcgtttaaaaatcttgagtcgaaagaagccgatctcgatgaaatcactcgttctttccagcgaaacatacccagaatattcgaccaggttatggctcgccagcaaagagaacttgatacatgcatctctcaattcaagaccaattgcaaggataaacaagccgtgtacaaacaggcgatggggtttgtggatggtcttcaaaacaaagctgatgaccagcaggacactatcgcaatgtggaaaaagatcgctgcagaagaagaagaagccctcagaaagtacagcaagaaaacagcaaagctttgatgctctgcttaggactattgtccttgaaattttgaaagctagactattgctcctcagtgttcggagaagattgcccgcatggtacggagatatctacggttgctatatttatatcgctg

SEQ ID NO: 8969 - DNA, 4143 bp, Muscodor strobelii
  misc_feature: SGI cDNA ID NO. 562785
  misc_feature: Encodes the peptide sequence at SEQ ID NO 8970
atgggcgatcattttggagaataccgtcttggggtcgacgttggaggcacctttactgacgtttgcgtcatcacccctggaggcgagacagttagagcgaaaacgccttcaaccccacagaatcagagtattggtgtgaagaatggaatcgataaagtcagaaaaattctcgaagcacaatatggttggaacggcgacttcgcctatattcatcatggaagtaccgttgcaaccaatgccatcctagaatcaaagggggcaaagtctggtctagtcgtctctgccgggttcaaagaagttcttgcgaatcaacgatcccagatcccaggcggtcttggaggctggatcaactacgtccctccagagcccgtcgtaccccttgaaagaactgtgcaatgtcccgggcgtatcctacctaacggcgaagtcgtcattcccctggatgagaagactcttcgacataatctgttggatttaaaacgccaaactcctgaggctattacaatcagtttactgaactcatatgtcaatgatgaacacgagcgtgcagtagaaaaaattgtacgagaagagtttggtcccgatatcgagataatatgctcagctgatgttttgcctgaagccggggaatacgagcggacggtgacggcggcaacaaatgccgttgtaaaacccatcgtcaaacagtatatggcctccttggagaaagatcttctaactgacagcaagacgattcgcatcctgaaatctgatggtggactcacgagtcttggtcttgctggcgagaggcctgtgaacctcctcatgtctgggcccgctggaggggtgcaaggggtcgtcgacggaatctcgaagcaaacttcttaccgaaacttaataactctcgatatgggcgggacaagcacagacgttgcgttgatagtagacggcagggcagccctcagacgagaaactgttgtataccagttgacagtgctcgctcccagcatagatgtgcggactgtgggagcaggaggtggttcaattgccaaattcgttgacctcactgccagcatgagagtaggcccagagagcgctggggcaatgccaggtccagcctgttaccaaaaaggcggaaaacaggcaacagtcacggacgcgaatctgacactcggatatctgcccgagaagcttctaggtggcgatttcgacattgatgttgccgctgcagttgctgcagttaagagcatcgcggatcaaatgaacgttggtgtcgaagagacggctgagggcattataaatcttgtcaacgaaacaatgtacggcgctttgagacaggtatctgttgagcaaggtcatgatccaagagagttcgcgctggttgcctttggtggctgtggcccaatccatgccaatgcgcttggaaggcttctcggatcatggcccgttatcattcctccagctccaggcgtcttgtgcgcacaaggagatgctacgacaaagcttagccactctcagtccatctcatacatcaaatctctgtctcacattgagtcggacagctttgacgagatgcttcacaaactcaaagcagaatgcgttagtaagatggacgaagcgctgcaagaatcgtcaaataagcaattagagatcgtctacgaggttgatgtacgatataaggggcaagcactaaatacaacggttcaatttagtccagaggaacttggtcaggggaaggatatattggcgaaattattatcggaaaggttcaccgagattcacaaactccaattcggcttctcgctagacggcctcgaatttgaaattgtgagactcggagttactgcgacagacgtatcgtcaccaattcgtctagctgaaattgagaccgacgcaaagggtcaaggtattgatgtacccgagtctgcaatattaaccagaaaacctatcacagttgatggtcaccaagtcgaatcaaagttcctagaccgaggaaaactcacaaaggcaggctaccgcatcaatggaccagccgtcatatctgaaatggactctaatacactgattctacctggtttcttcggtgaaatagatcaatttggcaacatcctcattcgtccaatcgacgagacggtatctacgaagacgacatcctatactctggagactgcagccactgagatagccaaatctcctcttatcccaactctggttgggtctgctcttcaagctgtacgaatcgaaatggatacattagttcttcgatgctcgatgtcccctggaattcgcgaacaacaggacgagttcaatgttgtcactaatgaaagaggtcagatgcttgttgggcagttcgggagcttcataggggagttcctagaaggctggaaacagacaggcggcacgattgacgaaggtgatattttcataactaacgacccatactctacttcaggagccatcagtcatctaaacgatgtcattgttctcctgccaatctactacaatcacaaaatagtgggttggtctgcgaatttcggacatctgagtgatgtaggagggaaagtacctggaagtatgtcaatctcgtcgaatactctatttgaagacggcgttcaaattcctatcgtcaaactctacaaagcgggcgagtataactcagacatcatggagatactgtgccgcaattctcgcatgccagactggtaccgtagcgatattgcagcacttgtatcatcatgtaagaccgccggcgcccgagtttgtgagctaattgaccgatttgggttggaattatatcaagcgtcttgtgacgaactactcagaagaaaccagctggctgtttcgaaactgatcgacactcagttcggtgacgaaacagcggaattcaccgatttcgtcgacgacgatggagctggtaatggcccatgggccgtgaaatgcaagatgacaaaggtcaaaggtagcaaacttcgtttcgattttgatgggacaagcgcacagagtaatactgctgtcaatttcttcctgtccgctactatgttcaagatgtttgtcgggtatgtcaagaaagatgtccatggtgatctgagcgagctaatgatttacagctactacttacttgccgtcttcgatcctcaatgtgtagtcaatgagggtctttacgatttcatagaggtcgctatcccttctggctcgatcttgaaaccaacaagacctgcggccttaagctgcagaacacatcttctcgggcgggtattagatatgatccaggcgttgatgggccaacacaacaaagccttccgttctgcagcgggattctcggattcgcctcactttttcttttctggctggaagcccaacggggaatggttccaactctatcagatcatcttcggaggagttccagctcgtcctattggagacggacctgacatgcactgcttatttccggcgatcaaaagtgtaccagtagaaatcgccgaactttctttcccaatcctagtcgaagtcaacgaatctctagcggataccggaggcgctggcttttaccgcggtggtaacgcacacagaatgcgattccggttcctcaatcgcggcgagatctcaattcacgatgatcgatggttcactcacccatggggcatcgatggcgggcaacctggcaagcgttcgaaaaaaatactgtatcgatactctaaagatccccaaaagcctccggtagagtacctaccgagtaaatgcgattatgttagaattgagccggaagatgtcttggagtacatcacatggggcggaggaggattgggagatcccctcactcgacctcccgagaaagtcgcacttgaagttcaccgcaaacttgtttcggtcgaaggcgctgcaaataactatggcgtcgtcgtcgatcctacgacgttcgaagttctagtgtcagagaccgaggccttaaggaatcagataagcacaacacgtgtggaatatccaagtatctacaatcggggcggaactctagacgatctcagagctcgttctatagaagagacgggcctacctgcgccgaaagcacaatggttggaagatccttatggagcacatactcaggttccgtatgtcaaaaggtggtatcaagaaagaagagcggaaggtgactgggttctacaatag

SEQ ID NO: 8970 - protein, 1380 aa, Muscodor strobelii
  misc_feature: SGI Peptide ID NO. 562785
  misc_feature (9)..(192): Pfam Id: PF05378 Pfam Desc: Hydantoinase/oxoprolinase N-terminal region
  misc_feature (213)..(499): Pfam Id: PF01968 Pfam Desc: Hydantoinase/oxoprolinase
  misc_feature (728)..(1271): Pfam Id: PF02538 Pfam Desc: Hydantoinase B/oxoprolinase
  misc_feature (10)..(59): Pfam Id: PF01869 Pfam Desc: BadF/BadG/BcrA/BcrD ATPase family
  misc_feature (795)..(923): Pfam Id: PF02538 Pfam Desc: Hydantoinase B/oxoprolinase
  misc_feature (1149)..(1216): Pfam Id: PF02538 Pfam Desc: Hydantoinase B/oxoprolinase
  misc_feature (8)..(1378): NCBI GI: 225556901 Blast Desc: 5-oxoprolinase [Ajellomyces capsulatus G186AR]
  misc_feature (8)..(1378): NCBI GI: 154284938 Blast Desc: conserved [Ajellomyces capsulatus NAm1] gi|150406905|gb|EDN02446.1| conserved [Ajellomyces capsulatus NAm1]
  misc_feature (8)..(1380): NCBI GI: 154313328 Blast Desc: BC1G_05361 [Botryotinia fuckeliana B05.10] gi|150849430|gb|EDN24623.1| BC1G_05361 [Botryotinia fuckeliana B05.10]
  misc_feature (6)..(1380): NCBI GI: 238492467 Blast Desc: hydantoin utilization protein A, [Aspergillus flavus NRRL3357] gi|220695964|gb|EED52306.1| hydantoin utilization protein A, [Aspergillus flavus NRRL3357]
  misc_feature (6)..(1380): NCBI GI: 21954532 Blast Desc: N-methylhydantoinase [Aspergillus oryzae]
  misc_feature (4)..(1380): NCBI GI: 119488213 Blast Desc: hydantoinase/oxoprolinase, [Neosartorya fischeri NRRL 181] gi|119410806|gb|EAW20751.1| hydantoinase/oxoprolinase, [Neosartorya fischeri NRRL 181]
  misc_feature (6)..(1379): NCBI GI: 67517845 Blast Desc: AN1100.2 [Aspergillus nidulans FGSC A4] gi|40747062|gb|EAA66218.1| conserved [Aspergillus nidulans FGSC A4] gi|259488586|tpe|CBF88140.1| TPA: 5-oxoprolinase (Eurofung)
  misc_feature (3)..(1376): NCBI GI: 115385469 Blast Desc: conserved [Aspergillus terreus NIH2624] gi|114187728|gb|EAU29428.1| conserved [Aspergillus terreus NIH2624]
  misc_feature (8)..(1380): NCBI GI: 67515455 Blast Desc: AN0009.2 [Aspergillus nidulans FGSC A4] gi|40746172|gb|EAA65328.1| conserved [Aspergillus nidulans FGSC A4] gi|259489807|tpe|CBF90391.1| TPA: N-methylhydantoinase FGSC
  misc_feature (8)..(1379): NCBI GI: 255938548 Blast Desc: Pc14g00500 [Penicillium chrysogenum Wisconsin 54-1255] gi|211584665|emb|CAP74191.1| Pc14g00500 [Penicillium chrysogenum Wisconsin 54-1255]
  misc_feature (6)..(1262): SWISSPROT Homolog: EC 3.5.2.9 5-oxoprolinase (ATP-hydrolyzing)
MGDHFGEYRLGVDVGGTFTDVCVITPGGETVRAKTPSTPQNQSIGVKNGIDKVRKILEAQYGWNGDFAYIHHGSTVATNAILESKGAKSGLVVSAGFKEVLANQRSQIPGGLGGWINYVPPEPVVPLERTVQCPGRILPNGEVVIPLDEKTLRHNLLDLKRQTPEAITISLLNSYVNDEHERAVEKIVREEFGPDIEIICSADVLPEAGEYERTVTAATNAVVKPIVKQYMASLEKDLLTDSKTIRILKSDGGLTSLGLAGERPVNLLMSGPAGGVQGVVDGISKQTSYRNLITLDMGGTSTDVALIVDGRAALRRETVVYQLTVLAPSIDVRTVGAGGGSIAKFVDLTASMRVGPESAGAMPGPACYQKGGKQATVTDANLTLGYLPEKLLGGDFDIDVAAAVAAVKSIADQMNVGVEETAEGIINLVNETMYGALRQVSVEQGHDPREFALVAFGGCGPIHANALGRLLGSWPVIIPPAPGVLCAQGDATTKLSHSQSISYIKSLSHIESDSFDEMLHKLKAECVSKMDEALQESSNKQLEIVYEVDVRYKGQALNTTVQFSPEELGQGKDILAKLLSERFTEIHKLQFGFSLDGLEFEIVRLGVTATDVSSPIRLAEIETDAKGQGIDVPESAILTRKPITVDGHQVESKFLDRGKLTKAGYRINGPAVISEMDSNTLILPGFFGEIDQFGNILIRPIDETVSTKTTSYTLETAATEIAKSPLIPTLVGSALQAVRIEMDTLVLRCSMSPGIREQQDEFNVVTNERGQMLVGQFGSFIGEFLEGWKQTGGTIDEGDIFITNDPYSTSGAISHLNDVIVLLPIYYNHKIVGWSANFGHLSDVGGKVPGSMSISSNTLFEDGVQIPIVKLYKAGEYNSDIMEILCRNSRMPDWYRSDIAALVSSCKTAGARVCELIDRFGLELYQASCDELLRRNQLAVSKLIDTQFGDETAEFTDFVDDDGAGNGPWAVKCKMTKVKGSKLRFDFDGTSAQSNTAVNFFLSATMFKMFVGYVKKDVHGDLSELMIYSYYLLAVFDPQCVVNEGLYDFIEVAIPSGSILKPTRPAALSCRTHLLGRVLDMIQALMGQHNKAFRSAAGFSDSPHFFFSGWKPNGEWFQLYQIIFGGVPARPIGDGPDMHCLFPAIKSVPVEIAELSFPILVEVNESLADTGGAGFYRGGNAHRMRFRFLNRGEISIHDDRWFTHPWGIDGGQPGKRSKKILYRYSKDPQKPPVEYLPSKCDYVRIEPEDVLEYITWGGGGLGDPLTRPPEKVALEVHRKLVSVEGAANNYGVVVDPTTFEVLVSETEALRNQISTTRVEYPSIYNRGGTLDDLRARSIEETGLPAPKAQWLEDPYGAHTQVPYVKRWYQERRAEGDWVLQ

SEQ ID NO: 8971 - DNA, 4143 bp, Muscodor strobelii
  misc_feature: SGI EST ID NO. CUFF.21429.0
  misc_feature: Variant of the nucleotide sequence at SEQ ID NO 8969
ccgggttcaaagaagttcttgcgaatcaacgatcccagatcccaggcggtcttggaggctggatcaactacgtccctccagagcccgtcgtaccccttgaaagaactgtgcaatgtcccgggcgtatcctacctaacggcgaagtcgtcattcccctggatgagaagactcttcgacataatctgttggatttaaaacgccaaactcctgaggctattacaatcagtttactgaactcatatgtcaatgatgaacacgagcgtgcagtagaaaaaattgtacgagaagagtttggtcccgatatcgagataatatgctcagctgatgttttgcctgaagccggggaatacgagcggacggtgacggcggcaacaaatgccgttgtaaaacccatcgtcaaacagtatatggcctccttggagaaagatcttctaactgacagcaagacgattcgcatcctgaaatctgatggtggactcacgagtcttggtcttgctggcgagaggcctgtgaacctcctcatgtctgggcccgctggaggggtgcaaggggtcgtcgacggaatctcgaagcaaacttcttaccgaaacttaataactctcgatatgggcgggacaagcacagacgttgcgttgatagtagacggcagggcagccctcagacgagaaactgttgtataccagttgacagtgctcgctcccagcatagatgtgcggactgtgggagcaggaggtggttcaattgccaaattcgttgacctcactgccagcatgagagtaggcccagagagcgctggggcaatgccaggtccagcctgttaccaaaaaggcggaaaacaggcaacagtcacggacgcgaatctgacactcggatatctgcccgagaagcttctaggtggcgatttcgacattgatgttgccgctgcagttgctgcagttaagagcatcgcggatcaaatgaacgttggtgtcgaagagacggctgagggcattataaatcttgtcaacgaaacaatgtacggcgctttgagacaggtatctgttgagcaaggtcatgatccaagagagttcgcgctggttgcctttggtggctgtggcccaatccatgccaatgcgcttggaaggcttctcggatcatggcccgttatcattcctccagctccaggcgtcttgtgcgcacaaggagatgctacgacaaagcttagccactctcagtccatctcatacatcaaatctctgtctcacattgagtcggacagctttgacgagatgcttcacaaactcaaagcagaatgcgttagtaagatggacgaagcgctgcaagaatcgtcaaataagcaattagagatcgtctacgaggttgatgtacgatataaggggcaagcactaaatacaacggttcaatttagtccagaggaacttggtcaggggaaggatatattggcgaaattattatcggaaaggttcaccgagattcacaaactccaattcggcttctcgctagacggcctcgaatttgaaattgtgagactcggagttactgcgacagacgtatcgtcaccaattcgtctagctgaaattgagaccgacgcaaagggtcaaggtattgatgtacccgagtctgcaatattaaccagaaaacctatcacagttgatggtcaccaagtcgaatcaaagttcctagaccgaggaaaactcacaaaggcaggctaccgcatcaatggaccagccgtcatatctgaaatggactctaatacactgattctacctggtttcttcggtgaaatagatcaatttggcaacatcctcattcgtccaatcgacgagacggtatctacgaagacgacatcctatactctggagactgcagccactgagatagccaaatctcctcttatcccaactctggttgggtctgctcttcaagctgtacgaatcgaaatggatacattagttcttcgatgctcgatgtcccctggaattcgcgaacaacaggacgagttcaatgttgtcactaatgaaagaggtcagatgcttgttgggcagttcgggagcttcataggggagttcctagaaggctggaaacagacaggcggcacgattgacgaaggtgatattttcataactaacgacccatactctacttcaggagccatcagtcatctaaacgatgtcattgttctcctgccaatctactacaatcacaaaatagtgggttggtctgcgaatttcggacatctgagtgatgtaggagggaaagtacctggaagtatgtcaatctcgtcgaatactctatttgaagacggcgttcaaattcctatcgtcaaactctacaaagcgggcgagtataactcagacatcatggagatactgtgccgcaattctcgcatgccagactggtaccgtagcgatattgcagcacttgtatcatcatgtaagaccgccggcgcccgagtttgtgagctaattgaccgatttgggttggaattatatcaagcgtcttgtgacgaactactcagaagaaaccagctggctgtttcgaaactgatcgacactcagttcggtgacgaaacagcggaattcaccgatttcgtcgacgacgatggagctggtaatggcccatgggccgtgaaatgcaagatgacaaaggtcaaaggtagcaaacttcgtttcgattttgatgggacaagcgcacagagtaatactgctgtcaatttcttcctgtccgctactatgttcaagatgtttgtcgggtatgtcaagaaagatgtccatggtgatctgagcgagctaatgatttacagctactacttacttgccgtcttcgatcctcaatgtgtagtcaatgagggtctttacgatttcatagaggtcgctatcccttctggctcgatcttgaaaccaacaagacctgcggccttaagctgcagaacacatcttctcgggcgggtattagatatgatccaggcgttgatgggccaacacaacaaagccttccgttctgcagcgggattctcggattcgcctcactttttcttttctggctggaagcccaacggggaatggttccaactctatcagatcatcttcggaggagttccagctcgtcctattggagacggacctgacatgcactgcttatttccggcgatcaaaagtgtaccagtagaaatcgccgaactttctttcccaatcctagtcgaagtcaacgaatctctagcggataccggaggcgctggcttttaccgcggtggtaacgcacacagaatgcgattccggttcctcaatcgcggcgagatctcaattcacgatgatcgatggttcactcacccatggggcatcgatggcgggcaacctggcaagcgttcgaaaaaaatactgtatcgatactctaaagatccccaaaagcctccggtagagtacctaccgagtaaatgcgattatgttagaattgagccggaagatgtcttggagtacatcacatggggcggaggaggattgggagatcccctcactcgacctcccgagaaagtcgcacttgaagttcaccgcaaacttgtttcggtcgaaggcgctgcaaataactatggcgtcgtcgtcgatcctacgacgttcgaagttctagtgtcagagaccgaggccttaaggaatcagataagcacaacacgtgtggaatatccaagtatctacaatcggggcggaactctagacgatctcagagctcgttctatagaagagacgggcctacctgcgccgaaagcacaatggttggaagatccttatggagcacatactcaggttccgtatgtcaaaaggtggtatcaagaaagaagagcggaaggtgactgggttctacaatagaacacgttctagaggatagattctcgcgagatccacgacttatgcaacattcgacgttaaactgctttgcctcgaaatttcccgaatgtatcgccttggaactcttctcaccactactaatatgcagccactggttgactcaacactcaggagtatgacatacgagactcgttaaagatgtcacactatacatatcatacctcgtcagctgtgcaatcatacatacccttcataacgatcgcatattcaacctagtggactcctctgcctctgtgactaaatg

SEQ ID NO: 8972 - DNA, 3018 bp, Muscodor strobelii
  misc_feature: SGI cDNA ID NO. 562786
  misc_feature: Encodes the peptide sequence at SEQ ID NO 8973
atgtcagctccaaactcgaagacgcttcgcataggcgttgatgtcggcggcaccaacacagatggcgtgatcctcgatccatcgcgagctggagagccagacaaaggtattattgcttggcataaagccccaacaactacaaatccgagtgtgggcatcagcgatgcaatcacgaccatgtttaaaagctccggtctcgatccgcgccggatagcgagtgtcacgattggaacaacgcatttcgttaatgctgtcgttgaacgcgatccagcacgactgtcgaaagttgctgtgattagattatgcggtccattctcaaagcacgtccctccatgtgttgattggccagacgagatgagggacctcattttaggccattacgctttggtaaaaggcggtcttgaagttgacggaagtttgatatcagatatcgatggaaaacaaatcaaggatgagtgtgcgaaattacaggcgaagggcattaggagcatcgtcgtaaacggcgtgttcagcccgatcgacacagtggagcgtcaggaagaacgggcagctgagatcatccgaggcgaaatgcccggatgcgatgtcgtttgctccaaggaggtcgccaatctgggctttctcgaacgtgagaatgctgcaatattgaatgcttcgattctcgcctttgcgcgaaagacattgcgatctttccaagaaccggtcagacgcttaggtctacaatgccctgtgttcatcacgcaaaacgacggtaccattctctcgggcgaattggcgtcaaagttacctatacgtactttctccagtggtcctactaatagcatgcggggtgccgcgttcatcacaggaagtgatctcgtcgaggatgtgatggttgtcgatattggaggtacaactactgacgtcggactgctgcttgctagcggcttcccaagacagcaggcagcctatagccatttagctggggttcgcatgaatttctcttatccagacattagaagcatcggcctgggtggcggttccattgtccgagtaggagataaactcacagttggtcctgatagtgtaggctacaggatcacaaaggattctctggtattcggtggccagaccttaaccgcaactgattgtacggtgctgtccagagcggacatcgatattggtgatcgcaagttggtcaaggatgcgttaagtaacgagaacatgtctctattcaaagacgcagtaaaacagaagttggagtttgtcatcgatcagatgaagacttctcctgaggatattccggttcttcttgttggaggcggagctattattgcgcctgatgaactgaaaggagcaagccgagttcttaagccgaagtgggctggagttgcaaatgcaatcggcgctgcaactgcgagagtgagcgcagtaatcgacacagtcaaaactactaacgcgaagactgctcaagaattgcttgatgaggtttgcgatgatgctatttcaagcgcagtaagagccggggcaataaaatccaccgtaaagattgtcgaaaaagactctttacctcttccttatatttcaaacaagacccggttcaccgttcgtgccgctggagactttgattacatgcaagcaatagtcacagtggctccgtcggtcgatgtagccgctcccgaaggagaagaagaaatgaacgaatacgaaagaaccgcaggcattcccagcgagaagtcgaaggctgatgttaggtcggcgcaagaggaagttgattttgatagctatataccgaagatccgaaatcgggtctggtatatcaacgaaactgatctggaatggatagctaccggttgctacatattaggaactggtggaggcggtagtccatattccgccaaaatccgtctacgcgaggcgctgcgtagaggcgccatagtccgcgtggtaagtcccgcggacctagcagatgacgccgcaattggctgcggtggtggtgctggatcacctaccgtcggcatcgagaaactcgcaggtgatgaaatggtccaagctcaggaggcactgtataaagtatgcggacaaaaaccgactcacatgatatcgatcgagattggaggaagtaatgggctacagagcttgattcttggagctagttccagcatgaatgtcccggcagtggatggagattggatgggaagagcttacccgactaagtggcaaaccacacctgttgttttcggtgagcgatctcctatatttgcgcctgttgctatggccgatggaaaggggaacacagttgtgatgccaggggcagcaactgatttcgacgtcgagcgcatttgtcgagccgccctcagtgaaatgggttcgagcgttggtacagccgacgcacctgtgaccggtgctgaatgtagacgatgggttgtggagaatacaatctcacaatcatggcgcatagggagagcagtggccaaagcacgtcaagaaaacgggttgagtcaagttgcagaaacaattcttaatgagtgtggtggggccgatgcaggtaaagtgttatggaaaggaaaagtcgtaggtgtcgagcggacgttgaggtcgggatacgtctacggtgagctgatcattgaaggcaccgacctagcctccgaggatggggtttcatcgacaggatcgaaatctgccttcaagggtctcctcaaaatcccgttcaagaatgagaacattgcggccatcaaattctcaaggacgatggtggacggcaagtctcgagaccacgatgaggaagttgttggtatcgcacccgacctcatcaccgttattgatgctcaggatggtgaagctataggcacaccagagtaccgttatggattgcttgtcatcgtactgggaattgccgctagtgatcgatggacatcgcctagggggatagagattggtggaccaaatagttttggcatggaacacttgacctaccaaccattgggcaagttcgtcaaaccgagaagtgtcatcgacgagtttgatagatccggctag

SEQ ID NO: 8973 - protein, 1005 aa, Muscodor strobelii
  misc_feature: SGI Peptide ID NO. 562786
  misc_feature (598)..(989): Pfam Id: PF06032 Pfam Desc: Domain of function (DUF917)
  misc_feature (10)..(191): Pfam Id: PF05378 Pfam Desc: Hydantoinase/oxoprolinase N-terminal region
  misc_feature (210)..(472): Pfam Id: PF01968 Pfam Desc: Hydantoinase/oxoprolinase
  misc_feature (11)..(79): Pfam Id: PF01869 Pfam Desc: BadF/BadG/BcrA/BcrD ATPase family
  misc_feature (749)..(989): Pfam Id: PF06032 Pfam Desc: Domain of function (DUF917)
  misc_feature (598)..(730): Pfam Id: PF06032 Pfam Desc: Domain of function (DUF917)
  misc_feature (1)..(1002): NCBI GI: 46125239 Blast Desc: FG06997.1 [Gibberella zeae PH-1]
  misc_feature (7)..(1004): NCBI GI: 256732585 Blast Desc: [Nectria haematococca mpVI 77-13-4]
  misc_feature (7)..(1005): NCBI GI: 171695696 Blast Desc: protein product [Podospora anserina] gi|170948090|emb|CAP60254.1| protein product [Podospora anserina]
  misc_feature (6)..(988): NCBI GI: 189203471 Blast Desc: hydantoinase [Pyrenophora tritici-repentis Pt-1C-BFP] gi|187985170|gb|EDU50658.1| hydantoinase [Pyrenophora tritici-repentis Pt-1C-BFP]
  misc_feature (60)..(1002): NCBI GI: 169602817 Blast Desc: SNOG_04412 [Phaeosphaeria nodorum SN15] gi|160706264|gb|EAT88172.2| SNOG_04412 [Phaeosphaeria nodorum SN15]
  misc_feature (7)..(1001): NCBI GI: 240111707 Blast Desc: Hydantoinase/oxoprolinase, [Coccidioides posadasii C735 delta SOWgp]
  misc_feature (10)..(1001): NCBI GI: 238840542 Blast Desc: hydantoinase [Microsporum canis CBS 113480]
  misc_feature (10)..(1001): NCBI GI: 258569150 Blast Desc: [Uncinocarpus reesii 1704] gi|237906765|gb|EEP81166.1| [Uncinocarpus reesii 1704]
  misc_feature (7)..(1001): NCBI GI: 119172911 Blast Desc: CIMG_10019 [Coccidioides immitis RS]
  misc_feature (7)..(1001): NCBI GI: 238497301 Blast Desc: conserved [Aspergillus flavus NRRL3357] gi|220694766|gb|EED51110.1| conserved [Aspergillus flavus NRRL3357]
MSAPNSKTLRIGVDVGGTNTDGVILDPSRAGEPDKGIIAWHKAPTTTNPSVGISDAITTMFKSSGLDPRRIASVTIGTTHFVNAVVERDPARLSKVAVIRLCGPFSKHVPPCVDWPDEMRDLILGHYALVKGGLEVDGSLISDIDGKQIKDECAKLQAKGIRSIVVNGVFSPIDTVERQEERAAEIIRGEMPGCDVVCSKEVANLGFLERENAAILNASILAFARKTLRSFQEPVRRLGLQCPVFITQNDGTILSGELASKLPIRTFSSGPTNSMRGAAFITGSDLVEDVMVVDIGGTTTDVGLLLASGFPRQQAAYSHLAGVRMNFSYPDIRSIGLGGGSIVRVGDKLTVGPDSVGYRITKDSLVFGGQTLTATDCTVLSRADIDIGDRKLVKDALSNENMSLFKDAVKQKLEFVIDQMKTSPEDIPVLLVGGGAIIAPDELKGASRVLKPKWAGVANAIGAATARVSAVIDTVKTTNAKTAQELLDEVCDDAISSAVRAGAIKSTVKIVEKDSLPLPYISNKTRFTVRAAGDFDYMQAIVTVAPSVDVAAPEGEEEMNEYERTAGIPSEKSKADVRSAQEEVDFDSYIPKIRNRVWYINETDLEWIATGCYILGTGGGGSPYSAKIRLREALRRGAIVRVVSPADLADDAAIGCGGGAGSPTVGIEKLAGDEMVQAQEALYKVCGQKPTHMISIEIGGSNGLQSLILGASSSMNVPAVDGDWMGRAYPTKWQTTPVVFGERSPIFAPVAMADGKGNTVVMPGAATDFDVERICRAALSEMGSSVGTADAPVTGAECRRWVVENTISQSWRIGRAVAKARQENGLSQVAETILNECGGADAGKVLWKGKVVGVERTLRSGYVYGELIIEGTDLASEDGVSSTGSKSAFKGLLKIPFKNENIAAIKFSRTMVDGKSRDHDEEVVGIAPDLITVIDAQDGEAIGTPEYRYGLLVIVLGIAASDRWTSPRGIEIGGPNSFGMEHLTYQPLGKFVKPRSVIDEFDRSG

SEQ ID NO: 8974 - DNA, 326 bp, Muscodor strobelii
  misc_feature: SGI EST ID NO. CUFF.21446.0
  misc_feature: Variant of the nucleotide sequence at SEQ ID NO 8972
ccgagttcttaagccgaagtgggctggagttgcaaatgcaatcggcgctgcaactgcgagagtgagcgcagtaatcgacacagtcaaaactactaacgcgaagactgctcaagaattgcttgatgaggtttgcgatgatgctatttcaagcgcagtaagagccggggcaataaaatccaccgtaaagattgtcgaaaaagactctttacctcttccttatatttcaaacaagacccggttcaccgttcgtgccgctggagactttgattacatgcaagcaatagtcacagtggctccgtcggtcgatgtagccgctcccgaaggag

SEQ ID NO: 8975 - DNA, 1398 bp, Muscodor strobelii
  misc_feature: SGI cDNA ID NO. 562787
  misc_feature: Elevated expression when VOC is produced
  misc_feature: Encodes the peptide sequence at SEQ ID NO 8976
atggctgtaatcgcgcggctcatttctcaaagcaagccatacctagtgcctgggaaacttctggttaaggagttctggtttcaggtgccgctcgatcactccaagcccgatggagagactgtcaagttattcgccagaagtgcgatcaagtatgagaagccaatcattgaacccgagaaggttgtccaacgcccctatctgctctttctgcaaggcggaccaggtcacggaaccccagcgcctcaagatagtccgctttccaagcagatgcttgaaagagggtatgagcttcttcttctagatcagcgcggaacaggcttctccagccccatctcggcacataccttaaaacgagtcggtggacctcaggaacaagcagactatctgaagctattcagagccgatactttggtcaaagatagtgaagctgttcgactgtgtctgaccaaggatcttccggaaaataagaagaaatggaccacgttcggccagtctttcggtggcatgacgacgttgacatacctttcgtttgcgcctgagggacttcgcgaatgtttcatcaccggtggactcgcatccttggacaagggccctgaacaggtctattcggcaacttatcaacgatgtatggagcgaaacagagcatactacgacaaattcccccaggacgtgaccacggtgaaagagattgctgagaagatccgcgagctaggaggcgagaaaggtattccgctccccgctgggggtttccttaccgtgcagcggcttctcactctcggcctacatttaggaatggatggcggcatcgacacagttcacagtatgatcatcagaatgaaagcagattttgatcagttcggtgaactttcttatcccacccttaacgaactggagcaagatggcggctgggattctgcccccatctacactctgctccacgaaccttgttggtgttttggccctggagtcgccggcaactgggcagcgaagcgtgtgggcaccgacttgaaagagtattcatggcttcgagacgattggactggcacagcaagtctcggtgatcagcctctcttcttctctggcgaaatgatatacccctttcattttgaaacttgcgccgagcttatcaagatgaaagaaacagcgaatattctagcacgctacgaccagtggcctgcgctgtacgatatcgagcagcttggtaagaacacggtcccagtctacgcagcaagttacaatgacatgtatgtagatgctggactggcacgtgtaacggcctctcgagtcaagggtcttaagctcttcgagacgaacgtgatgttccatagcgcgttgcggaagagaactgacgatgtattacgagagttgttagcgctgagggacgatacaattgactag

SEQ ID NO: 8976 - protein, 465 aa, Muscodor strobelii
  misc_feature: SGI Peptide ID NO. 562787
  misc_feature (95)..(458): Pfam Id: PF00561 Pfam Desc: alpha/beta hydrolase fold
  misc_feature (95)..(180): Pfam Id: PF00561 Pfam Desc: alpha/beta hydrolase fold
  misc_feature (5)..(465): NCBI GI: 261356204 Blast Desc: proline iminopeptidase [Verticillium albo-atrum VaMs.102]
  misc_feature (5)..(465): NCBI GI: 85090437 Blast Desc: NCU07415 [Neurospora crassa OR74A] gi|28919777|gb|EAA29180.1| NCU07415 [Neurospora crassa OR74A]
  misc_feature (1)..(465): NCBI GI: 46124917 Blast Desc: FG06836.1 [Gibberella zeae PH-1]
  misc_feature (5)..(465): NCBI GI: 256733099 Blast Desc: NECHADRAFT_92718 [Nectria haematococca mpVI 77-13-4]
  misc_feature (2)..(465): NCBI GI: 145603135 Blast Desc: MGG_04416 [Magnaporthe grisea 70-15] gi|145011442|gb|EDJ96098.1| MGG_04416 [Magnaporthe grisea 70-15]
  misc_feature (1)..(465): NCBI GI: 116180680 Blast Desc: CHGG_00968 [Chaetomium globosum CBS 148.51] gi|88185265|gb|EAQ92733.1| CHGG_00968 [Chaetomium globosum CBS 148.51]
  misc_feature (1)..(465): NCBI GI: 189194377 Blast Desc: proline iminopeptidase [Pyrenophora tritici-repentis Pt-1C-BFP] gi|187979091|gb|EDU45717.1| proline iminopeptidase [Pyrenophora tritici-repentis Pt-1C-BFP]
  misc_feature (29)..(406): NCBI GI: 242800608 Blast Desc: proline iminopeptidase, [Talaromyces stipitatus ATCC 10500] gi|218716968|gb|EED16389.1| proline iminopeptidase, [Talaromyces stipitatus ATCC 10500]
  misc_feature (1)..(465): NCBI GI: 169624995 Blast Desc: SNOG_15764 [Phaeosphaeria nodorum SN15] gi|111055739|gb|EAT76859.1| SNOG_15764 [Phaeosphaeria nodorum SN15]
  misc_feature (4)..(465): NCBI GI: 225563193 Blast Desc: prolyl peptidase [Ajellomyces capsulatus G186AR]
  misc_feature (26)..(463): SWISSPROT Homolog: EC 3.4.11.5 Prolyl aminopeptidase
  misc_feature: Useful for introducing or modulating the production of volatile compounds
MAVIARLISQSKPYLVPGKLLVKEFWFQVPLDHSKPDGETVKLFARSAIKYEKPIIEPEKVVQRPYLLFLQGGPGHGTPAPQDSPLSKQMLERGYELLLLDQRGTGFSSPISAHTLKRVGGPQEQADYLKLFRADTLVKDSEAVRLCLTKDLPENKKKWTTFGQSFGGMTTLTYLSFAPEGLRECFITGGLASLDKGPEQVYSATYQRCMERNRAYYDKFPQDVTTVKEIAEKIRELGGEKGIPLPAGGFLTVQRLLTLGLHLGMDGGIDTVHSMIIRMKADFDQFGELSYPTLNELEQDGGWDSAPIYTLLHEPCWCFGPGVAGNWAAKRVGTDLKEYSWLRDDWTGTASLGDQPLFFSGEMIYPFHFETCAELIKMKETANILARYDQWPALYDIEQLGKNTVPVYAASYNDMYVDAGLARVTASRVKGLKLFETNVMFHSALRKRTDDVLRELLALRDDTID

SEQ ID NO: 8977 - DNA, 1541 bp, Muscodor strobelii
  misc_feature: SGI EST ID NO. CUFF.21456.0
  misc_feature: Variant of the nucleotide sequence at SEQ ID NO 8975
aaactgataactcttttcacagcgtcatcaaacgttggcaagatagactcagcagctgacagaatcgattcaacaatggctgtaatcgcgcggctcatttctcaaagcaagccatacctagtgcctgggaaacttctggttaaggagttctggtttcaggtgccgctcgatcactccaagcccgatggagagactgtcaagttattcgccagaagtgcgatcaagtatgagaagccaatcattgaacccgagaaggttgtccaacgcccctatctgctctttctgcaaggcggaccaggtcacggaaccccagcgcctcaagatagtccgctttccaagcagatgcttgaaagagggtatgagcttcttcttctagatcagcgcggaacaggcttctccagccccatctcggcacataccttaaaacgagtcggtggacctcaggaacaagcagactatctgaagctattcagagccgatactttggtcaaagatagtgaagctgttcgactgtgtctgaccaaggatcttccggaaaataagaagaaatggaccacgttcggccagtctttcggtggcatgacgacgttgacatacctttcgtttgcgcctgagggacttcgcgaatgtttcatcaccggtggactcgcatccttggacaagggccctgaacaggtctattcggcaacttatcaacgatgtatggagcgaaacagagcatactacgacaaattcccccaggacgtgaccacggtgaaagagattgctgagaagatccgcgagctaggaggcgagaaaggtattccgctccccgctgggggtttccttaccgtgcagcggcttctcactctcggcctacatttaggaatggatggcggcatcgacacagttcacagtatgatcatcagaatgaaagcagattttgatcagttcggtgaactttcttatcccacccttaacgaactggagcaagatggcggctgggattctgcccccatctacactctgctccacgaaccttgttggtgttttggccctggagtcgccggcaactgggcagcgaagcgtgtgggcaccgacttgaaagagtattcatggcttcgagacgattggactggcacagcaagtctcggtgatcagcctctcttcttctctggcgaaatgatatacccctttcattttgaaacttgcgccgagcttatcaagatgaaagaaacagcgaatattctagcacgctacgaccagtggcctgcgctgtacgatatcgagcagcttggtaagaacacggtcccagtctacgcagcaagttacaatgacatgtatgtagatgctggactggcacgtgtaacggcctctcgagtcaagggtcttaagctcttcgagacgaacgtgatgttccatagcgcgttgcggaagagaactgacgatgtattacgagagttgttagcgctgagggacgatacaattgactagatccgatagaaacttagtcaatttcagcacttgatatctcgtgacagagagccatatatccccttcgc

SEQ ID NO: 8978 - DNA, 1440 bp, Muscodor strobelii
  misc_feature: SGI cDNA ID NO. 562788
  misc_feature: Encodes the peptide sequence at SEQ ID NO 8979
atgaacacccagcttctcactcagacgttggtcgagtccttcaacgctctcgccgatgaggtgcagaatctgagcgacaggcagaccatcttggagcacaagctgaggtatgcacatgaacagttccagtacttggctgacaggtatgccactgctgcgcctgaggtggcagacactctggtgaatctgcaggttccgcccgagctacacagtccttccttagcaaatacaaattttgttcctctacccaaccgcaagccctctaattctaaacatcaaatcgccgtgatcatccgcgaaggcagacgcgtcgcttcgtccctaaccgacttcagcaagagcagccgatctagtaggagcaaagacagtgttgaccctactaccatgaccaccatgtctaccatactcgagcaggacttcactgtcgagggcaagaagggttctcttgagtgtcccttctccccgcataacgagcaggcatcgcagaatgctggacaggaccagcaagccgcaacatcgcatgctggtgatccactatgcgcggccatgtatgaagacactagctctcaaccggctgctacaaagtgccccattcgctacctcgaccagcactctccggaggagattgcgaactacctcgagaagcacaagcatgagctaccaagaagccacgaggtctgtgtgcgacgataccagaaaaacgaagcccacataagaaagttggatgcgaagtacggaaacttggttagcatggttgagggtcttacgaagatccatcagccaatgctccccgaacaagatacccgaccgcagagcgaggtcgagcacggttcaaacaaccgagtgcaggattgggcacacaccgtcagcgctactgtcgcagacgatccagaagatgctgcttcgaatcacgaccaggaagaggagaggcagagtcactttgatcgtgatcgtcctctgaaagaaatccgcgtaggagaatcgccttccaggccgtggggtatatctgttcccgtagagttcattgatgcgcacagttccggtaacaaccagggacgacccgaatcccctccgcctgctcctgtccagatgccatcgccgatacccgagaccgagactcctgtgaagaagactggaaagtgcccatttgaccacacgaagatggcttcgttcgtggaaaacgactcgccccctattaaccggagagagaaggaagaagtagcggaaatgtcagatgttccgccagcccatcaatccttcacgccggcacaagcttctacagcgcgccacgcacaacctgccttcttgagcaccgagcaatttgctagctcgaagcaaagcagcacaccgcagatggttttcactggccccgtcttcatcgggtaccctatcgagcaagccattcaatttatgcagcattttcagccacaacagcaatag

SEQ ID NO: 8979 - protein, 479 aa, Muscodor strobelii
  misc_feature: SGI Peptide ID NO. 562788
  misc_feature (6)..(478): NCBI GI: 256732658 Blast Desc: NECHADRAFT_79066 [Nectria haematococca mpVI 77-13-4]
  misc_feature (1)..(478): NCBI GI: 261356205 Blast Desc: conserved [Verticillium albo-atrum VaMs.102]
  misc_feature (6)..(478): NCBI GI: 46124919 Blast Desc: FG06837.1 [Gibberella zeae PH-1]
  misc_feature (9)..(475): NCBI GI: 85090439 Blast Desc: NCU07416 [Neurospora crassa OR74A] gi|28919778|gb|EAA29181.1| [Neurospora crassa OR74A]
  misc_feature (2)..(475): NCBI GI: 116180678 Blast Desc: CHGG_00967 [Chaetomium globosum CBS 148.51] gi|88185264|gb|EAQ92732.1| CHGG_00967 [Chaetomium globosum CBS 148.51]
  misc_feature (1)..(479): NCBI GI: 154323584 Blast Desc: BC1G_00191 [Botryotinia fuckeliana B05.10] gi|150842420|gb|EDN17613.1| BC1G_00191 [Botryotinia fuckeliana B05.10]
  misc_feature (32)..(475): NCBI GI: 145603131 Blast Desc: MGG_04418 [Magnaporthe grisea 70-15] gi|145011440|gb|EDJ96096.1| MGG_04418 [Magnaporthe grisea 70-15]
  misc_feature (1)..(465): NCBI GI: 171687525 Blast Desc: protein product [Podospora anserina] gi|170943724|emb|CAP69376.1| protein product [Podospora anserina]
  misc_feature (16)..(477): NCBI GI: 156056983 Blast Desc: SS1G_04222 [Sclerotinia sclerotiorum 1980] gi|154702008|gb|EDO01747.1| SS1G_04222 [Sclerotinia sclerotiorum 1980]
  misc_feature (2)..(473): NCBI GI: 189193275 Blast Desc: conserved [Pyrenophora tritici-repentis Pt-1C-BFP] gi|187978540|gb|EDU45166.1| conserved [Pyrenophora tritici-repentis Pt-1C-BFP]
MNTQLLTQTLVESFNALADEVQNLSDRQTILEHKLRYAHEQFQYLADRYATAAPEVADTLVNLQVPPELHSPSLANTNFVPLPNRKPSNSKHQIAVIIREGRRVASSLTDFSKSSRSSRSKDSVDPTTMTTMSTILEQDFTVEGKKGSLECPFSPHNEQASQNAGQDQQAATSHAGDPLCAAMYEDTSSQPAATKCPIRYLDQHSPEEIANYLEKHKHELPRSHEVCVRRYQKNEAHIRKLDAKYGNLVSMVEGLTKIHQPMLPEQDTRPQSEVEHGSNNRVQDWAHTVSATVADDPEDAASNHDQEEERQSHFDRDRPLKEIRVGESPSRPWGISVPVEFIDAHSSGNNQGRPESPPPAPVQMPSPIPETETPVKKTGKCPFDHTKMASFVENDSPPINRREKEEVAEMSDVPPAHQSFTPAQASTARHAQPAFLSTEQFASSKQSSTPQMVFTGPVFIGYPIEQAIQFMQHFQPQQQ

SEQ ID NO: 8980 - DNA, 3750 bp, Muscodor strobelii
  misc_feature: SGI EST ID NO. CUFF.21574.0
  misc_feature: Variant of the nucleotide sequence at SEQ ID NO 8978
tcagagtccacttgctagcgggttgcccattcttcttcacatttctcattactctcccgcttcttccctctccatctcctcatccataccatccagttcattccgtagaatcttcatgaggacgtagattttagagcgcagggagcagcaggcatgaacacccagcttctcactcagacgttggtcgagtccttcaacgctctcgccgatgaggtgcagaatctgagcgacaggcagaccatcttggagcacaagctgaggtatgcacatgaacagttccagtacttggctgacaggtatgccactgctgcgcctgaggtggcagacactctggtgaatctgcaggttccgcccgagctacacagtccttccttagcaaatacaaattttgttcctctacccaaccgcaagccctctaattctaaacatcaaatcgccgtgatcatccgcgaaggcagacgcgtcgcttcgtccctaaccgacttcagcaagagcagccgatctagtaggagcaaagacagtgttgaccctactaccatgaccaccatgtctaccatactcgagcaggacttcactgtcgagggcaagaagggttctcttgagtgtcccttctccccgcataacgagcaggcatcgcagaatgctggacaggaccagcaagccgcaacatcgcatgctggtgatccactatgcgcggccatgtatgaagacactagctctcaaccggctgctacaaagtgccccattcgctacctcgaccagcactctccggaggagattgcgaactacctcgagaagcacaagcatgagctaccaagaagccacgaggtctgtgtgcgacgataccagaaaaacgaagcccacataagaaagttggatgcgaagtacggaaacttggttagcatggttgagggtcttacgaagatccatcagccaatgctccccgaacaagatacccgaccgcagagcgaggtcgagcacggttcaaacaaccgagtgcaggattgggcacacaccgtcagcgctactgtcgcagacgatccagaagatgctgcttcgaatcacgaccaggaagaggagaggcagagtcactttgatcgtgatcgtcctctgaaagaaatccgcgtaggagaatcgccttccaggccgtggggtatatctgttcccgtagagttcattgatgcgcacagttccggtaacaaccagggacgacccgaatcccctccgcctgctcctgtccagatgccatcgccgatacccgagaccgagactcctgtgaagaagactggaaagtgcccatttgaccacacgaagatggcttcgttcgtggaaaacgactcgccccctattaaccggagagagaaggaagaagtagcggaaatgtcagatgttccgccagcccatcaatccttcacgccggcacaagcttctacagcgcgccacgcacaacctgccttcttgagcaccgagcaatttgctagctcgaagcaaagcagcacaccgcagatggttttcactggccccgtcttcatcgggtaccctatcgagcaagccattcaatttatgcagcattttcagccacaacagcaatagtgacaccgctgaaaactttgaacgtctcgttggatgaacttgttgctttgcaaatcttgtggcttacgttcattctgatatttagcatcgacaagcatggaagggaagcacttgtactgtaatgatttcgaggagcagcattgccggcgcacggttgtatttagattccatcgtgctggagtttggaaagcgtgcgagcaacggaaggggtaaatgaggctttgcactgtttatgatacccttgccgcaaacgaagtatatgacgagacgatgaaagtagcaaaattgtatagtgtttcacatcatttggtcttgattcgagtgagatgccgagatgttgtatttcataccattgtatctacgcccaaaacccagaccgatccaaccaagacgcgatgaacccccctcctgaactagaacgccgtgcaatccatgacccctatcttaccaagtacaaccagctgacccagtaatgaacaccaaaattctaaaaatctattgtcgtaatctactttccaggagaagctgagtccgtgtcgtctccatctctgtacgtatcatgcggaccctctgtcgtatcccaaagtgatatatcatcatcgtccataagagccacggcatcactctcagcatgatcccccaaaatgccctcctcgagatcctcgtagtccgcggggtcaggcagatcaccattagcggcccgctcctcgatagctagctcggcggcacggcgcatagtgcgtcgatatatgaccaagccgacgacgagcccgatgacggcactgagcgctatggaagcgtaatttatgaaacggtctcctgccgacatatcgtcgccgagggtcgcgagacgcgagccgatgaacacgtggacgaggagcttgggcgtcgccatggctgtcgcgagagcgaagcggcctggcgttatgctggggatcgtggcgaggaagccgttgcttagactgtagggtaaggggcagaagcggatggcggtcaggacggggagtccatcgtgtctaaggacttcgccgagagccacgaaccgcctgtctgagccgacgagacggtcgacatacccgctgagtaccgtccgactcgcgatgaaggcaccggtcgacccggctacggtggcagaggctacgataggccagccgccgggaaagccgtacacgaatccggcgatggtaacggtcgtgctgtagcctattaatggcgggaaagctgtgatggagcataggaggaacagtatgacccagccgccgggcaacttccgccaatcctcggccagagggcggagggcggagaatatacggtgggagaagattaggaatagtatgctcaagacgaggaggactatgccggcgactcctgcgaggatctgttgcacgggcgtcatgctgttgcctagtcgtacgagcttgttgaggatggagacgctggactgcatcattctctggccgaacggccggtgatcggagtcgctacctcgcgaatacggggttgagaggcgacgcatgttgtgtagtcgtccgccgctggcggctcgtcctcgccctgcccatggtgggagaggagtgtcggaagggtggtctggcgacgtgggagagggctctggagacgagatggggagggacagcgcttgcgctgtggatgtgtagtcggctggcattgctagaggatcatgtggtgatattcatcgatgtgtgagtatatgtaactcttctggtgttatttcgatatgttgctgtaaagactgcgggacccaaaagttcggaatggacggaagctaggatgccgttgtttgagttacactttgtaagtcgttcgatcttcacgtagccatcgttctatgaagtacaattgatgtagaattgatgctcagacacagaaatcggtatcgccagaagagggtgcttgcaatagtagaggttgtcaaacgaaacgcaaaaccgtagtgcttatgtggtggttagaggattggaggctgagctgtgacgtggatattatccaaacctacttcctctctctcatgtcagctattattctaccaaagacaaatagcaatttatcaaaacataccaaaaggggagaatatcaaagggctaggagaatctctaactatggctcttcgaacatcaatgaacgaggtttcccgac

SEQ ID NO: 8981 - DNA, 1161 bp, Muscodor strobelii
  misc_feature: SGI cDNA ID NO. 562789
  misc_feature: Encodes the peptide sequence at SEQ ID NO 8982
atgccagccgactacacatccacagcgcaagcgctgtccctccccatctcgtctccagagccctctcccacgtcgccagaccacccttccgacactcctctcccaccatgggcagggcgaggacgagccgccagcggcggacgactacacaacatgcgtcgcctctcaaccccgtattcgcgaggtagcgactccgatcaccggccgttcggccagagaatgatgcagtccagcgtctccatcctcaacaagctcgtacgactaggcaacagcatgacgcccgtgcaacagatcctcgcaggagtcgccggcatagtcctcctcgtcttgagcatactattcctaatcttctcccaccgtatattctccgccctccgccctctggccgaggattggcggaagttgcccggcggctgggtcatactgttcctcctatgctccatcacagctttcccgccattaataggctacagcacgaccgttaccatcgccggattcgtgtacggctttcccggcggctggcctatcgtagcctctgccaccgtagccgggtcgaccggtgccttcatcgcgagtcggacggtactcagcgggtatgtcgaccgtctcgtcggctcagacaggcggttcgtggctctcggcgaagtccttagacacgatggactccccgtcctgaccgccatccgcttctgccccttaccctacagtctaagcaacggcttcctcgccacgatccccagcataacgccaggccgcttcgctctcgcgacagccatggcgacgcccaagctcctcgtccacgtgttcatcggctcgcgtctcgcgaccctcggcgacgatatgtcggcaggagaccgtttcataaattacgcttccatagcgctcagtgccgtcatcgggctcgtcgtcggcttggtcatatatcgacgcactatgcgccgtgccgccgagctagctatcgaggagcgggccgctaatggtgatctgcctgaccccgcggactacgaggatctcgaggagggcattttgggggatcatgctgagagtgatgccgtggctcttatggacgatgatgatatatcactttgggatacgacagagggtccgcatgatacgtacagagatggagacgacacggactcagcttctcctggaaagtag

SEQ ID NO: 8982 - protein, 386 aa, Muscodor strobelii
  misc_feature: SGI Peptide ID NO. 562789
  misc_feature (151)..(273): Pfam Id: PF09335 Pfam Desc: SNARE associated Golgi protein
  misc_feature (1)..(370): NCBI GI: 46124921 Blast Desc: FG06838.1 [Gibberella zeae PH-1]
  misc_feature (1)..(382): NCBI GI: 154323582 Blast Desc: BC1G_00190 [Botryotinia fuckeliana B05.10] gi|193806540|sp|A6RIB9.1|TVP38_BOTFB RecName: Full=Golgi apparatus membrane protein tvp38 gi|150842419|gb|EDN17612.1|
  misc_feature (1)..(383): NCBI GI: 156056981 Blast Desc: SS1G_04221 [Sclerotinia sclerotiorum 1980] gi|193806545|sp|A7EFY0.1|TVP38_SCLS1 RecName: Full=Golgi apparatus membrane protein tvp38 gi|154702007|gb|EDO01746.1|
  misc_feature (1)..(386): NCBI GI: 145603135 Blast Desc: MGG_04416 [Magnaporthe grisea 70-15] gi|145011442|gb|EDJ96098.1| MGG_04416 [Magnaporthe grisea 70-15]
  misc_feature (8)..(386): NCBI GI: 164424266 Blast Desc: NCU07417 [Neurospora crassa OR74A] gi|157070443|gb|EAA29182.2| conserved [Neurospora crassa OR74A]
  misc_feature (57)..(375): NCBI GI: 171687527 Blast Desc: protein product [Podospora anserina] gi|170943725|emb|CAP69377.1| protein product [Podospora anserina]
  misc_feature (97)..(386): NCBI GI: 116180676 Blast Desc: CHGG_00966 [Chaetomium globosum CBS 148.51] gi|88185263|gb|EAQ92731.1| CHGG_00966 [Chaetomium globosum CBS 148.51]
  misc_feature (1)..(386): NCBI GI: 189203091 Blast Desc: TLG2-vesicle protein of 38 kDa [Pyrenophora tritici-repentis Pt-1C-BFP] gi|187984980|gb|EDU50468.1| TLG2-vesicle protein of 38 kDa [Pyrenophora tritici-repentis
  misc_feature (72)..(375): NCBI GI: 169602427 Blast Desc: SNOG_04214 [Phaeosphaeria nodorum SN15] gi|111066854|gb|EAT87974.1| SNOG_04214 [Phaeosphaeria nodorum SN15]
  misc_feature (1)..(383): NCBI GI: 193806581 Blast Desc: SNOG_04214 [Phaeosphaeria nodorum SN15] gi|111066854|gb|EAT87974.1| SNOG_04214 [Phaeosphaeria nodorum SN15]
MPADYTSTAQALSLPISSPEPSPTSPDHPSDTPLPPWAGRGRAASGGRLHNMRRLSTPYSRGSDSDHRPFGQRMMQSSVSILNKLVRLGNSMTPVQQILAGVAGIVLLVLSILFLIFSHRIFSALRPLAEDWRKLPGGWVILFLLCSITAFPPLIGYSTTVTIAGFVYGFPGGWPIVASATVAGSTGAFIASRTVLSGYVDRLVGSDRRFVALGEVLRHDGLPVLTAIRFCPLPYSLSNGFLATIPSITPGRFALATAMATPKLLVHVFIGSRLATLGDDMSAGDRFINYASIALSAVIGLVVGLVIYRRTMRRAAELAIEERAANGDLPDPADYEDLEEGILGDHAESDAVALMDDDDISLWDTTEGPHDTYRDGDDTDSASPGK

SEQ ID NO: 8983 - DNA, 3978 bp, Muscodor strobelii
  misc_feature: SGI EST ID NO. CUFF.21575.1
  misc_feature: Variant of the nucleotide sequence at SEQ ID NO 8981
ttgaattccacttccaactggtcagagtcgggaaacctcgttcattgatgttcgaagagccatagttagagattctcctagccctttgatattctccccttttggtttggataatatccacgtcacagctcagcctccaatcctctaaccaccacataagcactacggttttgcgtttcgtttgacaacctctactattgcaagcaccctcttctggcgataccgatttctgtgtctgagcatcaattctacatcaattgtacttcatagaacgatggctacgtgaagatcgaacgacttacaaagtgtaactcaaacaacggcatcctagcttccgtccattccgaacttttgggtcccgcagtctttacagcaacatatcgaaataacaccagaagagttacatatactcacacatcgatgaatatcaccacatgatcctctagcaatgccagccgactacacatccacagcgcaagcgctgtccctccccatctcgtctccagagccctctcccacgtcgccagaccacccttccgacactcctctcccaccatgggcagggcgaggacgagccgccagcggcggacgactacacaacatgcgtcgcctctcaaccccgtattcgcgaggtagcgactccgatcaccggccgttcggccagagaatgatgcagtccagcgtctccatcctcaacaagctcgtacgactaggcaacagcatgacgcccgtgcaacagatcctcgcaggagtcgccggcatagtcctcctcgtcttgagcatactattcctaatcttctcccaccgtatattctccgccctccgccctctggccgaggattggcggaagttgcccggcggctgggtcatactgttcctcctatgctccatcacagctttcccgccattaataggctacagcacgaccgttaccatcgccggattcgtgtacggctttcccggcggctggcctatcgtagcctctgccaccgtagccgggtcgaccggtgccttcatcgcgagtcggacggtactcagcgggtatgtcgaccgtctcgtcggctcagacaggcggttcgtggctctcggcgaagtccttagacacgatggactccccgtcctgaccgccatccgcttctgccccttaccctacagtctaagcaacggcttcctcgccacgatccccagcataacgccaggccgcttcgctctcgcgacagccatggcgacgcccaagctcctcgtccacgtgttcatcggctcgcgtctcgcgaccctcggcgacgatatgtcggcaggagaccgtttcataaattacgcttccatagcgctcagtgccgtcatcgggctcgtcgtcggcttggtcatatatcgacgcactatgcgccgtgccgccgagctagctatcgaggagcgggccgctaatggtgatctgcctgaccccgcggactacgaggatctcgaggagggcattttgggggatcatgctgagagtgatgccgtggctcttatggacgatgatgatatatcactttgggatacgacagagggtccgcatgatacgtacagagatggagacgacacggactcagcttctcctggaaagtagattacgacaatagatttttagaattttggtgttcattactgggtcagctggttgtacttggtaagataggggtcatggattgcacggcgttctagttcaggaggggggttcatcgcgtcttggttggatcggtctgggttttgggcgtagatacaatggtatgaaatacaacatctcggcatctcactcgaatcaagaccaaatgatgtgaaacactatacaattttgctactttcatcgtctcgtcatatacttcgtttgcggcaagggtatcataaacagtgcaaagcctcatttaccccttccgttgctcgcacgctttccaaactccagcacgatggaatctaaatacaaccgtgcgccggcaatgctgctcctcgaaatcattacagtacaagtgcttcccttccatgcttgtcgatgctaaatatcagaatgaacgtaagccacaagatttgcaaagcaacaagttcatccaacgagacgttcaaagttttcagcggtgtcactattgctgttgtggctgaaaatgctgcataaattgaatggcttgctcgatagggtacccgatgaagacggggccagtgaaaaccatctgcggtgtgctgctttgcttcgagctagcaaattgctcggtgctcaagaaggcaggttgtgcgtggcgcgctgtagaagcttgtgccggcgtgaaggattgatgggctggcggaacatctgacatttccgctacttcttccttctctctccggttaatagggggcgagtcgttttccacgaacgaagccatcttcgtgtggtcaaatgggcactttccagtcttcttcacaggagtctcggtctcgggtatcggcgatggcatctggacaggagcaggcggaggggattcgggtcgtccctggttgttaccggaactgtgcgcatcaatgaactctacgggaacagatataccccacggcctggaaggcgattctcctacgcggatttctttcagaggacgatcacgatcaaagtgactctgcctctcctcttcctggtcgtgattcgaagcagcatcttctggatcgtctgcgacagtagcgctgacggtgtgtgcccaatcctgcactcggttgtttgaaccgtgctcgacctcgctctgcggtcgggtatcttgttcggggagcattggctgatggatcttcgtaagaccctcaaccatgctaaccaagtttccgtacttcgcatccaactttcttatgtgggcttcgtttttctggtatcgtcgcacacagacctcgtggcttcttggtagctcatgcttgtgcttctcgaggtagttcgcaatctcctccggagagtgctggtcgaggtagcgaatggggcactttgtagcagccggttgagagctagtgtcttcatacatggccgcgcatagtggatcaccagcatgcgatgttgcggcttgctggtcctgtccagcattctgcgatgcctgctcgttatgcggggagaagggacactcaagagaacccttcttgccctcgacagtgaagtcctgctcgagtatggtagacatggtggtcatggtagtagggtcaacactgtctttgctcctactagatcggctgctcttgctgaagtcggttagggacgaagcgacgcgtctgccttcgcggatgatcacggcgatttgatgtttagaattagagggcttgcggttgggtagaggaacaaaatttgtatttgctaaggaaggactgtgtagctcgggcggaacctgcagattcaccagagtgtctgccacctcaggcgcagcagtggcatacctgtcagccaagtactggaactgtttgaagacggcgttggtcagccagcgagcccagagcaggtgcatcatcagatagtagagggaggggtcgccttggaatcaggattcataaggtatagtatcggtcagtgatgcccagctgggcaactatcgatctagagctaaaaatggtctcatcatataaagggcgagatatccccactcgggaatgttgcggcattctttgtgggcgcgttgtagaaactgctgtgcatgctgcgcaggagatgcagtgttgtcaacgtacctgttcatgtgcatacctcagcttgtgctccaagatggtctgcctgtcgctcagattctgcacctcatcggcgagagcgttgaaggactcgaccaacgtctgagtgagaagctgggtgttcatgcctgctgctccctgcgctctaaaatctacgtcctcatgaagattctacggaatgaactggatggtatggatgaggagatggagagggaagaagcgggagagtaatgagaaatgtgaagaagaatgggcaacccgctagcaagtggactctga

SEQ ID NO: 8984 - DNA, 2190 bp, Muscodor strobelii
  misc_feature: SGI cDNA ID NO. 562790
  misc_feature: Encodes the peptide sequence at SEQ ID NO 8985
atggtttccgacgagacgtacgagctgtgcctccctatcctccaagaccccgatgtcgacgaagacgacaagacagacaagctggaagagctgttgaagaaggaaactacactctccggctcctcgttagagaatgcggtgctcgacgtgctatggcggcatcgtgaagtaggcgggagcgcagcctccccgcctcctatacgtcagacaatccttcgccgtccctcgcctgcctcgtggcgcggttcttctacaccagcctcgggatcacctcgcttgggtgtcagtccgcttgcgcccccaggcttcgtgcctacgagcctgagcaggacaaagtcgtctactgtctcgccgttttcgtccccacgcccgtccccacgccttgcgtttgccgcgccggtcattccgcacagtccgaacctcaacgcctacgagtttgcgaacgacacgagtcccgcacaggagatatttggggactttcaaactgaaaatgtcgattggttagtgagtgacgatgcgctcagtgtgacgtcctcggtaggagccgcgagcctgttgaacgcggcggcgcccgaatacgttgcgcagcagtctgatatgaccccttatgatatgctacgttccatactcggccagtctaagacggatgacgagatagagacggcccttgccttgcacggttatgatttaagtgccaccatcaccgctatgatggaatctcaaggctcagccgatgtgataaataccggctcgttcacgccggaagcaaaaagcgtgcttattggcaagtcaattactcccgaccccaggcccagtacgccctctgctcaacagaaggccggtataatctgcaagttctatttgtctaccggacagtgtcttcgcgcagattgccgatttagccatgacttgagtaatcatatctgcaagtattggattatgggcaactgtctagctggagatacctgcatattttctcacgatccggctcatctgttgaataaactcacactggatggcagcagtacgcctccccagaaatcacaaaatctgcaagtccaagacaccagcgcgttcccggcgctgcgtccgggaacacccgaattgaatccatatgcccccagcttcaactacacgggctctgctctcactccgccgccggggctgaaacccatgcatgcatttaacaatgacaacagtcgctcgcggtctcgcccaagtagtcggccccaaacgaaagatgggagtgtagcaccaatgatagacgataatgacgcattcccctctcttggggctgcttcgtccaaacctagcaagaagcatcatggaaaacgtggtcatggccatggtcacaaagaaaattttacacctagttctttagccgatattgtgaagatgtcgccagcacccagccctggacctagccggccagaggcaaagaaaatcggacgcaatggcagcgcgaccaatatcaggaatggtgagaacagcgccgcggctcaagcgatccctatgcctcagcacattccttggcttgagactggagacagagccaacagagcgtatctcaaggctcggggcgaggccatcaaacatggtggcctccggaataaattcctccagagtgcggcgcaggcttggaatcgcaatgatgctcgagctgcgaaagcgctcagtcttcgaggccagggcgagaacgatctgatgcgcaaagcccatcgcgaagccgcccgcgaactatacgaggcgcggaacaagagcaatgcgccgggctcggagatctacgtagacctccacggtctgcacccggaagaagcagtggagtatttagagcgggtgctacttgacaacaaccaggagagcaagcccgtgtatgcgatcacgggaacggggcatcacagcaagaacggcaaagacaaggttggcaaggcgattagaaatttcctcaacgagtggaggtatgcctatcgcgaattctcagtgccgggcgatcgcaacaatatgggaggcatcttgggaatcgatgctcggagctgggacaagtcgcttgctcgagagcccacgacggagacggcagagagcagcgaggaagtagacatacttagtcagggcgtcgagataggggacggccaagtcaaactgctagttcgcgatcctcctaaaggaccaagtggtaatagaagccgatga

SEQ ID NO: 8985 - protein, 729 aa, Muscodor strobelii
  misc_feature: SGI Peptide ID NO. 562790
  misc_feature (521)..(586): Pfam Id: PF08590 Pfam Desc: Domain of function (DUF1771)
  misc_feature (596)..(660): Pfam Id: PF01713 Pfam Desc: Smr domain
  misc_feature (596)..(656): Pfam Id: PF01713 Pfam Desc: Smr domain
  misc_feature (279)..(304): Pfam Id: PF00642 Pfam Desc: Zinc finger C-x8-C-x5-C-x3-H type (and similar)
  misc_feature (1)..(724): NCBI GI: 212534986 Blast Desc: CCCH zinc finger and SMR domain protein [Penicillium marneffei ATCC 18224] gi|210070048|gb|EEA24138.1| CCCH zinc finger and SMR domain protein [Penicillium marneffei ATCC 18224]
  misc_feature (1)..(723): NCBI GI: 189203093 Blast Desc: CCCH zinc finger and SMR domain containing protein [Pyrenophora tritici-repentis Pt-1C-BFP] gi|187984981|gb|EDU50469.1| CCCH zinc finger and SMR domain
  misc_feature (1)..(722): NCBI GI: 242791590 Blast Desc: CCCH zinc finger and SMR domain protein [Talaromyces stipitatus ATCC 10500] gi|218718376|gb|EED17796.1| CCCH zinc finger and SMR domain protein [Talaromyces stipitatus ATCC 10500]
  misc_feature (1)..(718): NCBI GI: 119499970 Blast Desc: CCCH zinc finger and SMR domain protein [Neosartorya fischeri NRRL 181] gi|119414907|gb|EAW24845.1| CCCH zinc finger and SMR domain protein [Neosartorya fischeri NRRL 181]
  misc_feature (1)..(718): NCBI GI: 70993364 Blast Desc: CCCH zinc finger and SMR domain protein [Aspergillus fumigatus Af293] gi|66849163|gb|EAL89491.1| CCCH zinc finger and SMR domain protein [Aspergillus fumigatus Af293] CCCH zinc finger
  misc_feature (1)..(717): NCBI GI: 67526241 Blast Desc: AN3578.2 [Aspergillus nidulans FGSC A4] gi|40740596|gb|EAA59786.1| AN3578.2 [Aspergillus nidulans FGSC A4] gi|259481897|tpe|CBF75847.1| TPA: CCCH zinc finger and SMR
  misc_feature (1)..(718): NCBI GI: 145229947 Blast Desc: An01g08600 [Aspergillus niger] gi|134055395|emb|CAK43949.1| protein product [Aspergillus niger]
  misc_feature (1)..(718): NCBI GI: 255947148 Blast Desc: Pc22g02970 [Penicillium chrysogenum Wisconsin 54-1255] gi|211591358|emb|CAP97585.1| Pc22g02970 [Penicillium chrysogenum Wisconsin 54-1255]
  misc_feature (1)..(718): NCBI GI: 238504148 Blast Desc: CCCH zinc finger and SMR domain protein [Aspergillus flavus NRRL3357] gi|220690777|gb|EED47126.1| CCCH zinc finger and SMR domain protein [Aspergillus flavus NRRL3357]
  misc_feature (1)..(718): NCBI GI: 169764591 Blast Desc: [Aspergillus oryzae RIB40] gi|83764621|dbj|BAE54765.1| protein product [Aspergillus oryzae]
MVSDETYELCLPILQDPDVDEDDKTDKLEELLKKETTLSGSSLENAVLDVLWRHREVGGSAASPPPIRQTILRRPSPASWRGSSTPASGSPRLGVSPLAPPGFVPTSLSRTKSSTVSPFSSPRPSPRLAFAAPVIPHSPNLNAYEFANDTSPAQEIFGDFQTENVDWLVSDDALSVTSSVGAASLLNAAAPEYVAQQSDMTPYDMLRSILGQSKTDDEIETALALHGYDLSATITAMMESQGSADVINTGSFTPEAKSVLIGKSITPDPRPSTPSAQQKAGIICKFYLSTGQCLRADCRFSHDLSNHICKYWIMGNCLAGDTCIFSHDPAHLLNKLTLDGSSTPPQKSQNLQVQDTSAFPALRPGTPELNPYAPSFNYTGSALTPPPGLKPMHAFNNDNSRSRSRPSSRPQTKDGSVAPMIDDNDAFPSLGAASSKPSKKHHGKRGHGHGHKENFTPSSLADIVKMSPAPSPGPSRPEAKKIGRNGSATNIRNGENSAAAQAIPMPQHIPWLETGDRANRAYLKARGEAIKHGGLRNKFLQSAAQAWNRNDARAAKALSLRGQGENDLMRKAHREAARELYEARNKSNAPGSEIYVDLHGLHPEEAVEYLERVLLDNNQESKPVYAITGTGHHSKNGKDKVGKAIRNFLNEWRYAYREFSVPGDRNNMGGILGIDARSWDKSLAREPTTETAESSEEVDILSQGVEIGDGQVKLLVRDPPKGPSGNRSR

SEQ ID NO: 8986 - DNA, 5658 bp, Muscodor strobelii
  misc_feature: SGI EST ID NO. CUFF.21538.0
  misc_feature: Variant of the nucleotide sequence at SEQ ID NO 8984
cttttcccggccacatttgcatcttatgtcttgactcacttctatatagcaaaccatccttcctgtacatcttggatgtattcccctcaaagctgccaaagaaagtccggcttgatcgggtcataactaagcctcagcatattgaagggatcgaatgaagaaacgaagccccttgtcccttgccaaatatttcttcctaggcatgtcctcttattgaaaggttatgaaatcataaattcacggaaggattcttttaccagctaagggtatccgggagggtgttcatttaatgttgtctgttatacgactttagatcaattccaagcatgttgttagcggaggatacgatctatggagggcgtcctgttcttgcaacctcagagaccagcaatgagcctgccactctcgaagccacgataattgccgactcaattccaattcatcctttaggtgttaagccgctgggcaaccagtattttgcatctgggccaaatgcccgccagttcttgggagccgtgggtcgattgcctgatgagatgatcttacatctactcgagtatctcgatgctgagtcacttgtgagtcttgcttcgacctgccgctttctctacgcatttggggagctggatgagttatggaaggccatttttcttgaatctcgacggatccctggagaagactcgttctggagaggatcatggaaggctacttacttcaacctttcatatgtgcaattgcagattgactgtagcaacgtcttctcagacgtcctgcatagaccatttgcttgtgctcatgttgacttgaagaactatgcgtcgagtgtaccggcggcaaacaacatttctcgactggaagagctcacttacgatgagtttgcacagacctggagcgacacaccattcatcctcaccaagtgcatacaatcttggcctgtatgcaagaattggagtattgaagagctctataaacaatactcaaatgttaagttccgagcggaagctgttgactggccgttctctgcctatcgtgagtacatggccaaaagcgaccgcgatgagagcccgttatatcttttcgatcgagccttcgcggagaagatgaaacttagtatcgggtcttctcaaacgaactcctcgtactggccgccggagtgctttgggccagacctttttgaagtcctaggcgcggagcggcctgcacatcggtggcttattgtcggaccagcacgtagcgggtcaacattccataaggatcccaacgcaacaagcgcatggaatgctgttatcgaaggtgtcaaatattggatcatgtttccaccagcaactcaggttcctggggtatatgtctcagaagacagcagcgaagtaacaagtcctctcagcattgcagagtggctcttggaatttcacgcagaggcccgacaagtgcccggatgtgtcgaaggcgtctgcaaggcgggcgaaatcttgcatgttcctagcgggtggtggcatttagttgtcaacctcgaagcaggcatagccctgacacaaaatttcgtacccaagtcacatttagtcgatgctctactctttctcaaagataagcccgatcaagtcaccggctttcaaaggaatatcgacagcccgtttgacttgtttaagcagcgtctagaagacagttatccaacgctgattcaacatgccgtcgaggaaattgaccggaaagcccaacacaaaaaacggaaatgggaagaggccgttggcacccagggtgagacagaaaatgaaggtagtggttttagctttgggtttgcgaccgaaagtgacgaagagataccatgaagttgttggacttcgggtttcgaaacagataattactggacagggggcaactggtatccttcttccagtcatttgaatgacatctgaaattggtcgtgatgatagcctcctcatagatgatgcgcagtgctgcctgttgtttgcggaaggaagcgacacatagcaacaaccatcttaagcccacgatgcgttggtctgcgtatatgagtagagatggatgttaaaaggcttggtgacttcccattcatggcgcaaaaggttagaggatgccttgaatgggttattgttggcgtttcgacgagagacaaactcactacctaggtagggaatagaacatgaggcacggtcagagcacggtgtcacacatttgtaacttcagtctcatattttaattcgtttcttgataactatcattacctattctcgcaattcttatcttcgggattattgtgtgatacccgatggtcgcaggtcctgtcaatcttcaatgaaccataattacctggcgcgcctggtgcagggagtgaggtcagcttctttgggggaccgtcatcccggcatcccacatcccactaatgacgctagtcaaggtcaggtaccctttgctcaagatttgggggagccaggcaagcgtgcgacttgaacatgagcctgcatcttaagcttaagctgagatatggctctcgctgcgagtcgcgacttatgtagctaaatgctgaggcgggctgcttgcatgtagtgcaggaggtatataacgtacctaatgtaatgcctcgatcatcattccctgacgcacgtgtcgacgcagatcagccgggacagcccaggacgccaggcatggatgtgacagcgagtgtgtgagcagtgctgagagcgccctgaaagaggtgcctgtcgagcttgtagtagcgtcttcccccacctgacatctccatccctcccgtcttcctcgccctttctcccgctctgtttagtcgccccttgaatgaacccccccaaccacaaccaacagccgcctctgctggctccccagcactggtccggatctggagcgccgccttgtttcgcgtgggtagcactgttgctttccagctgagtctctgaggctcactctcccgcttcttgctcctcccctccaatagatatactcgcccgcgcactcttcggcctcgtccggctacagggctgcttacgccctgcctcactcgtagtcccctccgtctcacgccatctgcatctgcgtctgcattgtgcacggctgcgcttattgttcgcctattgttcttcgtgttcgatttatagaataatacccaccgtcctctcgcgcccttgttgcgcgaggtatttgatctttttctctcactttccttttgctgtgtgttgctttcttcatcgtcccgtatccttcggatatcctctcgctcgagcacacttgtgcatcggggccgcgtaatcatggtttccgacgagacgtacgagctgtgcctccctatcctccaagaccccgatgtcgacgaagacgacaagacagacaagctggaagagctgttgaagaaggaaactacactctccggctcctcgttagagaatgcggtgctcgacgtgctatggcggcatcgtgaagtaggcgggagcgcagcctccccgcctcctatacgtcagacaatccttcgccgtccctcgcctgcctcgtggcgcggttcttctacaccagcctcgggatcacctcgcttgggtgtcagtccgcttgcgcccccaggcttcgtgcctacgagcctgagcaggacaaagtcgtctactgtctcgccgttttcgtccccacgcccgtccccacgccttgcgtttgccgcgccggtcattccgcacagtccgaacctcaacgcctacgagtttgcgaacgacacgagtcccgcacaggagatatttggggactttcaaactgaaaatgtcgattggttagtgagtgacgatgcgctcagtgtgacgtcctcggtaggagccgcgagcctgttgaacgcggcggcgcccgaatacgttgcgcagcagtctgatatgaccccttatgatatgctacgttccatactcggccagtctaagacggatgacgagatagagacggcccttgccttgcacggttatgatttaagtgccaccatcaccgctatgatggaatctcaaggctcagccgatgtgataaataccggctcgttcacgccggaagcaaaaagcgtgcttattggcaagtcaattactcccgaccccaggcccagtacgccctctgctcaacagaaggccggtataatctgcaagttctatttgtctaccggacagtgtcttcgcgcagattgccgatttagccatgacttgagtaatcatatctgcaagtattggattatgggcaactgtctagctggagatacctgcatattttctcacgatccggctcatctgttgaataaactcacactggatggcagcagtacgcctccccagaaatcacaaaatctgcaagtccaagacaccagcgcgttcccggcgctgcgtccgggaacacccgaattgaatccatatgcccccagcttcaactacacgggctctgctctcactccgccgccggggctgaaacccatgcatgcatttaacaatgacaacagtcgctcgcggtctcgcccaagtagtcggccccaaacgaaagatgggagtgtagcaccaatgatagacgataatgacgcattcccctctcttggggctgcttcgtccaaacctagcaagaagcatcatggaaaacgtggtcatggccatggtcacaaagaaaattttacacctagttctttagccgatattgtgaagatgtcgccagcacccagccctggacctagccggccagaggcaaagaaaatcggacgcaatggcagcgcgaccaatatcaggaatggtgagaacagcgccgcggctcaagcgatccctatgcctcagcacattccttggcttgagactggagacagagccaacagagcgtatctcaaggctcggggcgaggccatcaaacatggtggcctccggaataaattcctccagagtgcggcgcaggcttggaatcgcaatgatgctcgagctgcgaaagcgctcagtcttcgaggccagggcgagaacgatctgatgcgcaaagcccatcgcgaagccgcccgcgaactatacgaggcgcggaacaagagcaatgcgccgggctcggagatctacgtagacctccacggtctgcacccggaagaagcagtggagtatttagagcgggtgctacttgacaacaaccaggagagcaagcccgtgtatgcgatcacgggaacggggcatcacagcaagaacggcaaagacaaggttggcaaggcgattagaaatttcctcaacgagtggaggtatgcctatcgcgaattctcagtgccgggcgatcgcaacaatatgggaggcatcttgggaatcgatgctcggagctgggacaagtcgcttgctcgagagcccacgacggagacggcagagagcagcgaggaagtagacatacttagtcagggcgtcgagataggggacggccaagtcaaactgctagttcgcgatcctcctaaaggaccaagtggtaatagaagccgatgattacctgcggaatcaacacagaaataacgagcaagactagtttttttccccctaacttggtactaacttcaatgttgggagagtgtacggaaaggctgtggttcttttgtataagaatcgcagtgaacctgggtccgaatgctgctttctgtccgagatccaatatccatatagatcaagtgattcc

SEQ ID NO: 8987 - DNA, 1512 bp, Muscodor strobelii
  misc_feature: SGI cDNA ID NO. 562791
  misc_feature: Encodes the peptide sequence at SEQ ID NO 8988
atgttgttagcggaggatacgatctatggagggcgtcctgttcttgcaacctcagagaccagcaatgagcctgccactctcgaagccacgataattgccgactcaattccaattcatcctttaggtgttaagccgctgggcaaccagtattttgcatctgggccaaatgcccgccagttcttgggagccgtgggtcgattgcctgatgagatgatcttacatctactcgagtatctcgatgctgagtcacttgtgagtcttgcttcgacctgccgctttctctacgcatttggggagctggatgagttatggaaggccatttttcttgaaactggcggcagatctcgacggatccctggagaagactcgttctggagaggatcatggaaggctacttacttcaacctttcatatgtgcaattgcagattgactgtagcaacgtcttctcagacgtcctgcatagaccatttgcttgtgctcatgttgacttgaagaactatgcgtcgagtgtaccggcggcaaacaacatttctcgactggaagagctcacttacgatgagtttgcacagacctggagcgacacaccattcatcctcaccaagtgcatacaatcttggcctgtatgcaagaattggagtattgaagagctctataaacaatactcaaatgttaagttccgagcggaagctgttgactggccgttctctgcctatcgtgagtacatggccaaaagcgaccgcgatgagagcccgttatatcttttcgatcgagccttcgcggagaagatgaaacttagtatcgggtcttctcaaacgaactcctcgtactggccgccggagtgctttgggccagacctttttgaagtcctaggcgcggagcggcctgcacatcggtggcttattgtcggaccagcacgtagcgggtcaacattccataaggatcccaacgcaacaagcgcatggaatgctgttatcgaaggtgtcaaatattggatcatgtttccaccagcaactcaggttcctggggtatatgtctcagaagacagcagcgaagtaacaagtcctctcagcattgcagagtggctcttggaatttcacgcagaggcccgacaagtgcccggatgtgtcgaaggcgtctgcaaggcgggcgaaatcttgcatgttcctagcgggtggtggcatttagttgtcaacctcgaagcaggcatagccctgacacaaaatttcgtacccaagtcacatttagtcgatgctctactctttctcaaagataagcccgatcaagtcaccggctttcaaaggaatatcgacagcccgtttgacttgtttaagcagcgtctagaagacagttatccaacgctgattcaacatgccgtcgaggaaattgaccggaaagcccaacacaaaaaacggaaatgggaagaggccgttggcacccagggtgagacagaaaatgaaggtagtggttttagctttgggtttgcgaccgaaagtgacgaagagataccatga

SEQ ID NO: 8988 - protein, 503 aa, Muscodor strobelii
  misc_feature: SGI Peptide ID NO. 562791
  misc_feature (62)..(109): Pfam Id: PF00646 Pfam Desc: F-box domain
  misc_feature (299)..(409): Pfam Id: PF02373 Pfam Desc: JmjC domain
  misc_feature (66)..(109): Pfam Id: PF00646 Pfam Desc: F-box domain
  misc_feature (381)..(409): Pfam Id: PF02373 Pfam Desc: JmjC domain
  misc_feature (32)..(484): NCBI GI: 145603145 Blast Desc: MGG_04401 [Magnaporthe grisea 70-15] gi|145011447|gb|EDJ96103.1| MGG_04401 [Magnaporthe grisea 70-15]
  misc_feature (5)..(503): NCBI GI: 171687531 Blast Desc: protein product [Podospora anserina] gi|170943727|emb|CAP69379.1| protein product [Podospora anserina]
  misc_feature (26)..(486): NCBI GI: 256733102 Blast Desc: [Nectria haematococca mpVI 77-13-4]
  misc_feature (10)..(484): NCBI GI: 46124925 Blast Desc: FG06840.1 [Gibberella zeae PH-1]
  misc_feature (2)..(478): NCBI GI: 85090445 Blast Desc: NCU07419 [Neurospora crassa OR74A] gi|28919781|gb|EAA29184.1| conserved [Neurospora crassa OR74A]
  misc_feature (34)..(503): NCBI GI: 212546707 Blast Desc: F-box and JmjC domain protein, [Penicillium marneffei ATCC 18224] gi|210065027|gb|EEA19122.1| F-box and JmjC domain protein, [Penicillium marneffei ATCC 18224]
  misc_feature (34)..(503): NCBI GI: 242822580 Blast Desc: F-box and JmjC domain protein, [Talaromyces stipitatus ATCC 10500] gi|218712837|gb|EED12262.1| F-box and JmjC domain protein, [Talaromyces stipitatus ATCC 10500]
  misc_feature (28)..(485): NCBI GI: 255944865 Blast Desc: Pc20g06750 [Penicillium chrysogenum Wisconsin 54-1255] gi|211587935|emb|CAP86004.1| Pc20g06750 [Penicillium chrysogenum Wisconsin 54-1255]
  misc_feature (11)..(484): NCBI GI: 145233849 Blast Desc: An02g11690 [Aspergillus niger] gi|134057233|emb|CAK44497.1| protein product [Aspergillus niger]
  misc_feature (13)..(503): NCBI GI: 119492515 Blast Desc: F-box and JmjC domain protein, [Neosartorya fischeri NRRL 181] gi|119411783|gb|EAW21726.1| F-box and JmjC domain protein, [Neosartorya fischeri NRRL 181]
MLLAEDTIYGGRPVLATSETSNEPATLEATIIADSIPIHPLGVKPLGNQYFASGPNARQFLGAVGRLPDEMILHLLEYLDAESLVSLASTCRFLYAFGELDELWKAIFLETGGRSRRIPGEDSFWRGSWKATYFNLSYVQLQIDCSNVFSDVLHRPFACAHVDLKNYASSVPAANNISRLEELTYDEFAQTWSDTPFILTKCIQSWPVCKNWSIEELYKQYSNVKFRAEAVDWPFSAYREYMAKSDRDESPLYLFDRAFAEKMKLSIGSSQTNSSYWPPECFGPDLFEVLGAERPAHRWLIVGPARSGSTFHKDPNATSAWNAVIEGVKYWIMFPPATQVPGVYVSEDSSEVTSPLSIAEWLLEFHAEARQVPGCVEGVCKAGEILHVPSGWWHLVVNLEAGIALTQNFVPKSHLVDALLFLKDKPDQVTGFQRNIDSPFDLFKQRLEDSYPTLIQHAVEEIDRKAQHKKRKWEEAVGTQGETENEGSGFSFGFATESDEEIP

SEQ ID NO: 8989 - DNA, 5658 bp, Muscodor strobelii; identical to SEQ ID NO: 8986
  misc_feature: SGI EST ID NO. CUFF.21538.0
  misc_feature: Variant of the nucleotide sequence at SEQ ID NO 8987

SEQ ID NO: 8990 - DNA, 1194 bp, Muscodor strobelii
  misc_feature: SGI cDNA ID NO. 562792
  misc_feature: Reduced expression when VOC is produced
  misc_feature: Encodes the peptide sequence at SEQ ID NO 8991
atggctactgataaggggctcgaggacatcgagcagtcccaaatcgagtccaactatgacgagaccgtcgattctttcgatgagatgaacctgcgctcggagctgctccgaggtgtctacgcctatggtttcgagcgtccctctgctattcagcagcgcgctatcatgcccgtcatcaagggtcacgatgtaattgcgcaggctcagtctggtactggcaagaccgccaccttctccatctctgttcttcagaagatcgaccccaacgtcaagcagtgccaggccctcattctcgcccccacccgcgagcttgcccagcagattcagaaggtcgtcgtcgccatcggtgacttcatgagcattgagtgccatgcctgcatcggtggcaccagcgtccgtgaggatatgaaggctcttcaggacggccctcaggtcgtcgtcggcactcctggccgtgttcacgacatgatccagcgacgcttcctcaagactgacggcatgaagatgttcgtcttggacgaggccgatgagatgctttcgcgtggtttcactgagcaaatctatgacatcttccagctgctcccgcagtccacccaggttgtcctcctgtcggctaccatgccccaggatgttttggaggttaccaccaagttcatgcgcgaccccgtccgcattctcgtcaagaaggacgagcttaccctcgagggtatcaagcaattctacattgctgtcgagaaggaggagtggaagctcgacaccctgtccgatttgtacgagactgtcaccatcactcaggccgtcatcttctgcaacacccgcagaaaggttgattggctcactgacaagctcactgcccgtgacttcactgtctccgccatgcacggcgatatggaccaggctcagcgtgatctcatcatgaaggagttccgctctggctcctcccgtgttctcatcgccaccgatcttctcgctcgtggtatcgatgtgcagcaggtctccctcgttatcaactacgaccttcccgctaaccgcgagaactacatccaccgcatcggtcgtggtggtcgttttggccgaaaaggtgttgccatcaactttgtcactgctgaggatgtccgcatgatgcgtgagattgagcagttctacagcacccaaattgaagagatgccgatgaacgtggccgacctcatctaa
